(19) United States
(12) Patent Application Publication
(10) Pub. No.: US 2020/0405807 A1
(43) Pub. Date: Dec. 31, 2020

(54) Compositions and Formulations and Methods of Production and Use Thereof

(71) Applicant: Axcella Health Inc., Cambridge, MA (US)

(72) Inventors: Alison Williams, Cambridge, MA (US); Nathaniel W. Silver, Cambridge, MA (US); Andrew Downey, Lowell, MA (US); David V. Erbe, Arlington, MA (US); Michael J. Hamill, Wellesley, MA (US); David Arthur Berry, Brookline, MA (US)

(21) Appl. No.: 16/918,167

(22) Filed: Jul. 1, 2020

Related U.S. Application Data
(63) Continuation of application No. 15/724,916, filed on Oct. 4, 2017.
Application No. 15/724,916 is a continuation-in-part of application No. 15/024,648, filed on Mar. 24, 2016, now abandoned.
Application No. 15/724,916 is a continuation-in-part of application No. 15/024,644, filed on Mar. 24, 2016, now abandoned.
Application No. 15/724,916 is a continuation-in-part of application No. 15/024,641, now abandoned.
Application No. 15/724,916 is a continuation-in-part of application No. 15/024,639, filed on Mar. 24, 2016, now abandoned.
Application No. 15/724,916 is a continuation-in-part of application No. 15/024,636, filed on Mar. 24, 2016, now Pat. No. 9,878,004.
(60) Provisional application No. 61/882,198, filed on Sep. 25, 2013.
(60) Provisional application No. 61/906,862, filed on Nov. 20, 2013.
(60) Provisional application No. 61/882,211, filed on Sep. 25, 2013.
(60) Provisional application No. 61/882,212, filed on Sep. 25, 2013.
(60) Provisional application No. 61/882,214, filed on Sep. 25, 2013.
(60) Provisional application No. 61/882,219, filed on Sep. 25, 2013.
(60) Provisional application No. 61/882,220, filed on Sep. 25, 2013.
(60) Provisional application No. 61/882,222, filed on Sep. 25, 2013.
(60) Provisional application No. 61/882,225, filed on Sep. 25, 2013.
(60) Provisional application No. 61/882,229, filed on Sep. 25, 2013.
(60) Provisional application No. 61/882,232, filed on Sep. 25, 2013.
(60) Provisional application No. 61/882,234, filed on Sep. 25, 2013.
(60) Provisional application No. 61/882,235, filed on Sep. 25, 2013.
(60) Provisional application No. 61/882,240, filed on Sep. 25, 2013.
(60) Provisional application No. 61/882,246, filed on Sep. 25, 2013.
(60) Provisional application No. 61/882,250, filed on Sep. 25, 2013.
(60) Provisional application No. 61/882,254, filed on Sep. 25, 2013.
(60) Provisional application No. 61/882,260, filed on Sep. 25, 2013.
(60) Provisional application No. 61/882,264, filed on Sep. 25, 2013.
(60) Provisional application No. 61/882,267, filed on Sep. 25, 2013.
(60) Provisional application No. 61/882,271, filed on Sep. 25, 2013.
(60) Provisional application No. 61/882,180, filed on Sep. 25, 2013.
(60) Provisional application No. 61/882,274, filed on Sep. 25, 2013.
(60) Provisional application No. 61/882,295, filed on Sep. 25, 2013.
(60) Provisional application No. 61/882,300, filed on Sep. 25, 2013.
(60) Provisional application No. 61/882,305, filed on Sep. 25, 2013.
(60) Provisional application No. 61/882,189, filed on Sep. 25, 2013.
(60) Provisional application No. 61/882,129, filed on Sep. 25, 2013.
(60) Provisional application No. 61/882,180, filed on Sep. 25, 2013.
(60) Provisional application No. 61/906,862, filed on Nov. 20, 2013.
(60) Provisional application No. 61/882,189, filed on Sep. 25, 2013.
(60) Provisional application No. 61/882,211, filed on Sep. 25, 2013.
(60) Provisional application No. 61/882,212, filed on Sep. 25, 2013.
(60) Provisional application No. 61/882,214, filed on Sep. 25, 2013.
(60) Provisional application No. 61/882,219, filed on Sep. 25, 2013.
(60) Provisional application No. 61/882,220, filed on Sep. 25, 2013.
(60) Provisional application No. 61/882,222, filed on Sep. 25, 2013.
(60) Provisional application No. 61/882,225, filed on Sep. 25, 2013.
(60) Provisional application No. 61/882,229, filed on Sep. 25, 2013.
(60) Provisional application No. 61/882,232, filed on Sep. 25, 2013.
(60) Provisional application No. 61/882,234, filed on Sep. 25, 2013.
(60) Provisional application No. 61/882,235, filed on Sep. 25, 2013.
(60) Provisional application No. 61/882,240, filed on Sep. 25, 2013.
(60) Provisional application No. 61/882,243, filed on Sep. 25, 2013.
(60) Provisional application No. 61/882,246, filed on Sep. 25, 2013.
(60) Provisional application No. 61/882,250, filed on Sep. 25, 2013.
(60) Provisional application No. 61/882,254, filed on Sep. 25, 2013.
(60) Provisional application No. 61/882,260, filed on Sep. 25, 2013.
(60) Provisional application No. 61/882,264, filed on Sep. 25, 2013.
(60) Provisional application No. 61/882,267, filed on Sep. 25, 2013.
(60) Provisional application No. 61/882,271, filed on Sep. 25, 2013.
(60) Provisional application No. 61/882,274, filed on Sep. 25, 2013.
(60) Provisional application No. 61/882,295, filed on Sep. 25, 2013.
(60) Provisional application No. 61/882,300, filed on Sep. 25, 2013.
(60) Provisional application No. 61/882,305, filed on Sep. 25, 2013.
(60) Provisional application No. 61/882,189, filed on Sep. 25, 2013.
(60) Provisional application No. 61/882,129, filed on Sep. 25, 2013.
(60) Provisional application No. 61/882,180, filed on Sep. 25, 2013.
(60) Provisional application No. 61/882,198, filed on Sep. 25, 2013.
(60) Provisional application No. 61/882,198, filed on Sep. 25, 2013.
(60) Provisional application No. 61/882,212, filed on Sep. 25, 2013.
(60) Provisional application No. 61/882,214, filed on Sep. 25, 2013.
(60) Provisional application No. 61/882,219, filed on Sep. 25, 2013.
(60) Provisional application No. 61/882,220, filed on Sep. 25, 2013.
(60) Provisional application No. 61/882,222, filed on Sep. 25, 2013.
(60) Provisional application No. 61/882,225, filed on Sep. 25, 2013.
(60) Provisional application No. 61/882,229, filed on Sep. 25, 2013.
(60) Provisional application No. 61/882,232, filed on Sep. 25, 2013.
(60) Provisional application No. 61/882,234, filed on Sep. 25, 2013.
(60) Provisional application No. 61/882,235, filed on Sep. 25, 2013.
(60) Provisional application No. 61/882,240, filed on Sep. 25, 2013.
(60) Provisional application No. 61/882,243, filed on Sep. 25, 2013.
(60) Provisional application No. 61/882,246, filed on Sep. 25, 2013.
(60) Provisional application No. 61/882,250, filed on Sep. 25, 2013.
(60) Provisional application No. 61/882,254, filed on Sep. 25, 2013.
(60) Provisional application No. 61/882,260, filed on Sep. 25, 2013.
(60) Provisional application No. 61/882,264, filed on Sep. 25, 2013.
(60) Provisional application No. 61/882,267, filed on Sep. 25, 2013.
(60) Provisional application No. 61/882,271, filed on Sep. 25, 2013.
(60) Provisional application No. 61/882,274, filed on Sep. 25, 2013.
(60) Provisional application No. 61/882,295, filed on Sep. 25, 2013.
(60) Provisional application No. 61/882,300, filed on Sep. 25, 2013.
(60) Provisional application No. 61/882,305, filed on Sep. 25, 2013.
(60) Provisional application No. 61/882,189, filed on Sep. 25, 2013.
(60) Provisional application No. 61/882,129, filed on Sep. 25, 2013.
(60) Provisional application No. 61/882,180, filed on Sep. 25, 2013.
(60) Provisional application No. 61/906,862, filed on Nov. 20, 2013.
(60) Provisional application No. 61/882,198, filed on Sep. 25, 2013.
(60) Provisional application No. 61/882,211, filed on Sep. 25, 2013.
(60) Provisional application No. 61/882,212, filed on Sep. 25, 2013.
(60) Provisional application No. 61/882,214, filed on Sep. 25, 2013.
(60) Provisional application No. 61/882,219, filed on Sep. 25, 2013.
(60) Provisional application No. 61/882,220, filed on Sep. 25, 2013.
(60) Provisional application No. 61/882,222, filed on Sep. 25, 2013.
(60) Provisional application No. 61/882,225, filed on Sep. 25, 2013.
(60) Provisional application No. 61/882,229, filed on Sep. 25, 2013.
(60) Provisional application No. 61/882,232, filed on Sep. 25, 2013.
(60) Provisional application No. 61/882,234, filed on Sep. 25, 2013.
(60) Provisional application No. 61/882,235, filed on Sep. 25, 2013.
(60) Provisional application No. 61/882,240, filed on Sep. 25, 2013.
(60) Provisional application No. 61/882,243, filed on Sep. 25, 2013.
(60) Provisional application No. 61/882,246, filed on Sep. 25, 2013.
(60) Provisional application No. 61/882,250, filed on Sep. 25, 2013.
(60) Provisional application No. 61/882,254, filed on Sep. 25, 2013.
(60) Provisional application No. 61/882,260, filed on Sep. 25, 2013.
(60) Provisional application No. 61/882,264, filed on Sep. 25, 2013.
(60) Provisional application No. 61/882,267, filed on Sep. 25, 2013.
(60) Provisional application No. 61/882,274, filed on Sep. 25, 2013.
(60) Provisional application No. 61/882,295, filed on Sep. 25, 2013.
(60) Provisional application No. 61/882,300, filed on Sep. 25, 2013.
(60) Provisional application No. 61/882,305, filed on Sep. 25, 2013.
(60) Provisional application No. 61/882,189, filed on Sep. 25, 2013.
(60) Provisional application No. 61/882,129, filed on Sep. 25, 2013.
(60) Provisional application No. 61/882,180, filed on Sep. 25, 2013.
(60) Provisional application No. 61/906,862, filed on Nov. 20, 2013.
(60) Provisional application No. 61/882,198, filed on Sep. 25, 2013.
(60) Provisional application No. 61/882,211, filed on Sep. 25, 2013.
(60) Provisional application No. 61/882,212, filed on Sep. 25, 2013.
(60) Provisional application No. 61/882,214, filed on Sep. 25, 2013.
(60) Provisional application No. 61/882,219, filed on Sep. 25, 2013.
(60) Provisional application No. 61/882,220, filed on Sep. 25, 2013.
(60) Provisional application No. 61/882,222, filed on Sep. 25, 2013.
(60) Provisional application No. 61/882,225, filed on Sep. 25, 2013.
(60) Provisional application No. 61/882,229, filed on Sep. 25, 2013.
(60) Provisional application No. 61/882,232, filed on Sep. 25, 2013.
(60) Provisional application No. 61/882,234, filed on Sep. 25, 2013.
(60) Provisional application No. 61/882,235, filed on Sep. 25, 2013.
(60) Provisional application No. 61/882,240, filed on Sep. 25, 2013.
(60) Provisional application No. 61/882,243, filed on Sep. 25, 2013.
(60) Provisional application No. 61/882,246, filed on Sep. 25, 2013.
(60) Provisional application No. 61/882,250, filed on Sep. 25, 2013.
(60) Provisional application No. 61/882,254, filed on Sep. 25, 2013.
(60) Provisional application No. 61/882,260, filed on Sep. 25, 2013.
(60) Provisional application No. 61/882,264, filed on Sep. 25, 2013.
(60) Provisional application No. 61/882,267, filed on Sep. 25, 2013.
(60) Provisional application No. 61/882,271, filed on Sep. 25, 2013.
(60) Provisional application No. 61/882,274, filed on Sep. 25, 2013.
(60) Provisional application No. 61/882,295, filed on Sep. 25, 2013.
(60) Provisional application No. 61/882,300, filed on Sep. 25, 2013.
(60) Provisional application No. 61/882,305, filed on Sep. 25, 2013.
(60) Provisional application No. 61/882,189, filed on Sep. 25, 2013.
(60) Provisional application No. 61/882,129, filed on Sep. 25, 2013.
(60) Provisional application No. 61/882,180, filed on Sep. 25, 2013.
(60) Provisional application No. 61/906,862, filed on Nov. 20, 2013.
(60) Provisional application No. 61/882,243, filed on Sep. 25, 2013.

(51) Int. Cl. A61K 38/17; A23L 33/175; A23L 33/18; A61P 21/00; C07K 14/00; G01N 33/66; G01N 33/53

(52) U.S. Cl. CPC A61K 38/17; A23L 33/175; A23L 33/18; A61K 9/0053; C07K 14/001; G01N 33/66; G01N 33/53; A61P 21/00

(57) ABSTRACT

Nutritive polypeptides are provided herein. Also provided are various other embodiments including nucleic acids encoding the polypeptides, recombinant microorganisms that make the polypeptides, vectors for expressing the polypeptides, methods of making the polypeptides using recombinant microorganisms, compositions and formulations that comprise the polypeptides, and methods of using the polypeptides, compositions and formulations.

### CROSS REFERENCE TO RELATED APPLICATIONS

[0001] This application is a continuation of U.S. application Ser. No. 15/724,916, filed Oct. 4, 2017, which is a continuation-in-part of U.S. application Ser. No. 15/024,648, filed Mar. 24, 2016, (abandoned); which is the National Stage of International Application No. PCT/US2014/057546, filed Sep. 25, 2014, published in English under PCT Article 21(2); which claims the benefit of U.S. Provisional Application No. 61/906,862, filed Nov. 20, 2013; U.S. Provisional Application No. 61/882,198, filed Sep. 25, 2013; U.S. Provisional Application No. 61/882,211 filed, Sep. 25, 2013; U.S. Provisional Application No. 61/882,212 filed, Sep. 25, 2013; U.S. Provisional Application No. 61/882,214 filed, Sep. 25, 2013; U.S. Provisional Application No. 61/882,219 filed, Sep. 25, 2013; U.S. Provisional Application No. 61/882,220 filed, Sep. 25, 2013; U.S. Provisional Application No. 61/882,222 filed, Sep. 25, 2013; U.S. Provisional Application No. 61/882,225 filed, Sep. 25, 2013; U.S. Provisional Application No. 61/882,229 filed, Sep. 25, 2013; U.S. Provisional Application No. 61/882,232 filed, Sep. 25, 2013; U.S. Provisional Application No. 61/882,234 filed, Sep. 25, 2013; U.S. Provisional Application No. 61/882,235 filed, Sep. 25, 2013; U.S. Provisional Application No. 61/882,240 filed, Sep. 25, 2013; U.S. Provisional Application No. 61/882,246 filed, Sep. 25, 2013; U.S. Provisional Application No. 61/882,250 filed, Sep. 25, 2013; U.S. Provisional Application No. 61/882,254 filed, Sep. 25, 2013; U.S. Provisional Application No. 61/882,260 filed, Sep. 25, 2013; U.S. Provisional Application No. 61/882,264 filed, Sep. 25, 2013; U.S. Provisional Application No. 61/882,267 filed, Sep. 25, 2013; U.S. Provisional Application No. 61/882,271 filed, Sep. 25, 2013; U.S. Provisional Application No. 61/882,274 filed, Sep. 25, 2013; U.S. Provisional Application No. 61/882,295 filed, Sep. 25, 2013; U.S. Provisional Application No. 61/882,300 filed, Sep. 25, 2013; U.S. Provisional Application No. 61/882,305 filed, Sep. 25, 2013; U.S. Provisional Application No. 61/882,189 filed, Sep. 25, 2013; U.S. Provisional Application No. 61/882,129 filed, Sep. 25, 2013; U.S. Provisional Application No. 61/882,180 filed, Sep. 25, 2013. This application is a continuation-in-part of U.S. application Ser. No. 15/024,644, filed Mar. 24, 2016, (abandoned); which is the National Stage of International Application No. PCT/US2014/057543, filed Sep. 25, 2014, published in English under PCT Article 21(2); which claims the benefit of U.S. Provisional Application No. 61/906,862 filed, Nov. 20, 2013; which claims the benefit of U.S. Provisional Application No. 61/906,862 filed, Nov. 20, 2013; which claims the benefit of U.S. Provisional Application No. 61/882,198 filed, Sep. 25, 2013; which claims the benefit of U.S. Provisional Application No. 61/882,211 filed, Sep. 25, 2013; which claims the benefit of U.S. Provisional Application No. 61/882,212 filed, Sep. 25, 2013; which claims the benefit of U.S. Provisional Application No. 61/882,214 filed, Sep. 25, 2013; which claims the benefit of U.S. Provisional Application No. 61/882,219 filed, Sep. 25, 2013; which claims the benefit of U.S. Provisional Application No. 61/882,220 filed, Sep. 25, 2013; which claims the benefit of U.S. Provisional Application No. 61/882,222 filed, Sep. 25, 2013; which claims the benefit of U.S. Provisional Application No. 61/882,225 filed, Sep. 25, 2013; which claims the benefit of U.S. Provisional Application No. 61/882,229 filed, Sep. 25, 2013; which claims the benefit of U.S. Provisional Application No. 61/882,232 filed, Sep. 25, 2013; which claims the benefit of U.S. Provisional Application No. 61/882,234 filed, Sep. 25, 2013; which claims the benefit of U.S. Provisional Application No. 61/882,235 filed, Sep. 25, 2013; which claims the benefit of U.S. Provisional Application No. 61/882,240 filed, Sep. 25, 2013; which claims the benefit of U.S. Provisional Application No. 61/882,243 filed, Sep. 25, 2013; which claims the benefit of U.S. Provisional Application No. 61/882,246 filed, Sep. 25, 2013; which claims the benefit of U.S. Provisional Application No. 61/882,250 filed, Sep. 25, 2013; which claims the benefit of U.S. Provisional Application No. 61/882,254 filed, Sep. 25, 2013; which claims the benefit of U.S. Provisional Application No. 61/882,260 filed, Sep. 25, 2013; which claims the benefit of U.S. Provisional Application No. 61/882,264 filed, Sep. 25, 2013; which claims the benefit of U.S. Provisional Application No. 61/882,267 filed, Sep. 25, 2013; which claims the benefit of U.S. Provisional Application No. 61/882,271 filed, Sep. 25, 2013; which claims the benefit of U.S. Provisional Application No. 61/882,274 filed, Sep. 25, 2013; which claims the benefit of U.S. Provisional Application No. 61/882,295 filed, Sep. 25, 2013; which claims the benefit of U.S. Provisional Application No. 61/882,300 filed, Sep. 25, 2013; which claims the benefit of U.S. Provisional Application No. 61/882,305 filed, September 25, which claims the benefit of U.S. Provisional Application No. 61/882,189 filed, Sep. 25, 2013; which claims the benefit of U.S. Provisional Application No. 61/882,129 filed, Sep. 25, 2013; which claims the benefit of U.S. Provisional Application No. 61/882,180 filed, Sep. 25, 2013. This application is a continuation-in-part of U.S. application Ser. No. 15/024,641, filed Mar. 24, 2016, (abandoned); which is the National Stage of International Application No. PCT/US2014/057542, filed Sep. 25, 2014, published in English under PCT Article 21(2); which claims the benefit of U.S. Provisional Application No. 61/906,862 filed, Nov. 20, 2013; which claims the benefit of U.S. Provisional Application No. 61/882,198 filed, Sep. 25, 2013; which claims the benefit of U.S. Provisional Application No. 61/882,211 filed, Sep. 25, 2013; which claims the benefit of U.S. Provisional Application No. 61/882,212 filed, Sep. 25, 2013; which claims the benefit of U.S. Provisional Application No. 61/882,214 filed, Sep. 25, 2013; which claims the benefit of U.S. Provisional Application No. 61/882,219 filed, Sep. 25, 2013; which claims the benefit of U.S. Provisional Application No. 61/882,220 filed, Sep. 25, 2013; which claims the benefit of U.S. Provisional Application No. 61/882,222 filed, Sep. 25, 2013; which claims the benefit of U.S. Provisional Application No. 61/882,225 filed, Sep. 25, 2013; which claims the benefit of U.S. Provisional Application No. 61/882,229 filed, Sep. 25, 2013; which claims the benefit of U.S. Provisional Application No. 61/882,232 filed, Sep. 25, 2013; which claims the benefit of U.S. Provisional Application No. 61/882,234 filed, Sep. 25, 2013; which claims the benefit of U.S. Provisional Application No. 61/882,235 filed, Sep. 25, 2013; which claims the benefit of U.S. Provisional Application No. 61/882,240 filed, Sep. 25, 2013; which claims the benefit of U.S. Provisional Application No. 61/882,243 filed, Sep. 25, 2013; which claims the benefit of U.S. Provisional Application No. 61/882,246 filed, Sep. 25, 2013; which claims the benefit of U.S. Provisional Application No. 61/882,250 filed, Sep. 25, 2013; which claims the benefit of U.S. Provisional Application No. 61/882,254 filed, Sep. 25, 2013; which claims the benefit of U.S. Provisional Application No. 61/882,260 filed, Sep. 25, 2013; which claims the benefit of U.S. Provisional Application No. 61/882,264 filed, Sep. 25, 2013; which claims the benefit of U.S. Provisional Application No. 61/882,267 filed, Sep. 25, 2013; which claims the benefit of U.S. Provisional Application No. 61/882,271 filed, Sep. 25, 2013; which claims the benefit of U.S. Provisional Application No. 61/882,274 filed, Sep. 25, 2013; which claims the benefit of U.S. Provisional Application No. 61/882,295 filed, Sep. 25, 2013; which claims the benefit of U.S. Provisional Application No. 61/882,300 filed, Sep. 25, 2013; which claims the benefit of U.S. Provisional Application No. 61/882,305 filed, Sep. 25, 2013; which claims the benefit of U.S. Provisional Application No. 61/882,189 filed, Sep. 25, 2013; which claims the benefit of U.S. Provisional Application No. 61/882,129 filed, Sep. 25, 2013; which claims the benefit of U.S. Provisional Application No. 61/882,180 filed, Sep. 25, 2013. This application is a continuation-in-part of U.S. application Ser. No. 15/024,639, filed Mar. 24, 2016, (abandoned); which is the National Stage of International Application No. PCT/US2014/057537, filed Sep. 25, 2014, published in English under PCT Article 21(2); which claims the benefit of U.S. Provisional Application No. 61/906,862 filed, Nov. 20, 2013; which claims the benefit of U.S. Provisional Application No. 61/882,198 filed, Sep. 25, 2013; which claims the benefit of U.S. Provisional Application No. 61/882,211 filed, Sep. 25, 2013; which claims the benefit of U.S. Provisional Application No. 61/882,212 filed, Sep. 25, 2013; which claims the benefit of U.S. Provisional Application No. 61/882,214 filed, Sep. 25, 2013; which claims the benefit of U.S. Provisional Application No. 61/882,219 filed, Sep. 25, 2013; which claims the benefit of U.S. Provisional Application No. 61/882,220 filed, Sep. 25, 2013; which claims the benefit of U.S. Provisional Application No. 61/882,222 filed, Sep. 25, 2013; which claims the benefit of U.S. Provisional Application No. 61/882,225 filed, Sep. 25, 2013; which claims the benefit of U.S. Provisional Application No. 61/882,229 filed, Sep. 25, 2013; which claims the benefit of U.S. Provisional Application No. 61/882,232 filed, Sep. 25, 2013; which claims the benefit of U.S. Provisional Application No. 61/882,234 filed, Sep. 25, 2013; which claims the benefit of U.S. Provisional Application No. 61/882,235 filed, Sep. 25, 2013; which claims the benefit of U.S. Provisional Application No. 61/882,240 filed, Sep. 25, 2013; which claims the benefit of U.S. Provisional Application No. 61/882,243 filed, Sep. 25, 2013; which claims the benefit of U.S. Provisional Application No. 61/882,246 filed, Sep. 25, 2013; which claims the benefit of U.S. Provisional Application No. 61/882,250 filed, Sep. 25, 2013; which claims the benefit of U.S. Provisional Application No. 61/882,254 filed, Sep. 25, 2013; which claims the benefit of U.S. Provisional Application No. 61/882,260 filed, Sep. 25, 2013; which claims the benefit of U.S. Provisional Application No. 61/882,264 filed, Sep. 25, 2013; which claims the benefit of U.S. Provisional Application No. 61/882,267 filed, Sep. 25, 2013; which claims the benefit of U.S. Provisional Application No. 61/882,271 filed, Sep. 25, 2013; which claims the benefit of U.S. Provisional Application No. 61/882,274 filed, Sep. 25, 2013; which claims the benefit of U.S. Provisional Application No. 61/882,295 filed, Sep. 25, 2013; which claims the benefit of U.S. Provisional Application No. 61/882,300 filed, Sep. 25, 2013; which claims the benefit of U.S. Provisional Application No. 61/882,305 filed, Sep. 25, 2013; which claims the benefit of U.S. Provisional Application No. 61/882,189 filed, Sep. 25, 2013; which claims the benefit of U.S. Provisional Application No. 61/882,129 filed, Sep. 25, 2013; which claims the benefit of U.S. Provisional Application No. 61/882,180 filed, Sep. 25, 2013. This application is a continuation-in-part of U.S. application Ser. No. 15/024,636, filed Mar. 24, 2016, now U.S. Pat. No. 9,878,004, issued Jan. 30, 2018; which is the National Stage of International Application No. PCT/US2014/057534, filed Sep. 25, 2014, published in English under PCT Article 21(2); which claims the benefit of U.S. Provisional Application No. 61/906,862 filed, Nov. 20, 2013; which claims the benefit of U.S. Provisional Application No. 61/882,198 filed, Sep. 25, 2013; which claims the benefit of U.S. Provisional Application No. 61/882,211 filed, Sep. 25, 2013; which claims the benefit of U.S. Provisional Application No. 61/882,212 filed, Sep. 25, 2013; which claims the benefit of U.S. Provisional Application No. 61/882,214 filed, Sep. 25, 2013; which claims the benefit of U.S. Provisional Application No. 61/882,219 filed, Sep. 25, 2013; which claims the benefit of U.S. Provisional Application No. 61/882,220 filed, Sep. 25, 2013; which claims the benefit of U.S. Provisional Application No. 61/882,222 filed, Sep. 25, 2013; which claims the benefit of U.S. Provisional Application No. 61/882,225 filed, Sep. 25, 2013; which claims the benefit of U.S. Provisional Application No. 61/882,229 filed, Sep. 25, 2013; which claims the benefit of U.S. Provisional Application No. 61/882,232 filed, Sep. 25, 2013; which claims the benefit of U.S. Provisional Application No. 61/882,234 filed, Sep. 25, 2013; which claims the benefit of U.S. Provisional Application No. 61/882,235 filed, Sep. 25, 2013; which claims the benefit of U.S. Provisional Application No. 61/882,240 filed, Sep. 25, 2013; which claims the benefit of U.S. Provisional Application No. 61/882,243 filed, Sep. 25, 2013; which claims the benefit of U.S. Provisional Application No. 61/882,246 filed, Sep. 25, 2013; which claims the benefit of U.S. Provisional Application No. 61/882,250 filed, Sep. 25, 2013; which claims the benefit of U.S. Provisional Application No. 61/882,254 filed, Sep. 25, 2013; which claims the benefit of U.S. Provisional Application No. 61/882,260 filed, Sep. 25, 2013; which claims the benefit of U.S. Provisional Application No. 61/882,264 filed, Sep. 25, 2013; which claims the benefit of U.S. Provisional Application No. 61/882,267 filed, Sep. 25, 2013; which claims the benefit of U.S. Provisional Application No. 61/882,271 filed, Sep. 25, 2013; which claims the benefit of U.S. Provisional Application No. 61/882,274 filed, Sep. 25, 2013; which claims the benefit of U.S. Provisional Application No. 61/882,295 filed, Sep. 25, 2013; which claims the benefit of U.S. Provisional Application No. 61/882,300 filed, Sep. 25, 2013; which claims the benefit of U.S. Provisional Application No. 61/882,305 filed, Sep. 25, 2013; which claims the benefit of U.S. Provisional Application No. 61/882,189 filed, Sep. 25, 2013; which claims the benefit of U.S. Provisional Application No. 61/882,129 filed, Sep. 25, 2013; which claims the benefit of U.S. Provisional Application No. 61/882,180 filed, Sep. 25, 2013. which are herein incorporated in their entirety by reference.

### SEQUENCE LISTING

[0002] The instant application contains a Sequence Listing which has been submitted via EFS-Web and is hereby incorporated by reference in its entirety. Said ASCII copy, created on Jun. 7, 2019, is named AXC-077 SL.txt, and is 6 kilobytes in size.

### BACKGROUND

[0003] Dietary protein is an essential nutrient for human health and growth. The World Health Organization recommends that dietary protein should contribute approximately 10 to 15% of energy intake when in energy balance and weight stable. Average daily protein intakes in various countries indicate that these recommendations are consistent with the amount of protein being consumed worldwide. Meals with an average of 20 to 30% of energy from protein are representative of high-protein diets when consumed in energy balance. The body cannot synthesize certain amino acids that are necessary for health and growth, and instead must obtain them from food. These amino acids, called “essential amino acids”, are Histidine (H), Isoleucine (I), Leucine (L), Lysine (K), Methionine (M), Phenylalanine (F), Threonine (T), Tryptophan (W), and Valine (V). Dietary protein sources that provide all the essential amino acids are referred to as “high quality” proteins. Animal foods such as meat, fish, poultry, eggs, and dairy products are generally regarded as high quality protein sources that provide a good balance of essential amino acids. Casein (a protein commonly found in mammalian milk, making up 80% of the proteins in cow milk) and whey (the protein in the liquid that remains after milk has been curdled and strained) are major sources of high quality dietary protein. Foods that do not provide a good balance of essential amino acids are referred to as “low quality” protein sources. Most fruits and vegetables are poor sources of protein. Some plant foods including beans, peas, lentils, nuts and grains (such as wheat) are better sources of protein but may have allergenicity issues. Soy, a vegetable protein manufactured from soybeans, is considered by some to be a high quality protein. Studies of high protein diets for weight loss have shown that protein positively affects energy expenditure and lean body mass. Further studies have shown that overeating produces significantly less weight gain in diets containing at least 5% of energy from protein, and that a high-protein diet decreases energy intake. Proteins commonly found in foods do not necessarily provide an amino acid composition that meets the amino acid requirements of a mammal, such as a human, in an efficient manner. The result is that, in order to attain the minimal requirements of each essential amino acid, a larger amount of total protein must be consumed in the diet than would be required if the quality of the dietary protein were higher. By increasing the quality of the protein in the diet it is possible to reduce the total amount of protein that must be consumed compared to diets that include lower quality proteins. Traditionally, desirable mixtures of amino acids, such as mixtures comprising essential amino acids, have been provided by hydrolyzing a protein with relatively high levels of essential amino acids, such as whey protein, and/or by combining free amino acids in a mixture that optionally also includes a hydrolyzed protein such as whey. Mixtures of this type may have a bitter taste, undesirable mouthfeel and are poorly soluble, and may be deemed unsuitable or undesirable for certain uses. As a result, such mixtures sometimes include flavoring agents to mask the taste of the free amino acids and/or hydrolyzed protein. In some cases compositions in which a proportion of the amino acid content is provided by polypeptides or proteins are found to have a better taste than compositions with a high proportion of total amino acids provided as free amino acids and/or certain hydrolyzed proteins. The availability of such compositions has been limited, however, because nutritional formulations have traditionally been made from protein isolated from natural food products, such as whey isolated from milk, or soy protein isolated from soy. The amino acid profiles of those proteins do not necessarily meet the amino acid requirements for a mammal. In addition, commodity proteins typically consist of mixtures of proteins and/or protein hydrolysates which can vary in their protein composition, thus leading to unpredictability regarding their nutritional value. Moreover, the limited number of sources of such high quality proteins has meant that only certain combinations of amino acids are available on a large scale for ingestion in protein form. The agricultural methods required for the supply of high quality animal protein sources such as casein and whey, eggs, and meat, as well as plant proteins such as soy, also require significant energy inputs and have potentially deleterious environmental impacts. Accordingly, it would be useful in certain situations to have alternative sources and methods of supplying proteins for mammalian consumption. One feature that can enhance the utility of a nutritive protein is its solubility. Nutritive proteins with higher solubility can exhibit desirable characteristics such as increased stability, resistance to aggregation, and desirable taste profiles. For example, a nutritive protein that exhibits enhanced solubility can be formulated into a beverage or liquid formulation that includes a high concentration of nutritive protein in a relatively low volume of solution, thus delivering a large dose of protein nutrition per unit volume. A soluble nutritive protein can be useful in sports drinks or recovery drinks wherein a user (e.g., an athlete) wants to ingest nutritive protein before, during or after physical activity. A nutritive protein that exhibits enhanced solubility can also be particularly useful in a clinical setting wherein a subject (e.g., a patient or an elderly person) is in need of protein nutrition but is unable to consume solid foods or large volumes of liquids.

### SUMMARY OF THE INVENTION

[0004] In one aspect, the invention provides methods of preventing or reducing loss of muscle mass and/or muscle function in a human subject, including the steps of: i) identifying a human subject suffering from or at risk of a gastrointestinal protein malabsorption disease, disorder or condition, and ii) administering to the human subject a nutritional formulation in an amount sufficient to prevent or reduce a loss of muscle mass and/or muscle function, wherein the nutritional formulation includes an isolated nutritive polypeptide including an amino acid sequence at least about 90% identical over at least about 50 amino acids to a polypeptide sequence provided herein; wherein the formulation includes at least 1.0 g of the nutritive polypeptide; wherein the formulation is present as a liquid, semi-liquid or gel in a volume not greater than about 500 ml or as a solid or semi-solid in a total mass not greater than about 200 g; and wherein the formulation is substantially free of non-comestible products. In one embodiment, the human subject is suffering from a gastrointestinal protein malabsorption disease, disorder or condition and has received one or more doses of a pharmaceutical composition, wherein administration of the pharmaceutical composition increases a risk of loss of muscle mass and/or muscle function. In one embodiment, the human subject is suffering from a gastrointestinal protein malabsorption disease, disorder or condition and has received one or more doses of a pharmaceutical composition, wherein i) the disease, disorder or condition or ii) the administration of the pharmaceutical composition, or both i) and ii) increases a risk of loss of muscle mass and/or muscle function.

[0005] In another aspect, the invention provides methods of treating a gastrointestinal protein malabsorption disease, disorder or condition in a human subject in need thereof, including the step of administering to the human subject a nutritional formulation in an amount sufficient to treat such disease, disorder or condition, wherein the nutritional formulation includes an isolated nutritive polypeptide including an amino acid sequence at least about 90% identical over at least about 50 amino acids to a polypeptide sequence provided herein; wherein the formulation includes at least 1.0 g of the nutritive polypeptide. In one embodiment, the formulation is administered on a dosage schedule sufficient to provide substantial protein nutrition to the human subject in the absence of consumption by the subject of an agriculturally-derived food product.

[0006] In another aspect, the invention provides methods of reducing the risk of a human subject developing a gastrointestinal protein malabsorption disease, disorder or condition characterized or exacerbated by protein malnourishment, including the steps of (i) identifying the human subject as being at risk of developing the disease, disorder or condition; and (ii) administering in one or more doses a nutritional formulation including an isolated nutritive polypeptide including an amino acid sequence at least about 90% identical over at least about 50 amino acids to a polypeptide sequence provided herein; wherein the formulation includes at least 1.0 g of the nutritive polypeptide. In one embodiment, the human subject is at risk of developing malnutrition or protein malnutrition. In one embodiment, the human subject has a dysphagia. In one embodiment, the human subject has an oropharyngeal dysphagia. In one embodiment, the human subject has an esophageal dysphagia. In one embodiment, the human subject has a functional dysphagia. In one embodiment, the human subject has a gastrointestinal disorder or a short bowel syndrome gastrointestinal disorder. In one embodiment, the nutritional formulation is administered in conjunction with an exercise regimen. In one embodiment, the nutritional formulation is administered as an adjunct to a surgical procedure. In one embodiment, the subject is immobilized or mobility-impaired following the surgical procedure. In one embodiment, the nutritional formulation is administered as an adjunct to administration of a pharmaceutical composition. In one embodiment, the human subject has an eating disorder.

[0007] In another aspect, the invention provides methods of increasing muscle anabolism in a human subject suffering from a gastrointestinal protein malabsorption disease, including administering to a human subject in one or more doses a nutritional formulation including an isolated nutritive polypeptide including an amino acid sequence at least about 90% identical over at least about 50 amino acids to a polypeptide sequence provided herein; wherein the formulation includes at least 1.0 g of the nutritive polypeptide, wherein the nutritive formulation is administered to the human subject at a frequency sufficient to increase muscle anabolism in the subject after the administration thereof.

[0008] In another aspect, the invention provides methods of formulating a nutritional product for use in treating a human subject, including the steps of providing to a human subject suffering from or at risk of a gastrointestinal protein malabsorption disease, disorder, or condition, a nutritive composition including an isolated nutritive polypeptide including an amino acid sequence at least about 90% identical over at least about 50 amino acids to a polypeptide sequence provided herein; and formulating the nutritive polypeptide with an acceptable excipient, wherein the isolated nutritive polypeptide has an aqueous solubility at pH 7 of at least 12.5 g/L, and wherein the isolated nutritive polypeptide has a simulated gastric digestion half-life of less than 30 minutes. In one embodiment, the methods further include combining the nutritive composition with at least one of a tastant, a nutritional carbohydrate and a nutritional lipid, wherein the product is present as a liquid, semi-liquid or gel in a volume not greater than about 500 ml or as a solid or semi-solid in a total mass not greater than about 200 g. In one embodiment, the product is substantially free of non-comestible products.

[0009] In another aspect, the invention provides methods for selecting an amino acid sequence of a nutritive polypeptide wherein the nutritive polypeptide is suitable for use in treating a human subject suffering from or at risk of a gastrointestinal protein malabsorption disease, disorder, or condition, including i) providing a library of amino acid sequences including a plurality of amino acid sequences, ii) identifying in the library one or more amino acid sequences including at least one amino acid of interest, and iii) selecting the one or more identified amino acid sequences, thereby selecting an amino acid sequence of a nutritive polypeptide.

[0010] In another aspect, the invention provides methods for selecting an amino acid sequence of a nutritive polypeptide wherein the nutritive polypeptide is suitable for use in treating a human subject suffering from or at risk of a gastrointestinal protein malabsorption disease, disorder, or condition, including i) providing a library of amino acid sequences including a plurality of amino acid sequences, ii) identifying in the library one or more amino acid sequences including a ratio of at least one amino acid residues of interest to total amino acid residues greater than or equal to a selected ratio, and iii) selecting the one or more identified amino acid sequences, thereby selecting an amino acid sequence of a nutritive polypeptide.

[0011] In another aspect, the invention provides methods for selecting an amino acid sequence of a nutritive polypeptide wherein the nutritive polypeptide is suitable for use in treating a human subject suffering from or at risk of a gastrointestinal protein malabsorption disease, disorder, or condition, including i) providing a library of amino acid sequences including a plurality of amino acid sequences, ii) identifying in the library one or more amino acid sequences including a ratio of at least one amino acid residues of interest to total amino acid residues less than or equal to a selected ratio, and iii) selecting the one or more identified amino acid sequences, thereby selecting an amino acid sequence of a nutritive polypeptide.

[0012] In another aspect, the invention provides nutritive formulations for the treatment or prevention of a gastrointestinal protein malabsorption disease, disorder or condition in a human subject, including an isolated nutritive polypeptide including an amino acid sequence at least about 90% identical over at least about 50 amino acids to a polypeptide sequence provided herein; wherein the nutritive polypeptide is present in an amount sufficient to provide a nutritional benefit to a human subject having reduced protein absorption capacity. In one embodiment, the polypeptide sequence includes a ratio of essential amino acid residues to total amino acid residues of at least 34% and wherein the polypeptide sequence is nutritionally complete. In one embodiment, the essential amino acids present in the nutritive polypeptide are substantially bioavailable. In one embodiment, the isolated nutritive polypeptide has an aqueous solubility at pH 7 of at least 12.5 g/L. In one embodiment, the isolated nutritive polypeptide has a simulated gastric digestion half-life of less than 30 minutes. In one embodiment, the nutritive polypeptide is formulated in a pharmaceutically acceptable carrier. In one embodiment, the nutritive polypeptide is formulated in or as a food or a food ingredient. In one embodiment, the nutritive polypeptide is formulated in or as a beverage or a beverage ingredient. In one embodiment, the amino acid sequence encodes an enzyme having a primary activity, and wherein the nutritive polypeptide substantially lacks the primary activity. In one embodiment, the formulation is present as a liquid, semi-liquid or gel in a volume not greater than about 500 ml or as a solid or semi-solid in a total mass not greater than about 200 g. In one embodiment, the nutritive polypeptide includes an amino acid sequence at least about 90% identical to an edible species polypeptide or fragment thereof at least 50 amino acids in length, wherein the amino acid sequence has less than about 50% identity over at least 25 amino acids to a known allergen. In one embodiment, the formulations further include a component selected from a tastant, a protein mixture, a polypeptide, a peptide, a free amino acid, a carbohydrate, a lipid, a mineral or mineral source, a vitamin, a supplement, an organism, a pharmaceutical, and an excipient. In one embodiment, the human subject is suffering from a muscle wasting disease, disorder or condition. In one embodiment, the amino acid sequence contains a density of essential amino acids about equal to or greater than the density of essential chain amino acids present in a full-length reference nutritional polypeptide or a reference polypeptide-containing mixture. In one embodiment, the amino acid sequence contains a density of at least one amino acid selected from the group consisting of leucine, arginine and glutamine about equal to or greater than the density of the selected amino acid present in a full-length reference nutritional polypeptide or a reference polypeptide-containing mixture.

[0013] In another aspect, the invention provides formulations including at least one nutritive polypeptide including an amino acid sequence at least about 99% identical to an edible species polypeptide capable of being secreted from a microorganism, wherein the nutritive polypeptide is present in the formulation in an amount sufficient to provide a nutritional benefit equivalent to or greater than at least about 2% of a reference daily intake value of protein.

[0014] A nutritive formulation for the treatment or prevention of a gastrointestinal protein malabsorption disease, disorder or condition in a human subject, including a nutritive amino acid composition including a plurality of free amino acids including an amino acid ratio at least about 90% identical to an amino acid ratio of a polypeptide sequence provided herein, wherein the nutritive amino acid composition is nutritionally complete; wherein the nutritive amino acid composition is present in an amount sufficient to provide a nutritional benefit to a human subject having reduced protein absorption capacity. In one embodiment, the formulation is present as a liquid, semi-liquid or gel in a volume not greater than about 500 ml or as a solid or semi-solid in a total mass not greater than about 200 g.

[0015] In one aspect, the invention provides methods of preventing or reducing loss of muscle mass and/or muscle function in a human subject, including the steps of: i) identifying a human subject suffering from or at risk of a disease, disorder or condition associated with muscle wasting, and ii) administering to the human subject a nutritional formulation in an amount sufficient to prevent or reduce a loss of muscle mass and/or muscle function, wherein the nutritional formulation includes an isolated nutritive polypeptide including an amino acid sequence at least about 90% identical over at least about 50 amino acids to a polypeptide sequence provided herein; wherein the formulation includes at least 1.0 g of the nutritive polypeptide; wherein the formulation is present as a liquid, semi-liquid or gel in a volume not greater than about 500 ml or as a solid or semi-solid in a total mass not greater than about 200 g; and wherein the formulation is substantially free of non-comestible products. In one embodiment, the human subject is suffering from a muscle wasting disease, disorder or condition and has received one or more doses of a pharmaceutical composition, wherein administration of the pharmaceutical composition increases a risk of loss of muscle mass and/or muscle function. In one embodiment, the human subject is suffering from a muscle wasting disease, disorder or condition and has received one or more doses of a pharmaceutical composition, wherein i) the disease, disorder or condition or ii) the administration of the pharmaceutical composition, or both i) and ii) increases a risk of loss of muscle mass and/or muscle function.

[0016] In another aspect, the invention provides methods of treating a muscle wasting disease, disorder or condition in a human subject in need thereof, including the step of administering to the human subject a nutritional formulation in an amount sufficient to treat such disease, disorder or condition, wherein the nutritional formulation includes an isolated nutritive polypeptide including an amino acid sequence at least about 90% identical over at least about 50 amino acids to a polypeptide sequence provided herein; wherein the formulation includes at least 1.0 g of the nutritive polypeptide. In one embodiment, the formulation is administered on a dosage schedule sufficient to provide substantial protein nutrition to the human subject in the absence of consumption by the subject of an agriculturally-derived food product.

[0017] In another aspect, the invention provides methods of reducing the risk of a human subject developing a muscle wasting disease, disorder or condition characterized or exacerbated by protein malnourishment, including the steps of (i) identifying the human subject as being at risk of developing the disease, disorder or condition; and (ii) administering in one or more doses a nutritional formulation including an isolated nutritive polypeptide including an amino acid sequence at least about 90% identical over at least about 50 amino acids to a polypeptide sequence provided herein; wherein the formulation includes at least 1.0 g of the nutritive polypeptide. In one embodiment, the human subject is at risk of developing malnutrition or protein malnutrition. In one embodiment, the human subject exhibits sarcopenia and/or cachexia. In one embodiment, the human subject has an inflammatory reaction or an autoimmune disorder. In one embodiment, the human subject has cancer, chronic obstructive pulmonary disease, liver failure, chronic kidney disease, congestive heart failure, multiple sclerosis, chronic pancreatitis, or a mitochondrial disease. In one embodiment, the human subject has an infectious disease. In one embodiment, the human subject has undergone a surgical procedure or has suffered a traumatic injury. In one embodiment, the nutritional formulation is administered in conjunction with an exercise regimen. In one embodiment, the nutritional formulation is administered as an adjunct to administration of a pharmaceutical agent and/or a surgical procedure. In one embodiment, the subject is immobilized or mobility-impaired following the surgical procedure. In one embodiment, the nutritional formulation is administered as an adjunct to administration of a pharmaceutical composition. In one embodiment, the human subject has or is at risk of developing osteoporosis.

[0018] In another aspect, the invention provides methods of increasing muscle anabolism in a human subject suffering from a muscle wasting disease, including administering to a human subject in one or more doses a nutritional formulation including an isolated nutritive polypeptide including an amino acid sequence at least about 90% identical over at least about 50 amino acids to a polypeptide sequence provided herein; wherein the formulation includes at least 1.0 g of the nutritive polypeptide, wherein the nutritive formulation is administered to the human subject at a frequency sufficient to increase muscle anabolism in the subject after the administration thereof.

[0019] In another aspect, the invention provides methods of formulating a nutritional product for use in treating a human subject, including the steps of providing to a human subject suffering from or at risk of a muscle wasting disease, disorder, or condition, a nutritive composition including an isolated nutritive polypeptide including an amino acid sequence at least about 90% identical over at least about 50 amino acids to a polypeptide sequence provided herein; and formulating the nutritive polypeptide with an acceptable excipient, wherein the isolated nutritive polypeptide has an aqueous solubility at pH 7 of at least 12.5 g/L, and wherein the isolated nutritive polypeptide has a simulated gastric digestion half-life of less than 30 minutes. In one embodiment, the methods further include combining the nutritive composition with at least one of a tastant, a nutritional carbohydrate and a nutritional lipid, wherein the product is present as a liquid, semi-liquid or gel in a volume not greater than about 500 ml or as a solid or semi-solid in a total mass not greater than about 200 g. In one embodiment, the product is substantially free of non-comestible products.

[0020] In another aspect, the invention provides methods for selecting an amino acid sequence of a nutritive polypeptide wherein the nutritive polypeptide is suitable for use in treating a human subject suffering from or at risk of a muscle wasting disease, disorder, or condition, including i) providing a library of amino acid sequences including a plurality of amino acid sequences, ii) identifying in the library one or more amino acid sequences including at least one amino acid of interest, and iii) selecting the one or more identified amino acid sequences, thereby selecting an amino acid sequence of a nutritive polypeptide.

[0021] In another aspect, the invention provides methods for selecting an amino acid sequence of a nutritive polypeptide wherein the nutritive polypeptide is suitable for use in treating a human subject suffering from or at risk of a muscle wasting disease, disorder, or condition, including i) providing a library of amino acid sequences including a plurality of amino acid sequences, ii) identifying in the library one or more amino acid sequences including a ratio of at least one amino acid residues of interest to total amino acid residues greater than or equal to a selected ratio, and iii) selecting the one or more identified amino acid sequences, thereby selecting an amino acid sequence of a nutritive polypeptide.

[0022] In another aspect, the invention provides methods for selecting an amino acid sequence of a nutritive polypeptide wherein the nutritive polypeptide is suitable for use in treating a human subject suffering from or at risk of a muscle wasting disease, disorder, or condition, including i) providing a library of amino acid sequences including a plurality of amino acid sequences, ii) identifying in the library one or more amino acid sequences including a ratio of at least one amino acid residues of interest to total amino acid residues less than or equal to a selected ratio, and iii) selecting the one or more identified amino acid sequences, thereby selecting an amino acid sequence of a nutritive polypeptide.

[0023] In another aspect, the invention provides nutritive formulations for the treatment or prevention of a muscle wasting disease, disorder or condition in a human subject, including an isolated nutritive polypeptide including an amino acid sequence at least about 90% identical over at least about 50 amino acids to a polypeptide sequence provided herein; wherein the nutritive polypeptide is present in an amount sufficient to provide a nutritional benefit to a human subject having reduced protein absorption capacity. In one embodiment, the polypeptide sequence includes a ratio of essential amino acid residues to total amino acid residues of at least 34% and wherein the polypeptide sequence is nutritionally complete. In one embodiment, the essential amino acids present in the nutritive polypeptide are substantially bioavailable. In one embodiment, the isolated nutritive polypeptide has an aqueous solubility at pH 7 of at least 12.5 g/L. In one embodiment, the isolated nutritive polypeptide has a simulated gastric digestion half-life of less than 30 minutes. In one embodiment, the nutritive polypeptide is formulated in a pharmaceutically acceptable carrier. In one embodiment, the nutritive polypeptide is formulated in or as a food or a food ingredient. In one embodiment, the nutritive polypeptide is formulated in or as a beverage or a beverage ingredient. In one embodiment, the amino acid sequence encodes an enzyme having a primary activity, and wherein the nutritive polypeptide substantially lacks the primary activity. In one embodiment, the formulation is present as a liquid, semi-liquid or gel in a volume not greater than about 500 ml or as a solid or semi-solid in a total mass not greater than about 200 g. In one embodiment, the nutritive polypeptide includes an amino acid sequence at least about 90% identical to an edible species polypeptide or fragment thereof at least 50 amino acids in length, wherein the amino acid sequence has less than about 50% identity over at least 25 amino acids to a known allergen. In one embodiment, the formulations further include a component selected from a tastant, a protein mixture, a polypeptide, a peptide, a free amino acid, a carbohydrate, a lipid, a mineral or mineral source, a vitamin, a supplement, an organism, a pharmaceutical, and an excipient. In one embodiment, the human subject is suffering from a gastrointestinal protein malabsorption disease, disorder or condition. In one embodiment, the amino acid sequence contains a density of essential amino acids about equal to or greater than the density of essential chain amino acids present in a full-length reference nutritional polypeptide or a reference polypeptide-containing mixture. In one embodiment, the amino acid sequence contains a density of at least one amino acid selected from the group consisting of leucine, arginine and glutamine about equal to or greater than the density of the selected amino acid present in a full-length reference nutritional polypeptide or a reference polypeptide-containing mixture.

[0024] In another aspect, the invention provides formulations including at least one nutritive polypeptide including an amino acid sequence at least about 99% identical to an edible species polypeptide capable of being secreted from a microorganism, wherein the nutritive polypeptide is present in the formulation in an amount sufficient to provide a nutritional benefit equivalent to or greater than at least about 2% of a reference daily intake value of protein.

[0025] In another aspect, the invention provides nutritive formulations for the treatment or prevention of a muscle wasting disease, disorder or condition in a human subject, including a nutritive amino acid composition including a plurality of free amino acids including an amino acid ratio at least about 90% identical to an amino acid ratio of a polypeptide sequence provided herein, wherein the nutritive amino acid composition is nutritionally complete; wherein the nutritive amino acid composition is present in an amount sufficient to provide a nutritional benefit to a human subject having reduced protein absorption capacity. In one embodiment, the formulation is present as a liquid, semi-liquid or gel in a volume not greater than about 500 ml or as a solid or semi-solid in a total mass not greater than about 200 g.

[0026] In one aspect, the invention provides methods of preventing or reducing loss of muscle mass and/or muscle function in a human subject, including the steps of: i) identifying a human subject suffering from or at risk of cancer, and ii) administering to the human subject a nutritional formulation in an amount sufficient to prevent or reduce a loss of muscle mass and/or muscle function, wherein the nutritional formulation includes an isolated nutritive polypeptide including an amino acid sequence at least about 90% identical over at least about 50 amino acids to a polypeptide sequence selected from the group consisting of [[SEQID]]SEQ ID NO: 00001-03909; wherein the formulation includes at least 1.0 g of the nutritive polypeptide; wherein the formulation is present as a liquid, semi-liquid or gel in a volume not greater than about 500 ml or as a solid or semi-solid in a total mass not greater than about 200 g; and wherein the formulation is substantially free of non-comestible products. In one embodiment, the human subject is suffering from cancer and has received one or more doses of a pharmaceutical composition, wherein administration of the pharmaceutical composition increases a risk of loss of muscle mass and/or muscle function. In one embodiment, the human subject is suffering from cancer and has received one or more doses of a pharmaceutical composition, wherein i) the disease, disorder or condition or ii) the administration of the pharmaceutical composition, or both i) and ii) increases a risk of loss of muscle mass and/or muscle function.

[0027] In another aspect, the invention provides methods of treating a muscle wasting disease, disorder or condition in a human subject suffering from cancer, including the step of administering to the human subject a nutritional formulation in an amount sufficient to treat such muscle wasting disease, disorder or condition, wherein the nutritional formulation includes an isolated nutritive polypeptide including an amino acid sequence at least about 90% identical over at least about 50 amino acids to a polypeptide sequence provided herein; wherein the formulation includes at least 1.0 g of the nutritive polypeptide. In one embodiment, the formulation is administered on a dosage schedule sufficient to provide substantial protein nutrition to the human subject in the absence of consumption by the subject of an agriculturally-derived food product.

[0028] In another aspect, the invention provides methods of reducing the risk of a human subject developing a disease, disorder or condition characterized or exacerbated by protein malnourishment, including the steps of (i) identifying the human subject as suffering from cancer and being at risk of developing the disease, disorder or condition; and (ii) administering in one or more doses a nutritional formulation including an isolated nutritive polypeptide including an amino acid sequence at least about 90% identical over at least about 50 amino acids to a polypeptide sequence provided herein; wherein the formulation includes at least 1.0 g of the nutritive polypeptide. In one embodiment, the human subject is at risk of developing malnutrition or protein malnutrition. In one embodiment, the human subject exhibits sarcopenia and/or cachexia. In one embodiment, the human subject has an inflammatory reaction or an autoimmune disorder. In one embodiment, the human subject has carcinoma, lymphoma, blastoma, sarcoma, leukemia, mesothelioma, squamous cell cancer, lung cancer including small-cell lung cancer and non-small cell lung cancer (which includes large-cell carcinoma, adenocarcinoma of the lung, and squamous carcinoma of the lung), cancer of the peritoneum, hepatocellular cancer, gastric or stomach cancer (including gastrointestinal cancer and gastrointestinal stromal cancer), pancreatic cancer, glioblastoma, cervical cancer, ovarian cancer, liver cancer, bladder cancer, breast cancer, colon cancer, colorectal cancer, endometrial or uterine carcinoma, salivary gland carcinoma, kidney or renal cancer, prostate cancer, cervical cancer, vulval cancer, thyroid cancer, head and neck cancer, melanoma, superficial spreading melanoma, lentigo maligna melanoma, acral lentiginous melanomas, nodular melanomas, T-cell lymphomas, B-cell lymphomas (including low grade/follicular non-Hodgkin's lymphoma (NHL); small lymphocytic (SL) NHL; intermediate grade/follicular NHL; intermediate grade diffuse NHL; high grade immunoblastic NHL; high grade lymphoblastic NHL; high grade small non-cleaved cell NHL; bulky disease NHL; mantle cell lymphoma; AIDS-related lymphoma; and Waldenstrom's Macroglobulinemia); chronic lymphocytic leukemia (CLL); acute myeloid leukemia (AML); chronic myeloid leukemia (CML); acute lymphoblastic leukemia (ALL); Hairy cell leukemia; chronic myeloblastic leukemia; or post-transplant lymphoproliferative disorder (PTLD). In one embodiment, the human subject has an infectious disease. In one embodiment, the human subject has undergone a surgical procedure. In one embodiment, includes identifying the human subject as suffering from a metastatic cancer. In one embodiment, the nutritional formulation is administered in conjunction with at least a therapy selected from a surgical, radiation, hormonal, cancer cell-targeted or chemotherapeutic anticancer therapy. In one embodiment, the nutritional formulation is administered in conjunction with an exercise regimen. In one embodiment, the nutritional formulation is administered as an adjunct to administration of a radiotherapeutic composition or a chemotherapeutic pharmaceutical composition. In one embodiment, the human subject has HIV/AIDS.

[0029] In another aspect, the invention provides methods of increasing muscle anabolism in a human subject suffering from cancer, including administering to a human subject in one or more doses a nutritional formulation including an isolated nutritive polypeptide including an amino acid sequence at least about 90% identical over at least about 50 amino acids to a polypeptide sequence provided herein; wherein the formulation includes at least 1.0 g of the nutritive polypeptide, wherein the nutritive formulation is administered to the human subject at a frequency sufficient to increase muscle anabolism in the subject after the administration thereof.

[0030] In another aspect, the invention provides methods of formulating a nutritional product for use in treating a human subject, including the steps of providing to a human subject suffering from cancer, a nutritive composition including an isolated nutritive polypeptide including an amino acid sequence at least about 90% identical over at least about 50 amino acids to a polypeptide sequence provided herein; and formulating the nutritive polypeptide with an acceptable excipient, wherein the isolated nutritive polypeptide has an aqueous solubility at pH 7 of at least 12.5 g/L, and wherein the isolated nutritive polypeptide has a simulated gastric digestion half-life of less than 30 minutes. In one embodiment, the methods further include combining the nutritive composition with at least one of a tastant, a nutritional carbohydrate and a nutritional lipid, wherein the product is present as a liquid, semi-liquid or gel in a volume not greater than about 500 ml or as a solid or semi-solid in a total mass not greater than about 200 g. In one embodiment, the product is substantially free of non-comestible products.

[0031] In another aspect, the invention provides methods for selecting an amino acid sequence of a nutritive polypeptide wherein the nutritive polypeptide is suitable for use in treating a human subject suffering from cancer, including i) providing a library of amino acid sequences including a plurality of amino acid sequences, ii) identifying in the library one or more amino acid sequences including at least one amino acid of interest, and iii) selecting the one or more identified amino acid sequences, thereby selecting an amino acid sequence of a nutritive polypeptide.

[0032] In another aspect, the invention provides methods for selecting an amino acid sequence of a nutritive polypeptide wherein the nutritive polypeptide is suitable for use in treating a human subject suffering from cancer, including i) providing a library of amino acid sequences including a plurality of amino acid sequences, ii) identifying in the library one or more amino acid sequences including a ratio of at least one amino acid residues of interest to total amino acid residues greater than or equal to a selected ratio, and iii) selecting the one or more identified amino acid sequences, thereby selecting an amino acid sequence of a nutritive polypeptide.

[0033] In another aspect, the invention provides methods for selecting an amino acid sequence of a nutritive polypeptide wherein the nutritive polypeptide is suitable for use in treating a human subject suffering from cancer, including i) providing a library of amino acid sequences including a plurality of amino acid sequences, ii) identifying in the library one or more amino acid sequences including a ratio of at least one amino acid residues of interest to total amino acid residues less than or equal to a selected ratio, and iii) selecting the one or more identified amino acid sequences, thereby selecting an amino acid sequence of a nutritive polypeptide.

[0034] In another aspect, the invention provides nutritive formulations for the treatment or prevention of a muscle wasting disease, disorder or condition in a human subject suffering from cancer, including an isolated nutritive polypeptide including an amino acid sequence at least about 90% identical over at least about 50 amino acids to a polypeptide sequence provided herein; wherein the nutritive polypeptide is present in an amount sufficient to provide a nutritional benefit to a human subject having or at risk of having reduced protein absorption capacity. In one embodiment, the polypeptide sequence includes a ratio of essential amino acid residues to total amino acid residues of at least 34% and wherein the polypeptide sequence is nutritionally complete, except that the polypeptide sequence is optionally free or reduced in methionine. In one embodiment, the essential amino acids present in the nutritive polypeptide are substantially bioavailable. In one embodiment, the isolated nutritive polypeptide has an aqueous solubility at pH 7 of at least 12.5 g/L. In one embodiment, the isolated nutritive polypeptide has a simulated gastric digestion half-life of less than 30 minutes. In one embodiment, the nutritive polypeptide is formulated in a pharmaceutically acceptable carrier. In one embodiment, the nutritive polypeptide is formulated in or as a food or a food ingredient. In one embodiment, the nutritive polypeptide is formulated in or as a beverage or a beverage ingredient. In one embodiment, the amino acid sequence encodes an enzyme having a primary activity, and wherein the nutritive polypeptide substantially lacks the primary activity. In one embodiment, the formulation is present as a liquid, semi-liquid or gel in a volume not greater than about 500 ml or as a solid or semi-solid in a total mass not greater than about 200 g. In one embodiment, the nutritive polypeptide includes an amino acid sequence at least about 90% identical to an edible species polypeptide or fragment thereof at least 50 amino acids in length, wherein the amino acid sequence has less than about 50% identity over at least 25 amino acids to a known allergen. In one embodiment, including a component selected from a tastant, a protein mixture, a polypeptide, a peptide, a free amino acid, a carbohydrate, a lipid, a mineral or mineral source, a vitamin, a supplement, an organism, a pharmaceutical, and an excipient. In one embodiment, the human subject is suffering from cancer. In one embodiment, the amino acid sequence contains a density of essential amino acids about equal to or greater than the density of essential chain amino acids present in a full-length reference nutritional polypeptide or a reference polypeptide-containing mixture. In one embodiment, the amino acid sequence contains a density of at least one amino acid selected from the group consisting of leucine, arginine and glutamine about equal to or greater than the density of the selected amino acid present in a full-length reference nutritional polypeptide or a reference polypeptide-containing mixture.

[0035] In another aspect, the invention provides formulations including at least one nutritive polypeptide including an amino acid sequence at least about 99% identical to an edible species polypeptide capable of being secreted from a microorganism, wherein the nutritive polypeptide is present in the formulation in an amount sufficient to provide a nutritional benefit equivalent to or greater than at least about 2% of a reference daily intake value of protein.

[0036] In another aspect, the invention provides nutritive formulations for the treatment or prevention of a muscle wasting disease, disorder or condition in a human subject suffering from cancer, including a nutritive amino acid composition including a plurality of free amino acids including an amino acid ratio at least about 90% identical to an amino acid ratio of a polypeptide sequence provided herein, wherein the nutritive amino acid composition is nutritionally complete; wherein the nutritive amino acid composition is present in an amount sufficient to provide a nutritional benefit to a human subject having reduced protein absorption capacity. In one embodiment, the formulation is present as a liquid, semi-liquid or gel in a volume not greater than about 500 ml or as a solid or semi-solid in a total mass not greater than about 200 g.

[0037] In one aspect, the invention provides methods of preventing or reducing loss of muscle mass and/or muscle function in a human subject, including the steps of: i) identifying a human subject suffering from or at risk of diabetes or a pre-diabetic condition, and ii) administering to the human subject a nutritional formulation in an amount sufficient to prevent or reduce a loss of muscle mass and/or muscle function, wherein the nutritional formulation includes an isolated nutritive polypeptide including an amino acid sequence at least about 90% identical over at least about 50 amino acids to a polypeptide sequence provided herein; wherein the formulation includes at least 1.0 g of the nutritive polypeptide; wherein the formulation is present as a liquid, semi-liquid or gel in a volume not greater than about 500 ml or as a solid or semi-solid in a total mass not greater than about 200 g; and wherein the formulation is substantially free of non-comestible products. In one embodiment, the human subject is suffering from diabetes or a pre-diabetic condition and has received one or more doses of a pharmaceutical composition, wherein administration of the pharmaceutical composition increases a risk of loss of muscle mass and/or muscle function. In one embodiment, the human subject is suffering from diabetes or a pre-diabetic condition and has received one or more doses of a pharmaceutical composition, wherein i) the disease, disorder or condition or ii) the administration of the pharmaceutical composition, or both i) and ii) increases a risk of loss of muscle mass and/or muscle function.

[0038] In another aspect, the invention provides methods of treating a muscle wasting disease, disorder or condition in a human subject suffering from diabetes or a pre-diabetic condition, including the step of administering to the human subject a nutritional formulation in an amount sufficient to treat such disease, disorder or condition, wherein the nutritional formulation includes an isolated nutritive polypeptide including an amino acid sequence at least about 90% identical over at least about 50 amino acids to a polypeptide sequence provided herein; wherein the formulation includes at least 1.0 g of the nutritive polypeptide. In one embodiment, the formulation is administered on a dosage schedule sufficient to provide substantial protein nutrition to the human subject in the absence of consumption by the subject of an agriculturally-derived food product.

[0039] In another aspect, the invention provides methods of reducing the risk of a human subject developing a muscle wasting disease, disorder or condition characterized or exacerbated by protein malnourishment, including the steps of (i) identifying the human subject as being at risk of developing diabetes or a pre-diabetic condition; and (ii) administering in one or more doses a nutritional formulation including an isolated nutritive polypeptide including an amino acid sequence at least about 90% identical over at least about 50 amino acids to a polypeptide sequence provided herein; wherein the formulation includes at least 1.0 g of the nutritive polypeptide. In one embodiment, the human subject is at risk of developing malnutrition or protein malnutrition. In one embodiment, the human subject exhibits sarcopenia and/or cachexia. In one embodiment, the human subject has an inflammatory reaction or an autoimmune disorder. In one embodiment, the human subject has cardiovascular disease. In one embodiment, the human subject is overweight or obese. Prader wills or other rare disease for obesity? In one embodiment, the human subject has undergone a surgical procedure or has suffered a traumatic injury. In one embodiment, the nutritional formulation is administered in conjunction with an exercise regimen. In one embodiment, the nutritional formulation is administered as an adjunct to administration of a pharmaceutical agent and/or a surgical procedure. In one embodiment, the subject is immobilized or mobility-impaired following the surgical procedure. In one embodiment, the nutritional formulation is administered as an adjunct to administration of a pharmaceutical composition. In one embodiment, the human subject has or is at risk of developing osteoporosis.

[0040] In another aspect, the invention provides methods of increasing muscle anabolism in a human subject suffering from diabetes or a pre-diabetic condition, including administering to a human subject in one or more doses a nutritional formulation including an isolated nutritive polypeptide including an amino acid sequence at least about 90% identical over at least about 50 amino acids to a polypeptide sequence provided herein; wherein the formulation includes at least 1.0 g of the nutritive polypeptide, wherein the nutritive formulation is administered to the human subject at a frequency sufficient to increase muscle anabolism in the subject after the administration thereof.

[0041] In another aspect, the invention provides methods of formulating a nutritional product for use in treating a human subject, including the steps of providing to a human subject suffering from or at risk of diabetes or a pre-diabetic condition, a nutritive composition including an isolated nutritive polypeptide including an amino acid sequence at least about 90% identical over at least about 50 amino acids to a polypeptide sequence provided herein; and formulating the nutritive polypeptide with an acceptable excipient, wherein the isolated nutritive polypeptide has an aqueous solubility at pH 7 of at least 12.5 g/L, and wherein the isolated nutritive polypeptide has a simulated gastric digestion half-life of less than 30 minutes. In one embodiment, the methods further include combining the nutritive composition with at least one of a tastant, a nutritional carbohydrate and a nutritional lipid, wherein the product is present as a liquid, semi-liquid or gel in a volume not greater than about 500 ml or as a solid or semi-solid in a total mass not greater than about 200 g. In one embodiment, the product is substantially free of non-comestible products.

[0042] In another aspect, the invention provides methods for selecting an amino acid sequence of a nutritive polypeptide wherein the nutritive polypeptide is suitable for use in treating a human subject suffering from or at risk of diabetes or a pre-diabetic condition, including i) providing a library of amino acid sequences including a plurality of amino acid sequences, ii) identifying in the library one or more amino acid sequences including at least one amino acid of interest, and iii) selecting the one or more identified amino acid sequences, thereby selecting an amino acid sequence of a nutritive polypeptide.

[0043] In another aspect, the invention provides methods for selecting an amino acid sequence of a nutritive polypeptide wherein the nutritive polypeptide is suitable for use in treating a human subject suffering from or at risk of diabetes or a pre-diabetic condition, including i) providing a library of amino acid sequences including a plurality of amino acid sequences, ii) identifying in the library one or more amino acid sequences including a ratio of at least one amino acid residues of interest to total amino acid residues greater than or equal to a selected ratio, and iii) selecting the one or more identified amino acid sequences, thereby selecting an amino acid sequence of a nutritive polypeptide.

[0044] In another aspect, the invention provides methods for selecting an amino acid sequence of a nutritive polypeptide wherein the nutritive polypeptide is suitable for use in treating a human subject suffering from or at risk of diabetes or a pre-diabetic condition, including i) providing a library of amino acid sequences including a plurality of amino acid sequences, ii) identifying in the library one or more amino acid sequences including a ratio of at least one amino acid residues of interest to total amino acid residues less than or equal to a selected ratio, and iii) selecting the one or more identified amino acid sequences, thereby selecting an amino acid sequence of a nutritive polypeptide.

[0045] In another aspect, the invention provides nutritive formulations for the treatment or prevention of a muscle wasting disease, disorder or condition in a human subject suffering from diabetes or a pre-diabetic condition, including an isolated nutritive polypeptide including an amino acid sequence at least about 90% identical over at least about 50 amino acids to a polypeptide sequence provided herein; wherein the nutritive polypeptide is present in an amount sufficient to provide a nutritional benefit to a human subject having reduced protein absorption capacity. In one embodiment, the polypeptide sequence includes a ratio of essential amino acid residues to total amino acid residues of at least 34% and wherein the polypeptide sequence is nutritionally complete. In one embodiment, the essential amino acids present in the nutritive polypeptide are substantially bioavailable. In one embodiment, the isolated nutritive polypeptide has an aqueous solubility at pH 7 of at least 12.5 g/L. In one embodiment, the isolated nutritive polypeptide has a simulated gastric digestion half-life of less than 30 minutes. In one embodiment, the nutritive polypeptide is formulated in a pharmaceutically acceptable carrier. In one embodiment, the nutritive polypeptide is formulated in or as a food or a food ingredient. In one embodiment, the nutritive polypeptide is formulated in or as a beverage or a beverage ingredient. In one embodiment, the amino acid sequence encodes an enzyme having a primary activity, and wherein the nutritive polypeptide substantially lacks the primary activity. In one embodiment, the formulation is present as a liquid, semi-liquid or gel in a volume not greater than about 500 ml or as a solid or semi-solid in a total mass not greater than about 200 g. In one embodiment, the nutritive polypeptide includes an amino acid sequence at least about 90% identical to an edible species polypeptide or fragment thereof at least 50 amino acids in length, wherein the amino acid sequence has less than about 50% identity over at least 25 amino acids to a known allergen. In one embodiment, the formulations further include a component selected from a tastant, a protein mixture, a polypeptide, a peptide, a free amino acid, a carbohydrate, a lipid, a mineral or mineral source, a vitamin, a supplement, an organism, a pharmaceutical, and an excipient. In one embodiment, the human subject is suffering from a gastrointestinal protein malabsorption disease, disorder or condition. In one embodiment, the amino acid sequence contains a density of essential amino acids about equal to or greater than the density of essential chain amino acids present in a full-length reference nutritional polypeptide or a reference polypeptide-containing mixture. In one embodiment, the amino acid sequence contains a density of at least one amino acid selected from the group consisting of leucine, arginine and glutamine about equal to or greater than the density of the selected amino acid present in a full-length reference nutritional polypeptide or a reference polypeptide-containing mixture.

[0046] In another aspect, the invention provides formulations including at least one nutritive polypeptide including an amino acid sequence at least about 99% identical to an edible species polypeptide capable of being secreted from a microorganism, wherein the nutritive polypeptide is present in the formulation in an amount sufficient to provide a nutritional benefit equivalent to or greater than at least about 2% of a reference daily intake value of protein.

[0047] In another aspect, the invention provides nutritive formulations for the treatment or prevention of a muscle wasting disease, disorder or condition in a human subject suffering from diabetes or a pre-diabetic condition, including a nutritive amino acid composition including a plurality of free amino acids including an amino acid ratio at least about 90% identical to an amino acid ratio of a polypeptide sequence provided herein, wherein the nutritive amino acid composition is nutritionally complete; wherein the nutritive amino acid composition is present in an amount sufficient to provide a nutritional benefit to a human subject having reduced protein absorption capacity. In one embodiment, the formulation is present as a liquid, semi-liquid or gel in a volume not greater than about 500 ml or as a solid or semi-solid in a total mass not greater than about 200 g.

[0048] In another aspect, the invention provides methods of preventing or reducing loss of muscle mass and/or muscle function in an overweight or obese human subject, including the steps of: i) identifying a human subject suffering from or at risk of obesity, and ii) administering to the human subject a nutritional formulation in an amount sufficient to prevent or reduce a loss of muscle mass and/or muscle function, wherein the nutritional formulation includes an isolated nutritive polypeptide including an amino acid sequence at least about 90% identical over at least about 50 amino acids to a polypeptide sequence provided herein; wherein the formulation includes at least 1.0 g of the nutritive polypeptide; wherein the formulation is present as a liquid, semi-liquid or gel in a volume not greater than about 500 ml or as a solid or semi-solid in a total mass not greater than about 200 g; and wherein the formulation is substantially free of non-comestible products. In one embodiment, the human subject is suffering from obesity and has received one or more doses of a pharmaceutical composition, wherein administration of the pharmaceutical composition increases a risk of loss of muscle mass and/or muscle function. In one embodiment, the human subject is suffering from obesity and has received one or more doses of a pharmaceutical composition, wherein i) the disease, disorder or condition or ii) the administration of the pharmaceutical composition, or both i) and ii) increases a risk of loss of muscle mass and/or muscle function.

[0049] In another aspect, the invention provides methods of treating a muscle wasting disease, disorder or condition in a human subject suffering from obesity, including the step of administering to the human subject a nutritional formulation in an amount sufficient to treat such disease, disorder or condition, wherein the nutritional formulation includes an isolated nutritive polypeptide including an amino acid sequence at least about 90% identical over at least about 50 amino acids to a polypeptide sequence provided herein; wherein the formulation includes at least 1.0 g of the nutritive polypeptide. In one embodiment, the formulation is administered on a dosage schedule sufficient to provide substantial protein nutrition to the human subject in the absence of consumption by the subject of an agriculturally-derived food product.

[0050] In another aspect, the invention provides methods of reducing the risk of a human subject developing a muscle wasting disease, disorder or condition characterized or exacerbated by protein malnourishment, including the steps of (i) identifying the human subject as being at risk of developing obesity; and (ii) administering in one or more doses a nutritional formulation including an isolated nutritive polypeptide including an amino acid sequence at least about 90% identical over at least about 50 amino acids to a polypeptide sequence provided herein; wherein the formulation includes at least 1.0 g of the nutritive polypeptide. In one embodiment, the human subject is at risk of developing malnutrition or protein malnutrition. In one embodiment, the human subject exhibits sarcopenia and/or cachexia. In one embodiment, the human subject has an inflammatory reaction or an autoimmune disorder. In one embodiment, the human subject has cardiovascular disease. In one embodiment, the human subject has diabetes or a pre-diabetic condition. In one embodiment, the human subject has undergone a surgical procedure or has suffered a traumatic injury. In one embodiment, the nutritional formulation is administered in conjunction with an exercise regimen. In one embodiment, the nutritional formulation is administered as an adjunct to administration of a pharmaceutical agent and/or a surgical procedure. In one embodiment, the subject is immobilized or mobility-impaired following the surgical procedure. In one embodiment, the nutritional formulation is administered as an adjunct to administration of a pharmaceutical composition. In one embodiment, the human subject has or is at risk of developing osteoporosis.

[0051] In another aspect, the invention provides methods of increasing muscle anabolism in a human subject suffering from obesity, including administering to a human subject in one or more doses a nutritional formulation including an isolated nutritive polypeptide including an amino acid sequence at least about 90% identical over at least about 50 amino acids to a polypeptide sequence provided herein; wherein the formulation includes at least 1.0 g of the nutritive polypeptide, wherein the nutritive formulation is administered to the human subject at a frequency sufficient to increase muscle anabolism in the subject after the administration thereof.

[0052] In another aspect, the invention provides methods of formulating a nutritional product for use in treating a human subject, including the steps of providing to a human subject suffering from or at risk of obesity, a nutritive composition including an isolated nutritive polypeptide including an amino acid sequence at least about 90% identical over at least about 50 amino acids to a polypeptide sequence provided herein; and formulating the nutritive polypeptide with an acceptable excipient, wherein the isolated nutritive polypeptide has an aqueous solubility at pH 7 of at least 12.5 g/L, and wherein the isolated nutritive polypeptide has a simulated gastric digestion half-life of less than 30 minutes. In one embodiment, the methods further include combining the nutritive composition with at least one of a tastant, a nutritional carbohydrate and a nutritional lipid, wherein the product is present as a liquid, semi-liquid or gel in a volume not greater than about 500 ml or as a solid or semi-solid in a total mass not greater than about 200 g. In one embodiment, the product is substantially free of non-comestible products.

[0053] In another aspect, the invention provides methods for selecting an amino acid sequence of a nutritive polypeptide wherein the nutritive polypeptide is suitable for use in treating a human subject suffering from or at risk of obesity, including i) providing a library of amino acid sequences including a plurality of amino acid sequences, ii) identifying in the library one or more amino acid sequences including at least one amino acid of interest, and iii) selecting the one or more identified amino acid sequences, thereby selecting an amino acid sequence of a nutritive polypeptide.

[0054] In another aspect, the invention provides methods for selecting an amino acid sequence of a nutritive polypeptide wherein the nutritive polypeptide is suitable for use in treating a human subject suffering from or at risk of obesity, including i) providing a library of amino acid sequences including a plurality of amino acid sequences, ii) identifying in the library one or more amino acid sequences including a ratio of at least one amino acid residues of interest to total amino acid residues greater than or equal to a selected ratio, and iii) selecting the one or more identified amino acid sequences, thereby selecting an amino acid sequence of a nutritive polypeptide.

[0055] In another aspect, the invention provides methods for selecting an amino acid sequence of a nutritive polypeptide wherein the nutritive polypeptide is suitable for use in treating a human subject suffering from or at risk of obesity, including i) providing a library of amino acid sequences including a plurality of amino acid sequences, ii) identifying in the library one or more amino acid sequences including a ratio of at least one amino acid residues of interest to total amino acid residues less than or equal to a selected ratio, and iii) selecting the one or more identified amino acid sequences, thereby selecting an amino acid sequence of a nutritive polypeptide.

[0056] In another aspect, the invention provides nutritive formulations for the treatment or prevention of a muscle wasting disease, disorder or condition in a human subject suffering from obesity, including an isolated nutritive polypeptide including an amino acid sequence at least about 90% identical over at least about 50 amino acids to a polypeptide sequence provided herein; wherein the nutritive polypeptide is present in an amount sufficient to provide a nutritional benefit to a human subject having reduced protein absorption capacity. In one embodiment, the polypeptide sequence includes a ratio of essential amino acid residues to total amino acid residues of at least 34% and wherein the polypeptide sequence is nutritionally complete. In one embodiment, the essential amino acids present in the nutritive polypeptide are substantially bioavailable. In one embodiment, the isolated nutritive polypeptide has an aqueous solubility at pH 7 of at least 12.5 g/L. In one embodiment, the isolated nutritive polypeptide has a simulated gastric digestion half-life of less than 30 minutes. In one embodiment, the nutritive polypeptide is formulated in a pharmaceutically acceptable carrier. In one embodiment, the nutritive polypeptide is formulated in or as a food or a food ingredient. In one embodiment, the nutritive polypeptide is formulated in or as a beverage or a beverage ingredient. In one embodiment, the amino acid sequence encodes an enzyme having a primary activity, and wherein the nutritive polypeptide substantially lacks the primary activity. In one embodiment, the formulation is present as a liquid, semi-liquid or gel in a volume not greater than about 500 ml or as a solid or semi-solid in a total mass not greater than about 200 g. In one embodiment, the nutritive polypeptide includes an amino acid sequence at least about 90% identical to an edible species polypeptide or fragment thereof at least 50 amino acids in length, wherein the amino acid sequence has less than about 50% identity over at least 25 amino acids to a known allergen. In one embodiment, the formulations further include a component selected from a tastant, a protein mixture, a polypeptide, a peptide, a free amino acid, a carbohydrate, a lipid, a mineral or mineral source, a vitamin, a supplement, an organism, a pharmaceutical, and an excipient. In one embodiment, the human subject is suffering from a gastrointestinal protein malabsorption disease, disorder or condition. In one embodiment, the amino acid sequence contains a density of essential amino acids about equal to or greater than the density of essential chain amino acids present in a full-length reference nutritional polypeptide or a reference polypeptide-containing mixture. In one embodiment, the amino acid sequence contains a density of at least one amino acid selected from the group consisting of leucine, arginine and glutamine about equal to or greater than the density of the selected amino acid present in a full-length reference nutritional polypeptide or a reference polypeptide-containing mixture.

[0057] In another aspect, the invention provides formulations including at least one nutritive polypeptide including an amino acid sequence at least about 99% identical to an edible species polypeptide capable of being secreted from a microorganism, wherein the nutritive polypeptide is present in the formulation in an amount sufficient to provide a nutritional benefit equivalent to or greater than at least about 2% of a reference daily intake value of protein.

[0058] In another aspect, the invention provides nutritive formulations for the treatment or prevention of a muscle wasting disease, disorder or condition in a human subject suffering from obesity, including a nutritive amino acid composition including a plurality of free amino acids including an amino acid ratio at least about 90% identical to an amino acid ratio of a polypeptide sequence provided herein, wherein the nutritive amino acid composition is nutritionally complete; wherein the nutritive amino acid composition is present in an amount sufficient to provide a nutritional benefit to a human subject having reduced protein absorption capacity. In one embodiment, the formulation is present as a liquid, semi-liquid or gel in a volume not greater than about 500 ml or as a solid or semi-solid in a total mass not greater than about 200 g.

[0059] In another aspect, the invention provides methods of inducing calorie restriction in an overweight or obese human subject, including the steps of: i) identifying a human subject suffering from or at risk of obesity or being overweight, and ii) administering to the human subject a nutritional formulation in an amount sufficient to promote calorie restriction, wherein the nutritional formulation includes an isolated nutritive polypeptide including an amino acid sequence at least about 90% identical over at least about 50 amino acids to a polypeptide sequence provided herein; wherein the formulation includes at least 1.0 g of the nutritive polypeptide; wherein the formulation is present as a liquid, semi-liquid or gel in a volume not greater than about 500 ml or as a solid or semi-solid in a total mass not greater than about 200 g; and wherein the formulation is substantially free of non-comestible products.

[0060] In one aspect, the invention provides methods of preventing or reducing loss of muscle mass and/or muscle function in a human subject, including the steps of: i) identifying a human subject suffering from or at risk of a renal disease, and ii) administering to the human subject a nutritional formulation in an amount sufficient to prevent or reduce a loss of muscle mass and/or muscle function, wherein the nutritional formulation includes an isolated nutritive polypeptide including an amino acid sequence at least about 90% identical over at least about 50 amino acids to a polypeptide sequence provided herein; wherein the formulation includes at least 1.0 g of the nutritive polypeptide; wherein the formulation is present as a liquid, semi-liquid or gel in a volume not greater than about 500 ml or as a solid or semi-solid in a total mass not greater than about 200 g; and wherein the formulation is substantially free of non-comestible products. In one embodiment, the human subject is suffering from a renal disease and has received one or more doses of a pharmaceutical composition, wherein administration of the pharmaceutical composition increases a risk of loss of muscle mass and/or muscle function. In one embodiment, the human subject is suffering from a renal disease and has received one or more doses of a pharmaceutical composition, wherein i) the disease, disorder or condition or ii) the administration of the pharmaceutical composition, or both i) and ii) increases a risk of loss of muscle mass and/or muscle function.

[0061] In another aspect, the invention provides methods of treating a muscle wasting disease, disorder or condition in a human subject suffering from a renal disease, including the step of administering to the human subject a nutritional formulation in an amount sufficient to treat such muscle wasting disease, disorder or condition, wherein the nutritional formulation includes an isolated nutritive polypeptide including an amino acid sequence at least about 90% identical over at least about 50 amino acids to a polypeptide sequence provided herein; wherein the formulation includes at least 1.0 g of the nutritive polypeptide. In one embodiment, the formulation is administered on a dosage schedule sufficient to provide substantial protein nutrition to the human subject in the absence of consumption by the subject of an agriculturally-derived food product.

[0062] In another aspect, the invention provides methods of reducing the risk of a human subject developing a disease, disorder or condition characterized or exacerbated by protein malnourishment, including the steps of (i) identifying the human subject as suffering from a renal disease and being at risk of developing the protein malnourishment disease, disorder or condition; and (ii) administering in one or more doses a nutritional formulation including an isolated nutritive polypeptide including an amino acid sequence at least about 90% identical over at least about 50 amino acids to a polypeptide sequence provided herein; wherein the formulation includes at least 1.0 g of the nutritive polypeptide. In one embodiment, the human subject is at risk of developing malnutrition or protein malnutrition. In one embodiment, the human subject exhibits sarcopenia and/or cachexia. In one embodiment, the human subject has an inflammatory reaction or an autoimmune disorder. In one embodiment, the human subject has end-stage renal disease. In one embodiment, the human subject has chronic renal failure, acute renal failure, glomerulonephritis, glomerulonephrosis, tubular nephritis, interstitial nephritis, or nephrotic syndrome. In one embodiment, the human subject has undergone a surgical procedure. In one embodiment, the human subject has a urea cycle disorder. In one embodiment, the nutritional formulation is administered in conjunction with a surgical therapy. In one embodiment, the nutritional formulation is administered in conjunction with an exercise regimen. In one embodiment, the nutritional formulation is administered as an adjunct to administration a pharmaceutical composition. In one embodiment, the human subject has renal failure.

[0063] In another aspect, the invention provides methods of increasing muscle anabolism in a human subject suffering from a renal disease, including administering to a human subject in one or more doses a nutritional formulation including an isolated nutritive polypeptide including an amino acid sequence at least about 90% identical over at least about 50 amino acids to a polypeptide sequence provided herein; wherein the formulation includes at least 1.0 g of the nutritive polypeptide, wherein the nutritive formulation is administered to the human subject at a frequency sufficient to increase muscle anabolism in the subject after the administration thereof.

[0064] In another aspect, the invention provides methods of formulating a nutritional product for use in treating a human subject, including the steps of providing to a human subject suffering from a renal disease, a nutritive composition including an isolated nutritive polypeptide including an amino acid sequence at least about 90% identical over at least about 50 amino acids to a polypeptide sequence provided herein; and formulating the nutritive polypeptide with an acceptable excipient, wherein the isolated nutritive polypeptide has an aqueous solubility at pH 7 of at least 12.5 g/L, and wherein the isolated nutritive polypeptide has a simulated gastric digestion half-life of less than 30 minutes. In one embodiment, the methods further include combining the nutritive composition with at least one of a tastant, a nutritional carbohydrate and a nutritional lipid, wherein the product is present as a liquid, semi-liquid or gel in a volume not greater than about 500 ml or as a solid or semi-solid in a total mass not greater than about 200 g. In one embodiment, the product is substantially free of i) non-comestible products; and/or ii) a salt selected from sodium, potassium and chloride; and/or iii) an electrolyte selected from hydrogen phosphate, dihydrogen phosphate, and hydrogen bicarbonate.

[0065] In another aspect, the invention provides methods for selecting an amino acid sequence of a nutritive polypeptide wherein the nutritive polypeptide is suitable for use in treating a human subject suffering from a renal disease, including i) providing a library of amino acid sequences including a plurality of amino acid sequences, ii) identifying in the library one or more amino acid sequences including at least one amino acid of interest, and iii) selecting the one or more identified amino acid sequences, thereby selecting an amino acid sequence of a nutritive polypeptide.

[0066] In another aspect, the invention provides methods for selecting an amino acid sequence of a nutritive polypeptide wherein the nutritive polypeptide is suitable for use in treating a human subject suffering from a renal disease, including i) providing a library of amino acid sequences including a plurality of amino acid sequences, ii) identifying in the library one or more amino acid sequences including a ratio of at least one amino acid residues of interest to total amino acid residues greater than or equal to a selected ratio, and iii) selecting the one or more identified amino acid sequences, thereby selecting an amino acid sequence of a nutritive polypeptide.

[0067] In another aspect, the invention provides methods for selecting an amino acid sequence of a nutritive polypeptide wherein the nutritive polypeptide is suitable for use in treating a human subject suffering from a renal disease, including i) providing a library of amino acid sequences including a plurality of amino acid sequences, ii) identifying in the library one or more amino acid sequences including a ratio of at least one amino acid residues of interest to total amino acid residues less than or equal to a selected ratio, and iii) selecting the one or more identified amino acid sequences, thereby selecting an amino acid sequence of a nutritive polypeptide.

[0068] In another aspect, the invention provides nutritive formulations for the treatment or prevention of a muscle wasting disease, disorder or condition in a human subject suffering from a renal disease, including an isolated nutritive polypeptide including an amino acid sequence at least about 90% identical over at least about 50 amino acids to a polypeptide sequence provided herein; wherein the nutritive polypeptide is present in an amount sufficient to provide a nutritional benefit to a human subject having or at risk of having reduced protein absorption capacity. In one embodiment, the polypeptide sequence includes a ratio of essential amino acid residues to total amino acid residues of at least 34% and wherein the polypeptide sequence is nutritionally complete. In one embodiment, the essential amino acids present in the nutritive polypeptide are substantially bioavailable. In one embodiment, the isolated nutritive polypeptide has an aqueous solubility at pH 7 of at least 12.5 g/L. In one embodiment, the isolated nutritive polypeptide has a simulated gastric digestion half-life of less than 30 minutes. In one embodiment, the nutritive polypeptide is formulated in a pharmaceutically acceptable carrier. In one embodiment, the nutritive polypeptide is formulated in or as a food or a food ingredient. In one embodiment, the nutritive polypeptide is formulated in or as a beverage or a beverage ingredient. In one embodiment, the amino acid sequence encodes an enzyme having a primary activity, and wherein the nutritive polypeptide substantially lacks the primary activity. In one embodiment, the formulation is present as a liquid, semi-liquid or gel in a volume not greater than about 500 ml or as a solid or semi-solid in a total mass not greater than about 200 g. In one embodiment, the nutritive polypeptide includes an amino acid sequence at least about 90% identical to an edible species polypeptide or fragment thereof at least 50 amino acids in length, wherein the amino acid sequence has less than about 50% identity over at least 25 amino acids to a known allergen. In one embodiment, the formulations further include a component selected from a tastant, a protein mixture, a polypeptide, a peptide, a free amino acid, a carbohydrate, a lipid, a mineral or mineral source, a vitamin, a supplement, an organism, a pharmaceutical, and an excipient. In one embodiment, the human subject is suffering from an acute kidney injury or a chronic kidney disease. In one embodiment, the amino acid sequence contains a density of essential amino acids about equal to or greater than the density of essential chain amino acids present in a full-length reference nutritional polypeptide or a reference polypeptide-containing mixture. In one embodiment, the amino acid sequence contains: i) a density of at least one selected branched chain amino acid about equal to or greater than the density of the selected branched chain amino acid present in a full-length reference nutritional polypeptide or a reference polypeptide-containing mixture; ii) a density of arginine about equal to or greater than the density of arginine present in the full-length reference nutritional polypeptide or the reference polypeptide-containing mixture; and/or iii) a density of glutamine and/or glutamic acid lower than the density of glutamine and/or glutamic acid present in the full-length reference nutritional polypeptide or the reference polypeptide-containing mixture.

[0069] In another aspect, the invention provides formulations including at least one nutritive polypeptide including an amino acid sequence at least about 99% identical to an edible species polypeptide capable of being secreted from a microorganism, wherein the nutritive polypeptide is present in the formulation in an amount sufficient to provide a nutritional benefit equivalent to or greater than at least about 2% of a reference daily intake value of protein.

[0070] In another aspect, the invention provides nutritive formulations for the treatment or prevention of a muscle wasting disease, disorder or condition in a human subject suffering from a renal disease, including a nutritive amino acid composition including a plurality of free amino acids including an amino acid ratio at least about 90% identical to an amino acid ratio of a polypeptide sequence provided herein, wherein the nutritive amino acid composition is nutritionally complete; wherein the nutritive amino acid composition is present in an amount sufficient to provide a nutritional benefit to a human subject having reduced protein absorption capacity. In one embodiment, the formulation is present as a liquid, semi-liquid or gel in a volume not greater than about 500 ml or as a solid or semi-solid in a total mass not greater than about 200 g.

[0071] In another aspect, the invention provides methods of treating or reducing the severity of a renal disease in a human subject, including the steps of: i) identifying a human subject suffering from or at risk of developing a renal disease, and ii) administering to the human subject a nutritional formulation in an amount sufficient to treat or prevent the renal disease, wherein the nutritional formulation includes an isolated nutritive polypeptide including an amino acid sequence at least about 90% identical over at least about 50 amino acids to a polypeptide sequence provided herein; wherein the formulation includes at least 1.0 g of the nutritive polypeptide; wherein the formulation is present as a liquid, semi-liquid or gel in a volume not greater than about 500 ml or as a solid or semi-solid in a total mass not greater than about 200 g; and wherein the formulation is substantially free of non-comestible products. In one embodiment, the human subject has a nephrotic syndrome and suffers from a muscle wasting condition.

### BRIEF DESCRIPTION OF THE FIGURES

[0072] These and other features, aspects, and advantages of the present invention will become better understood with regard to the following description, and accompanying drawings, where:

[0073] FIG. 1 is an image demonstrating SDS-PAGE analysis of the purification of [[SEQID]]SEQ ID NO:−00105 by IMAC.

[0074] FIG. 2 is a chart demonstrating net charge per amino acid as a function of pH for nutritive polypeptides predicted to bind to either anion or cation exchange resin. (1) SEQ ID NO:105, (2) SEQ ID NO:8, (3) SEQ ID NO:9, (4) SEQ ID NO:475, (5) SEQ ID NO:472, (6) SEQ ID NO:640, (7) SEQ ID NO:19.

[0075] FIG. 3 is a chart demonstrating total charge per amino acid over a range of pHs for exemplary nutritive polypeptides. (1) SEQ ID NO:475, (2) SEQ ID NO:9, (3) SEQ ID NO:478, (4) SEQ ID NO:433, (5) SEQ ID NO:472.

[0076] FIG. 4 is a chart demonstrating purity of SEQ ID NO:9 is as a function of ammonium sulfate concentration.

[0077] FIG. 5 is an image demonstrating SDS-PAGE analysis demonstrating secretion of SEQ ID NO:409 (left) and SEQ ID NO:420 (right) with new signal peptide compared to native signal peptide. FIG. 6 is a chart demonstrating supernatant concentration of GLP-1 (7-36) detected in the supernatant following stimulation, error bars are the standard deviation of the technical replicates.

[0078] FIG. 6 is a chart demonstrating supernatant concentration of GLP-1 (7-36) detected in the supernatant following stimulation, error bars are the standard deviation of the technical replicates.

[0079] FIG. 7 is a chart demonstrating average blood glucose values over time during OGTT of vehicle, SEQ ID NO:105 (“SEQID-00105”), Arginine, and SEQ ID NO:338 (“SEQID-00338”). The error bars shown are the standard errors of the mean.

[0080] FIG. 8A is a chart demonstrating the area under curve for blood glucose integrated from 0-120 minutes after acute dosing of SEQ ID NO:105 (“SEQID-00105”), Arginine, and SEQ ID NO:338 (“SEQID-00338”).

[0081] FIG. 8B is a chart demonstrating the area under curve for blood glucose integrated from 0-60 minutes after acute dosing of SEQ ID NO:105 (“SEQID-00105”), Arginine, and SEQ ID NO:338 (“SEQID-00338”).

[0082] FIG. 9 is a chart demonstrating average plasma insulin concentration for n=6 rats per treatment group over time. The error bars show the standard error of the mean.

[0083] FIG. 10 is a chart demonstrating plasma insulin area under curve integrated between 0-240 and 0-60 minutes for all treatment groups. The error bars show the standard error of the mean.

[0084] FIG. 11 is a chart demonstrating average plasma GLP-1 concentration for n=6 rats per treatment group over time. The error bars shown here correspond to the standard error of the mean.

[0085] FIG. 12 is a chart demonstrating average blood glucose values over time. The error bars shown are the standard errors of the mean.

[0086] FIG. 13 is a chart demonstrating integrated AUC for each treatment group between the time of glucose challenge (0 min.) and 60 minutes, and between time 0 and 120 minutes. The error bars shown are the standard errors of the mean.

[0087] FIG. 14 is a chart demonstrating average plasma insulin concentration for n=6 rats per treatment group in vehicle & SEQ ID NO:105 (“SEQID-00105”) and n=5 rats per treatment group in the case of SEQ ID NO:338 (“SEQID-00338”) over the course of the experiment. The error bars shown are the standard errors of the mean.

[0088] FIG. 15 is a chart demonstrating integrated area under the curve for vehicle, SEQ ID NO:105 (“SEQID-00105”) and SEQ ID NO:338 (“SEQID-00338”) between 0 and 90 minutes and between 0 and 60 minutes. Error bars shown here correspond to the standard error of the mean.

[0089] FIG. 16 is a chart demonstrating average plasma GLP-1 concentration for n=6 rats per treatment group for vehicle and SEQ ID NO:105 (“SEQID-00105”) and n=5 rats for SEQ ID NO:338 (“SEQID-00338”) over the course of the experiment. Error bars shown here correspond to the standard error of the mean.

[0090] FIG. 17 is a chart demonstrating area under curve for GLP-1 (7-36) for each treatment group integrated to 0-90 and 0-60 minutes. Error bars shown here correspond to the standard error of the mean.

[0091] FIG. 18 is a chart demonstrating average blood glucose values during OGTT of vehicle, SEQ ID NO:105 (“SEQID-00105”), Alogliptin, and the combination for n=6 rats per treatment group. Error bars shown here correspond to the standard error of the mean.

[0092] FIG. 19 is a chart demonstrating AlphaLISA® plasma insulin over time for vehicle and SEQ ID NO:105 (“SEQID-00105”) administered at three different doses. Error bars shown here are the standard error of the mean.

[0093] FIG. 20 is a chart demonstrating AlphaLISA® plasma insulin over time for vehicle and SEQ ID NO:426 (“SEQID-00426”), SEQ ID NO:338 (“SEQID-00338”), SEQ ID NO:341 (“SEQID-00341”). Error bars shown here are the standard error of the mean.

[0094] FIG. 21 is a chart demonstrating integrated area under curves for plasma insulin concentrations for SEQ ID NO:105 (“SEQID-00105”) at three doses between 0 and 240 minutes and between 0 and 60 minutes. Error bars shown here are the standard error of the mean.

[0095] FIG. 22 is a chart demonstrating integrated area under curves for plasma insulin concentrations for vehicle, SEQ ID NO:426 (“SEQID-00426”), SEQ ID NO:338 (“SEQID-00338”), and SEQ ID NO:341 (“SEQID-00341”) between 0 and 240 minutes and between 0 and 60 minutes. Error bars shown here are the standard error of the mean.

[0096] FIG. 23 is a chart demonstrating AlphaLISA® plasma insulin over time for SEQ ID NO:423 (“SEQID”), SEQ ID NO:587 (“SEQID-00587”), SEQ ID NO:105 (“SEQID-00105”). Error bars shown here are the standard error of the mean.

[0097] FIG. 24 is a chart demonstrating AlphaLISA® plasma insulin over time for vehicle SEQ ID NO:424 (“SEQID-00424”), SEQ ID NO:425 (“SEQID-00425”), and SEQ ID NO:429 (“SEQID-00429”). Error bars shown here are the standard error of the mean.

[0098] FIG. 25 is a chart demonstrating integrated area under curves for plasma insulin concentrations for vehicle, SEQ ID NO:423 (“SEQID-00423”), SEQ ID NO:587 (“SEQID-00587”, and SEQ ID NO:105 (“SEQID-00105”) between 0 and 240 minutes and between 0 and 60 minutes. Error bars shown here are the standard error of the mean.

[0099] FIG. 26 is a chart demonstrating integrated area under curves for plasma insulin concentrations for vehicle, SEQ ID NO:424 (“SEQID-00424”), SEQ ID NO:425 (“SEQID-00425”), and SEQ ID NO:429 (“SEQID-00429”) between 0 and 240 minutes and between 0 and 60 minutes. Error bars shown here are the standard error of the mean.

[0100] FIG. 27 is a chart demonstrating ELISA plasma insulin over time for vehicle and SEQ ID NO:105, SEQ ID NO:240, and SEQ ID NO:559. Error bars shown here are the standard error of the mean.

[0101] FIG. 28 is a chart demonstrating integrated area under curves for plasma insulin concentrations for vehicle, SEQ ID NO:105 (“SEQID-00105”), SEQ ID NO:240 (“SEQID-00240”), and SEQ ID NO:559 (“SEQID-00559”) between 0 and 240 minutes and 0 and 60 minutes. Error bars shown here are the standard error of the mean.

[0102] FIG. 29 is a chart demonstrating GLP-2 concentration over a 4 hour time course for vehicle and SEQ ID NO:240 (“SEQID-00240”), n=4 and n=5 rats, respectively. Error bars shown are the standard error of the mean.

[0103] FIG. 30 is a chart demonstrating integrated GLP-2 area under the curve over the first hour and the full 4 hours. Error bars shown are the 95% confidence interval.

[0104] FIG. 31 is a chart demonstrating average plasma insulin response to SEQ ID NO:105 of all subjects over time.

[0105] FIG. 32 is a chart demonstrating average plasma insulin fold response to SEQ ID NO:105 over baseline.

[0106] FIG. 33 is a chart demonstrating average plasma insulin response to SEQ ID NO:426 of all subjects over time.

[0107] FIG. 34 is a chart demonstrating average plasma insulin fold response to SEQ ID NO:426 over baseline.

[0108] FIG. 35 is a chart demonstrating average total Gastric Inhibitory Polypeptide (GIP) response of all patients to SEQ ID NO:426.

[0109] FIG. 36 is a chart demonstrating a Gastric Inhibitory Polypeptide (GIP) fold response of all patients to SEQ ID NO:426.

[0110] FIG. 37 is a chart demonstrating alphascreen signal (y-axis) measured at different Leucine concentrations. Error bars shown are the standard deviation of replicates.

[0111] FIG. 38 is a chart demonstrating Leucine Dose Response in Minimal Amino Acid Media in Primary RSKMC. Error bars shown are the standard deviation.

[0112] FIG. 39 is a chart demonstrating In vitro Leucine Dose Response of rps6 Phosphorylation in Isolate Soleus Muscle. Error bars shown are the standard deviation.

[0113] FIG. 40 is a chart demonstrating In vitro Leucine Dose Response of rps6 Phosphorylation in Isolated Gastrocnemius Muscle. Error bars shown are the standard deviation.

[0114] FIG. 41 is a chart demonstrating In vitro Leucine Dose Response of rps6 Phosphorylation in Isolate Extensor Digitorum Longus Muscle. Error bars shown are the standard deviation.

[0115] FIG. 42 is a chart demonstrating Combined Activity of Leu/Tyr/Arg on RPS6 Phosphorylation. Error bars shown are the standard deviation.

[0116] FIG. 43 is a chart demonstrating Arginine Stimulation of RPS6 in Leu/Tyr Background. Error bars shown are the standard deviation.

[0117] FIG. 44 is a chart demonstrating Leucine Stimulation of RPS6 in Arg/Tyr Background. Error bars shown are the standard deviation.

[0118] FIG. 45 is a chart demonstrating Tyrosine Stimulation of RPS6 in Arg/Leu Background. Error bars shown are the standard deviation.

[0119] FIG. 46 is a chart demonstrating a time-course of free Leu release during Pancreatin digest of SEQ ID NO:105.

[0120] FIG. 47 is a chart demonstrating viscosity measured in centipoise for SEQ ID NO:105 at 4 C (closed circles) and 25 C (open circles) and whey at 4 C (closed squares) and 25 C (open squares) over a range of protein concentrations.

[0121] FIG. 48 is a chart demonstrating (Left) Initial and final (after heating to 90° C. and then cooling to 20° C.) protein circular dichroism spectrum for SEQ ID NO:105 and (Right) change in ellipticity at a given wavelength over the temperature range for that SEQ ID NO:105.

[0122] FIG. 49 is an image demonstrating Western blot analysis for mannose-containing glycans. A) Coomassie®-stained gel. B) GNA blotted membrane. In both panels, lanes are as follows: 1) Pre-stained protein ladder, 2) SEQ ID NO: 363 (5 μg) from A. niger, 3) whole cell extract (5 μg) from E. coli transformed with an expression vector encoding SEQ ID NO:363, 4), GNA positive control carboxypeptidase (5 μg), 5) soluble lysate (5 μg) from E. coli transformed with an expression vector encoding SEQ ID NO:363.

[0123] FIG. 50 is an image demonstrating Western blot analysis for Neu5Gc. A) Coomassie®-stained gel. B) anti-Neu5Gc probed membrane. In both panels, lanes are as follows: 1&10) Pre-stained protein ladder (New England Biolab), 2&11) beef extract (30 μg), 3) pork extract (30 μg), 4) deer extract (30 μg), 5) lamb extract (30 μg), 6) turkey extract (30 μg), 7) chicken extract (30 μg), 8) cod extract (30 μg), 9) Protein Mixture 1 (10 μg), 12-15) 168 nutritive polypeptide library (30 μg) expressed in 12) E. coli (IMAC-purified lysate), 13) B. subtilis (supernatant), 14) B. subtilis (lysate), 15) B. subtilis (IMAC-purified lysate), 16-20) cDNA Library (30 μg) expressed in 16) B. subtilis (PH951 Grac lysate), 17) E. coli (Rosetta™ soluble lysate), 18) E. coli (Rosetta™ whole cell), 19) E. coli (GamiB lysate), and 20) E. coli (Gami2 lysate).

[0124] FIG. 51 is an image demonstrating Western blot analysis for Xylose and Fucose. A) Coomassie-stained gel. B) and C) anti-Neu5Gc probed membrane. In western blot analysis of samples of protein extracted from plants and fungi or recombinantly expressed by E. coli and A. niger. xylose- and fucose-containing glycans in A) Coomassie®-stained gel. B) and C) anti-Neu5Gc-blotted membrane. In the panels, lanes are as follows: 1&11) Pre-stained protein ladder (New England Biolab), 2) yeast extract (30 μg), 3) flaxseed extract (30 μg), 4) chicken extract (30 μg), 5) corn extract (30 μg), 6) potato extract (30 μg), 7) mushroom extract (30 μg), 8) Protein Mixture 2 (30 μg), 9) HRP (2 μg), 10) fetuin (2 μg), 12) soy extract (30 μg), 13) rice extract (30 μg), 14) broccoli extract (30 μg), 15) tomato extract (30 μg), 16) blueberry extract (30 μg), 17) grape extract (30 μg), 18) Protein Mixture 2 (30 μg), 19) HRP (2 μg), 20) fetuin (2 μg).

[0125] FIG. 52A is a series of charts demonstrating change in average area under the curve (AUC) (±SD) of plasma amino acid concentrations (μM·h) measured in blood samples collected from rats (n=2-4) over 4 h following oral administration of the indicated nutritive polypeptides at the doses listed in Table E33A.

[0126] FIG. 52B is a series of charts demonstrating change in average area under the curve (AUC) (±SD) of plasma amino acid concentrations (μM·h) measured in blood samples collected from rats (n=2-4) over 4 h following oral administration of the indicated nutritive polypeptides at the doses listed in Table E33A.

[0127] FIG. 52C is a series of charts demonstrating change in average area under the curve (AUC) (±SD) of plasma amino acid concentrations (μM·h) measured in blood samples collected from rats (n=2-4) over 4 h following oral administration of the indicated nutritive polypeptides at the doses listed in Table E33A.

[0128] FIG. 52D is a series of charts demonstrating change in average area under the curve (AUC) (±SD) of plasma amino acid concentrations (μM·h) measured in blood samples collected from rats (n=2-4) over 4 h following oral administration of the indicated nutritive polypeptides at the doses listed in Table E33A. BCAA: branched chain amino acids, EAA: essential amino acids.

[0129] FIG. 53A is a series of charts demonstrating average plasma amino acid concentration of indicated amino acids (±SD)-time curve for rats (n=4) orally administered of SEQ ID NO:105 at 2.85 g/kg.

[0130] FIG. 53B is a series of charts demonstrating average plasma amino acid concentration of indicated amino acids (±SD)-time curve for rats (n=4) orally administered of SEQ ID NO:105 at 2.85 g/kg.

[0131] FIG. 53C is a series of charts demonstrating average plasma amino acid concentration of indicated amino acids (±SD)-time curve for rats (n=4) orally administered of SEQ ID NO:105 at 2.85 g/kg.

[0132] FIG. 53D is a series of charts demonstrating average plasma amino acid concentration of indicated amino acids (±SD)-time curve for rats (n=4) orally administered of SEQ ID NO:105 at 2.85 g/kg. BCAA: branched chain amino acids, EAA: essential amino acids.

[0133] FIG. 54 is a series of charts demonstrating dose-response effect of SEQ ID NO:105. (Left) Average plasma Leu concentration (±SD)-time curve (Right) Average area under the curve (AUC) (±SD) of plasma amino acid concentrations (μM·h) measured in blood samples collected from rats (n=4) over 4 h following oral administration of SEQ ID NO:105 at the doses listed in Table E33A.

[0134] FIG. 55 is a series of charts demonstrating plasma amino acid concentrations during rat pharmacokinetic studies of native and modified forms of SEQ ID NO:363. Plasma amino acid profile of essential amino acids (EAAs) (A), Leucine (B), Serine (C), and Threonine (D) following oral administration of saline (circle (●), solid line) (n=4), native SEQ ID NO: 363 (square (▪), solid line) (n=4), deglycosylated SEQ ID NO: 363 (open circle (∘), dashed line) (n=2), and hydrolyzed SEQ ID NO: 363 (open square (□), dashed line) (n=4). Data represent the mean±the standard deviation of the mean for n=2-4 rats, as indicated above.

[0135] FIG. 56 is a series of charts demonstrating change in average FSR for WPI, SEQ ID NO:105 (“SEQID-105”), and SEQ ID NO:363 (“SEQID-363”).

[0136] FIG. 57 is a series of charts demonstrating human plasma time course of the indicated measured amino acids for WPI and SEQ ID NO:105.

[0137] FIG. 58 is a series of charts demonstrating human plasma time course of the indicated measured amino acids for WPI and SEQ ID NO:105.

[0138] FIG. 59 is a series of charts demonstrating human plasma time course of the indicated measured amino acids for WPI and SEQ ID NO:105.

[0139] FIG. 60 is a series of charts demonstrating human plasma time course of the indicated measured amino acid and/or the aggregate groups, essential amino acids (EAA), branched chain amino acids (BCAA), and total amino acids (TAA) for WPI and SEQ ID NO:105.

[0140] FIG. 61 is a chart demonstrating integrated area under the curve (AUC) of measured amino acids, for WPI and SEQ ID NO:105 (“SEQID-105”).

[0141] FIG. 62 is a chart demonstrating integrated area under the curve (AUC) of measured amino acids, for WPI and SEQ ID NO:105 (“SEQID-105”).

[0142] FIG. 63 is a chart demonstrating integrated area under the curve (AUC) of aggregate groups, essential amino acids (EAA), branched chain amino acids (BCAA), and total amino acids (TAA), for WPI and SEQ ID NO:105 (“SEQID-105”).

[0143] FIG. 64 is a series of charts demonstrating human plasma time course of the indicated measured amino acids for WPI and SEQ ID NO:105.

[0144] FIG. 65 is a series of charts demonstrating human plasma time course of the indicated measured amino acids for WPI and SEQ ID NO:105.

[0145] FIG. 66 is a series of charts demonstrating human plasma time course of the indicated measured amino acids for WPI and SEQ ID NO:105.

[0146] FIG. 67 is a series of charts demonstrating human plasma time course of the indicated measured amino acid and/or the aggregate groups, essential amino acids (EAA), branched chain amino acids (BCAA), and total amino acids (TAA) for WPI and SEQ ID NO:105.

[0147] FIG. 68 is a chart demonstrating integrated area under the curve (AUC) of measured amino acids, for WPI and SEQ ID NO:105 (“SEQID-105”).

[0148] FIG. 69 is a chart demonstrating integrated area under the curve (AUC) of measured amino acids, for WPI and SEQ ID NO:105 (“SEQID-105”).

[0149] FIG. 70 is a chart demonstrating integrated area under the curve (AUC) of aggregate groups, essential amino acids (EAA), branched chain amino acids (BCAA), and total amino acids (TAA), for WPI and SEQ ID NO:105 (“SEQID-105”).

[0150] FIG. 71 is a series of charts demonstrating human plasma time course of the indicated measured amino acids for WPI and SEQ ID NO:363.

[0151] FIG. 72 is a series of charts demonstrating human plasma time course of the indicated measured amino acids for WPI and SEQ ID NO:363.

[0152] FIG. 73 is a series of charts demonstrating human plasma time course of the indicated measured amino acids for WPI and SEQ ID NO:363.

[0153] FIG. 74 is a series of charts demonstrating human plasma time course of the indicated measured amino acid and/or the aggregate groups, essential amino acids (EAA), branched chain amino acids (BCAA), and total amino acids (TAA) for WPI and SEQ ID NO:363.

[0154] FIG. 75 is a series of charts demonstrating human plasma time course of the indicated measured amino acids for WPI and SEQ ID NO:426.

[0155] FIG. 76 is a series of charts demonstrating human plasma time course of the indicated measured amino acids for WPI and SEQ ID NO:426.

[0156] FIG. 77 is a series of charts demonstrating human plasma time course of the indicated measured amino acids for WPI and SEQ ID NO:426.

[0157] FIG. 78 is a series of charts demonstrating human plasma time course of the indicated measured amino acid and/or the aggregate groups, essential amino acids (EAA), branched chain amino acids (BCAA), and total amino acids (TAA) for WPI and SEQ ID NO:426.

### DETAILED DESCRIPTION

[0158] Terms used in the claims and specification are defined as set forth below unless otherwise specified.

[0159] It must be noted that, as used in the specification and the appended claims, the singular forms “a,” “an” and “the” include plural referents unless the context clearly dictates otherwise.

### Definitions

[0160] An “agriculturally-derived food product” is a food product resulting from the cultivation of soil or rearing of animals.

[0161] The term “ameliorating” refers to any therapeutically beneficial result in the treatment of a disease state, e.g., including prophylaxis, lessening in the severity or progression, remission, or cure thereof.

[0162] As used herein, the term “autotrophic” refers to an organism that produces complex organic compounds (such as carbohydrates, fats, and proteins) from simple inorganic molecules using energy from light (by photosynthesis) or inorganic chemical reactions (chemosynthesis).

[0163] As used herein, a “body mass index” or “BMI” or “Quetelet index” is a subject's weight in kilograms divided by the square of the subject's height in meters (kg/m²). For adults, a frequent use of the BMI is to assess how much an individual's body weight departs from what is normal or desirable for a person of his or her height. The weight excess or deficiency may, in part, be accounted for by body fat, although other factors such as muscularity also affect BMI significantly. The World Health Organization regards a BMI of less than 18.5 as underweight and may indicate malnutrition, an eating disorder, or other health problems, while a BMI greater than 25 is considered overweight and above 30 is considered obese. (World Health Organization. BMI classification).

[0164] As used herein, a “branched chain amino acid” is an amino acid selected from Leucine, Isoleucine, and Valine.

[0165] As used herein, “cachexia” refers to a multifaceted clinical syndrome that results in muscle wasting and weight loss. It is a complex condition where protein catabolism exceeds protein anabolism, which makes muscle wasting a primary feature of the condition. In addition to the metabolic derangements in protein metabolism, it is also characterized by anorexia and inflammation. These derangements plus impaired protein metabolism are responsive to nutrition therapy to varying degrees.

[0166] As used herein, “calorie control” and “calorie restriction” refer to the process of reducing a subject's calorie intake from food products, either relative to the subject's prior calorie intake or relative to an appropriate calorie intake standard.

[0167] Generally, the terms “cancer” and “cancerous” refer to or describe the physiological condition in mammals that is typically characterized by unregulated cell growth. More specifically, cancers that are treated using any one or more tyrosine kinase inhibitors, other drugs blocking the receptors or their ligands, or variants thereof, and in connection with the methods provided herein include, but are not limited to, carcinoma, lymphoma, blastoma, sarcoma, leukemia, mesothelioma, squamous cell cancer, lung cancer including small-cell lung cancer and non-small cell lung cancer (which includes large-cell carcinoma, adenocarcinoma of the lung, and squamous carcinoma of the lung), cancer of the peritoneum, hepatocellular cancer, gastric or stomach cancer (including gastrointestinal cancer and gastrointestinal stromal cancer), pancreatic cancer, glioblastoma, cervical cancer, ovarian cancer, liver cancer, bladder cancer, breast cancer, colon cancer, colorectal cancer, endometrial or uterine carcinoma, salivary gland carcinoma, kidney or renal cancer, prostate cancer, cervical cancer, vulval cancer, thyroid cancer, head and neck cancer, melanoma, superficial spreading melanoma, lentigo maligna melanoma, acral lentiginous melanomas, nodular melanomas, T-cell lymphomas, B-cell lymphomas (including low grade/follicular non-Hodgkin's lymphoma (NHL); small lymphocytic (SL) NHL; intermediate grade/follicular NHL; intermediate grade diffuse NHL; high grade immunoblastic NHL; high grade lymphoblastic NHL; high grade small non-cleaved cell NHL; bulky disease NHL; mantle cell lymphoma; AIDS-related lymphoma; and Waldenstrom's Macroglobulinemia); chronic lymphocytic leukemia (CLL); acute myeloid leukemia (AML); chronic myeloid leukemia (CML); acute lymphoblastic leukemia (ALL); Hairy cell leukemia; chronic myeloblastic leukemia; or post-transplant lymphoproliferative disorder (PTLD), as well as abnormal vascular proliferation associated with phakomatoses, edema (such as that associated with brain tumors), and Meigs' syndrome.

[0168] A “comestible product” includes an edible product, while a “non-comestible product” is generally an inedible product or contains an inedible product. To be “substantially free of non-comestible products” means a composition does not have an amount or level of non-comestible product sufficient to render the composition inedible, dangerous or otherwise unfit for consumption by its intended consumer. Alternatively, a polypeptide can be substantially free of non-comestible products, meaning the polypeptide does not contain or have associated therewith an amount or level of non-comestible product sufficient to render a composition containing the polypeptide inedible by, or unsafe or deleterious to, its intended consumer. In preferred embodiments a composition substantially free of non-comestible products can be consumed in a nutritional amount by an intended consumer who does not suffer or is not at increased risk of suffering a deleterious event from such consumption. For example, levels of lead and other metals are well-documented as having significant risk including toxicity to humans when present in food, particularly foods containing an agriculturally-derived product grown in soil contaminated with lead and/or other metals. Thus, products such as foods, beverages, and compounds containing industrially-produced polypeptides having metal content above a certain parts per million (ppm), are considered non-comestible products, such metal content depending upon the metal as recognized in the art. For example, inclusion of lead or cadmium in an industrially-produced polypeptide at levels such that the lead will have a deleterious biological effect when consumed by a mammal will generally render a composition containing the industrially-produced polypeptide non-comestible. Notwithstanding the above, some polypeptides have certain amounts of metals complexed to or incorporated therein (such as iron, zinc, calcium and magnesium) and such metals shall not necessarily render the polypeptides non-comestible.

[0169] The term “control sequences” is intended to encompass, at a minimum, any component whose presence is essential for expression, and can also encompass an additional component whose presence is advantageous, for example, leader sequences and fusion partner sequences.

[0170] As used herein, a patient is “critically-medically ill” if the patient, because of medical illness, experiences changes in at least one of body mass index and muscle mass (e.g., sarcopenia). In some embodiments the patient is confined to bed for at least 25%, at least 50%, at least 60%, at least 70%, at least 80%, at least 90%, at least 95%, or 100% of their waking time. In some embodiments the patient is unconscious. In some embodiments the patient has been confined to bed as described in this paragraph for at least 1 day, 2 days, 3 days, 4 days, 5 days, 10 days, 2 weeks, 3 weeks, 4 weeks, 5 weeks, 10 weeks or longer.

[0171] As used herein, the phrase “degenerate variant” of a reference nucleic acid sequence encompasses nucleic acid sequences that can be translated, according to the standard genetic code, to provide an amino acid sequence identical to that translated from the reference nucleic acid sequence. The term “degenerate oligonucleotide” or “degenerate primer” is used to signify an oligonucleotide capable of hybridizing with target nucleic acid sequences that are not necessarily identical in sequence but that are homologous to one another within one or more particular segments.

[0172] As used herein a “desirable body mass index” is a body mass index of from about 18.5 to about 25. Thus, if a subject has a BMI below about 18.5, then an increase in the subject's BMI is an increase in the desirability of the subject's BMI. If instead a subject has a BMI above about 25, then a decrease in the subject's BMI is an increase in the desirability of the subject's BMI.

[0173] As used herein, the term “diabetes” includes any metabolic disease in which a subject is unable to produce any or a sufficient amount of insulin or is otherwise unable to regulate blood glucose level. The term “pre-diabetes” is also termed “impaired fasting glucose” includes a condition in which fasting glucose is above an accepted normal limit

[0174] As used herein, an “elderly” mammal is one who experiences age related changes in at least one of body mass index and muscle mass (e.g., age related sarcopenia). In some embodiments an “elderly” human is at least 50 years old, at least 60 years old, at least 65 years old, at least 70 years old, at least 75 years old, at least 80 years old, at least 85 years old, at least 90 years old, at least 95 years old, or at least 100 years old. In some embodiments and an elderly animal, mammal, or human is a human who has experienced a loss of muscle mass from peak lifetime muscle mass of at least 5%, at least 10%, at least 15%, at least 20%, at least 25%, at least 30%, at least 35%, at least 40%, at least 45%, at least 50%, at least 55%, or at least 60%. Because age related changes to at least one of body mass index and muscle mass are known to correlate with increasing age, in some embodiments an elderly mammal is identified or defined simply on the basis of age. Thus, in some embodiments an “elderly” human is identified or defined simply by the fact that their age is at least 60 years old, at least 65 years old, at least 70 years old, at least 75 years old, at least 80 years old, at least 85 years old, at least 90 years old, at least 95 years old, or at least 100 years old, and without recourse to a measurement of at least one of body mass index and muscle mass.

[0175] As used herein, an “essential amino acid” is an amino acid selected from Histidine, Isoleucine, Leucine, Lysine, Methionine, Phenylalanine, Threonine, Tryptophan, and Valine. However, it should be understood that “essential amino acids” can vary through a typical lifespan, e.g., cysteine, tyrosine, and arginine are considered essential amino acids in infant humans. Imura K, Okada A (1998). “Amino acid metabolism in pediatric patients”. Nutrition 14 (1): 143-8. In addition, the amino acids arginine, cysteine, glycine, glutamine, histidine, proline, serine and tyrosine are considered “conditionally essential” in adults, meaning they are not normally required in the diet, but must be supplied exogenously to specific populations that do not synthesize them in adequate amounts. Fürst P, Stehle P (1 Jun. 2004). “What are the essential elements needed for the determination of amino acid requirements in humans?”. Journal of Nutrition 134 (6 Suppl): 1558S-1565S; and Reeds P J (1 Jul. 2000). “Dispensable and indispensable amino acids for humans”. J. Nutr. 130 (7): 1835S-40S.

[0176] As used herein, “exercise” is, most broadly, any bodily activity that enhances or maintains physical fitness and overall health and wellness. Exercise is performed for various reasons including strengthening muscles and the cardiovascular system, honing athletic skills, weight loss or maintenance, as well as for the purpose of enjoyment.

[0177] As used herein, an “exercise regimen” includes any course of exercise for the promotion of health, or for the treatment or prevention of disease.

[0178] As used herein, an “expression control sequence” refers to polynucleotide sequences which are necessary to affect the expression of coding sequences to which they are operatively linked. Expression control sequences are sequences which control the transcription, post-transcriptional events and translation of nucleic acid sequences. Expression control sequences include appropriate transcription initiation, termination, promoter and enhancer sequences; efficient RNA processing signals such as splicing and polyadenylation signals; sequences that stabilize cytoplasmic mRNA; sequences that enhance translation efficiency (e.g., ribosome binding sites); sequences that enhance protein stability; and when desired, sequences that enhance protein secretion. The nature of such control sequences differs depending upon the host organism; in prokaryotes, such control sequences generally include promoter, ribosomal binding site, and transcription termination sequence.

[0179] As used herein, “function” and “functional performance” refers to a functional test that simulates daily activities. “Muscle function” or “functional performance” is measured by any suitable accepted test, including timed-step test (step up and down from a 4 inch bench as fast as possible 5 times), timed floor transfer test (go from a standing position to a supine position on the floor and thereafter up to a standing position again as fast as possible for one repetition), and physical performance battery test (static balance test, chair test, and a walking test) (Borsheim et al., “Effect of amino acid supplementation on muscle mass, strength and physical function in elderly,” Clin Nutr 2008; 27:189-195). As used herein, a “performance-associated” injury or damage, such as a tissue injury or tissue damage, results from a functional activity, such as a physical or athletic performance.

[0180] The term “fusion protein” refers to a polypeptide comprising a polypeptide or fragment coupled to heterologous amino acid sequences. Fusion proteins are useful because they can be constructed to contain two or more desired functional elements that can be from two or more different proteins. A fusion protein comprises at least 10 contiguous amino acids from a polypeptide of interest, or at least 20 or 30 amino acids, or at least 40, 50 or 60 amino acids, or at least 75, 100 or 125 amino acids. The heterologous polypeptide included within the fusion protein is usually at least 6 amino acids in length, or at least 8 amino acids in length, or at least 15, 20, or 25 amino acids in length. Fusions that include larger polypeptides, such as an IgG Fc region, and even entire proteins, such as the green fluorescent protein (“GFP”) chromophore-containing proteins, have particular utility. Fusion proteins can be produced recombinantly by constructing a nucleic acid sequence which encodes the polypeptide or a fragment thereof in frame with a nucleic acid sequence encoding a different protein or peptide and then expressing the fusion protein. Alternatively, a fusion protein can be produced chemically by crosslinking the polypeptide or a fragment thereof to another protein.

[0181] Sequence homology for polypeptides, which is also referred to as percent sequence identity, is typically measured using sequence analysis software. See, e.g., the Sequence Analysis Software Package of the Genetics Computer Group (GCG), University of Wisconsin Biotechnology Center, 910 University Avenue, Madison, Wis. 53705. Protein analysis software matches similar sequences using a measure of homology assigned to various substitutions, deletions and other modifications, including conservative amino acid substitutions. For instance, GCG contains programs such as “Gap” and “Bestfit” which can be used with default parameters to determine sequence homology or sequence identity between closely related polypeptides, such as homologous polypeptides from different species of organisms or between a wild-type polypeptide and a mutein thereof. See, e.g., GCG Version 6. An exemplary algorithm when comparing a particular polypeptide sequence to a database containing a large number of sequences from different organisms is the computer program BLAST (Altschul et al., J. Mol. Biol. 215:403-410 (1990); Gish and States, Nature Genet. 3:266-272 (1993); Madden et al., Meth. Enzymol. 266:131-141 (1996); Altschul et al., Nucleic Acids Res. 25:3389-3402 (1997); Zhang and Madden, Genome Res. 7:649-656 (1997)), especially blastp or tblastn (Altschul et al., Nucleic Acids Res. 25:3389-3402 (1997)).

[0182] As used herein, a “gastrointestinal disorder” or a “gastrointestinal disease” includes any disorder or disease involving the gastrointestinal tract or region thereof, namely the esophagus, stomach, small intestine, large intestine or rectum, as well as organs and tissues associated with digestion, e.g., the pancreas, the gallbladder, and the liver.

[0183] As used herein, the term “heterotrophic” refers to an organism that cannot fix carbon and uses organic carbon for growth.

[0184] As used herein, a polypeptide has “homology” or is “homologous” to a second polypeptide if the nucleic acid sequence that encodes the polypeptide has a similar sequence to the nucleic acid sequence that encodes the second polypeptide. Alternatively, a polypeptide has homology to a second polypeptide if the two polypeptides have similar amino acid sequences. (Thus, the term “homologous polypeptides” is defined to mean that the two polypeptides have similar amino acid sequences.) When “homologous” is used in reference to polypeptides or peptides, it is recognized that residue positions that are not identical often differ by conservative amino acid substitutions. A “conservative amino acid substitution” is one in which an amino acid residue is substituted by another amino acid residue having a side chain (R group) with similar chemical properties (e.g., charge or hydrophobicity). In general, a conservative amino acid substitution will not substantially change the functional properties of a polypeptide. In cases where two or more amino acid sequences differ from each other by conservative substitutions, the percent sequence identity or degree of homology can be adjusted upwards to correct for the conservative nature of the substitution. Means for making this adjustment are well known to those of skill in the art. See, e.g., Pearson, 1994, Methods Mol. Biol. 24:307-31 and 25:365-89. The following six groups each contain amino acids that are conservative substitutions for one another: 1) Serine, Threonine; 2) Aspartic Acid, Glutamic Acid; 3) Asparagine, Glutamine; 4) Arginine, Lysine; 5) Isoleucine, Leucine, Methionine, Alanine, Valine, and 6) Phenylalanine, Tyrosine, Tryptophan. In some embodiments, polymeric molecules (e.g., a polypeptide sequence or nucleic acid sequence) are considered to be homologous to one another if their sequences are at least 25%, at least 30%, at least 35%, at least 40%, at least 45%, at least 50%, at least 55%, at least 60%, at least 65%, at least 70%, at least 75%, at least 80%, at least 85%, at least 90%, at least 95%, at least 96%, %, at least 97%, %, at least 98%, or at least 99% identical. In some embodiments, polymeric molecules are considered to be “homologous” to one another if their sequences are at least 25%, at least 30%, at least 35%, at least 40%, at least 45%, at least 50%, at least 55%, at least 60%, at least 65%, at least 70%, at least 75%, at least 80%, at least 85%, at least 90%, at least 95%, at least 96%, %, at least 97%, %, at least 98%, or at least 99% similar. The term “homologous” necessarily refers to a comparison between at least two sequences (nucleotides sequences or amino acid sequences). In some embodiments, two nucleotide sequences are considered to be homologous if the polypeptides they encode are at least about 50% identical, at least about 60% identical, at least about 70% identical, at least about 80% identical, or at least about 90% identical for at least one stretch of at least about 10, 15, 20, 25, 30, 35, 40, 45, 50 or over 50 amino acids. In some embodiments, homologous nucleotide sequences are characterized by the ability to encode a stretch of at least 4-5 uniquely specified amino acids. Both the identity and the approximate spacing of these amino acids relative to one another must be considered for nucleotide sequences to be considered homologous. In some embodiments of nucleotide sequences less than 60 nucleotides in length, homology is determined by the ability to encode a stretch of at least 4-5 uniquely specified amino acids. In some embodiments, two polypeptide sequences are considered to be homologous if the polypeptides are at least about 50% identical, at least about 60% identical, at least about 70% identical, at least about 80% identical, or at least about 90% identical for at least one stretch of at least about 20 amino acids. In other embodiments, two polypeptide sequences are considered to be homologous if the polypeptides are similar, such as at least about 50% similar, at least about 60% similar, at least about 70% similar, at least about 80% similar, or at least about 90% similar, or at least about 95% similar for at least one stretch of at least about 20 amino acids. In some embodiments similarity is demonstrated by fewer nucleotide changes that result in an amino acid change (e.g., a nucleic acid sequence having a single nucleotide change is more similar to a reference nucleic acid sequence than a nucleic acid sequence having two nucleotide changes, even if both changes result in an identical amino acid substitution.

[0185] The term “in situ” refers to processes that occur in a living cell growing separate from a living organism, e.g., growing in tissue culture.

[0186] As used herein, the term “in vitro” refers to events that occur in an artificial environment, e.g., in a test tube or reaction vessel, in cell culture, in a Petri dish, etc., rather than within an organism (e.g., animal, plant, or microbe). As used herein, the term “ex vivo” refers to experimentation done in or on tissue in an environment outside the organism.

[0187] The term “in vivo” refers to processes that occur in a living organism.

[0188] As used herein, a “modified derivative” refers to polypeptides or fragments thereof that are substantially homologous in primary structural sequence to a reference polypeptide sequence but which include, e.g., in vivo or in vitro chemical and biochemical modifications or which incorporate amino acids that are not found in the reference polypeptide. Such modifications include, for example, acetylation, carboxylation, phosphorylation, glycosylation, ubiquitination, labeling, e.g., with radionuclides, and various enzymatic modifications, as will be readily appreciated by those skilled in the art. A variety of methods for labeling polypeptides and of substituents or labels useful for such purposes are well known in the art, and include radioactive isotopes such as 125I, 32P, 35S, and 3H, ligands that bind to labeled antiligands (e.g., antibodies), fluorophores, chemiluminescent agents, enzymes, and antiligands that can serve as specific binding pair members for a labeled ligand. The choice of label depends on the sensitivity required, ease of conjugation with the primer, stability requirements, and available instrumentation. Methods for labeling polypeptides are well known in the art. See, e.g., Ausubel et al., Current Protocols in Molecular Biology, Greene Publishing Associates (1992, and Supplements to 2002).

[0189] As used herein, “muscle strength” refers to the amount of force a muscle can produce with a single maximal effort. There are two types of muscle strength, static strength and dynamic strength. Static strength refers to isometric contraction of a muscle, where a muscle generates force while the muscle length remains constant and/or when there is no movement in a joint. Examples include holding or carrying an object, or pushing against a wall. Dynamic strength refers to a muscle generating force that results in movement. Dynamic strength can be isotonic contraction, where the muscle shortens under a constant load or isokinetic contraction, where the muscle contracts and shortens at a constant speed. Dynamic strength can also include isoinertial strength. In addition, the term “muscle strength” refers to maximum dynamic muscle strength, as described by the term “one repetition maximum” (1RM). This is a measurement of the greatest load (in kilograms) that can be fully moved (lifted, pushed or pulled) once without failure or injury. This value can be measured directly, but doing so requires that the weight is increased until the subject fails to carry out the activity to completion. Alternatively, 1RM is estimated by counting the maximum number of exercise repetitions a subject can make using a load that is less than the maximum amount the subject can move. Leg extension and leg flexion are often measured in clinical trials (Borsheim et al., “Effect of amino acid supplementation on muscle mass, strength and physical function in elderly,” Clin Nutr 2008; 27:189-195; Paddon-Jones, et al., “Essential amino acid and carbohydrate supplementation ameliorates muscle protein loss in humans during 28 days bed rest,” J Clin Endocrinol Metab 2004; 89:4351-4358).

[0190] As used herein, “muscle mass” refers to the weight of muscle in a subject's body. Similarly, “muscle anabolism” includes the synthesis of muscle proteins, and is a component of the process by which muscle mass is gained. Muscle mass includes the skeletal muscles, smooth muscles (such as cardiac and digestive muscles) and the water contained in these muscles. Muscle mass of specific muscles can be determined using dual energy x-ray absorptiometry (DEXA) (Padden-Jones et al., 2004). Total lean body mass (minus the fat), total body mass, and bone mineral content can be measured by DEXA as well. In some embodiments a change in the muscle mass of a specific muscle of a subject is determined, for example by DEXA, and the change is used as a proxy for the total change in muscle mass of the subject. Thus, for example, if a subject consumes a nutritive protein as disclosed herein and experiences an increase over a period of time in muscle mass in a particular muscle or muscle group, it can be concluded that the subject has experienced an increase in muscle mass. Changes in muscle mass can be measured in a variety of ways including protein synthesis, fractional synthetic rate, and certain key activities such mTor/mTorc. In general, “lean muscle mass” refers to the mass of muscle tissue in the absence of other tissues such as fat.

[0191] The term “nucleic acid fragment” as used herein refers to a nucleic acid sequence that has a deletion, e.g., a 5′-terminal or 3′-terminal deletion compared to a full-length reference nucleotide sequence. In an embodiment, the nucleic acid fragment is a contiguous sequence in which the nucleotide sequence of the fragment is identical to the corresponding positions in the naturally-occurring sequence. In some embodiments, fragments are at least 10, 15, 20, or 25 nucleotides long, or at least 20, 30, 40, 50, 60, 70, 80, 90, 100, 110, 120, 130, 140, or 150 nucleotides long. In some embodiments a fragment of a nucleic acid sequence is a fragment of an open reading frame sequence. In some embodiments such a fragment encodes a polypeptide fragment (as defined herein) of the protein encoded by the open reading frame nucleotide sequence.

[0192] A composition, formulation or product is “nutritional” or “nutritive” if it provides an appreciable amount of nourishment to its intended consumer, meaning the consumer assimilates all or a portion of the composition or formulation into a cell, organ, and/or tissue. Generally such assimilation into a cell, organ and/or tissue provides a benefit or utility to the consumer, e.g., by maintaining or improving the health and/or natural function(s) of said cell, organ, and/or tissue. A nutritional composition or formulation that is assimilated as described herein is termed “nutrition.” By way of non-limiting example, a polypeptide is nutritional if it provides an appreciable amount of polypeptide nourishment to its intended consumer, meaning the consumer assimilates all or a portion of the protein, typically in the form of single amino acids or small peptides, into a cell, organ, and/or tissue. “Nutrition” also means the process of providing to a subject, such as a human or other mammal, a nutritional composition, formulation, product or other material. A nutritional product need not be “nutritionally complete,” meaning if consumed in sufficient quantity, the product provides all carbohydrates, lipids, essential fatty acids, essential amino acids, conditionally essential amino acids, vitamins, and minerals required for health of the consumer. Additionally, a “nutritionally complete protein” contains all protein nutrition required (meaning the amount required for physiological normalcy by the organism) but does not necessarily contain micronutrients such as vitamins and minerals, carbohydrates or lipids.

[0193] In preferred embodiments, a composition or formulation is nutritional in its provision of polypeptide capable of decomposition (i.e., the breaking of a peptide bond, often termed protein digestion) to single amino acids and/or small peptides (e.g., two amino acids, three amino acids, or four amino acids, possibly up to ten amino acids) in an amount sufficient to provide a “nutritional benefit.” In addition, in certain embodiments provided are nutritional polypeptides that transit across the gastrointestinal wall and are absorbed into the bloodstream as small peptides (e.g., larger than single amino acids but smaller than about ten amino acids) or larger peptides, oligopeptides or polypeptides (e.g., >11 amino acids). A nutritional benefit in a polypeptide-containing composition can be demonstrated and, optionally, quantified, by a number of metrics. For example, a nutritional benefit is the benefit to a consuming organism equivalent to or greater than at least about 0.5% of a reference daily intake value of protein, such as about 1%, 2%, 3%, 4%, 5%, 6%, 7%, 8%, 9%, 10%, 15%, 20%, 25%, 30%, 35%, 40%, 45%, 50%, 60%, 65%, 70%, 75%, 80%, 85%, 90%, 95%, 100% or greater than about 100% of a reference daily intake value. Alternatively, a nutritional benefit is demonstrated by the feeling and/or recognition of satiety by the consumer. In other embodiments, a nutritional benefit is demonstrated by incorporation of a substantial amount of the polypeptide component of the composition or formulation into the cells, organs and/or tissues of the consumer, such incorporation generally meaning that single amino acids or short peptides are used to produce polypeptides de novo intracellularly. A “consumer” or a “consuming organism” means any animal capable of ingesting the product having the nutritional benefit. Typically, the consumer will be a mammal such as a healthy human, e.g., a healthy infant, child, adult, or older adult. Alternatively, the consumer will be a mammal such as a human (e.g., an infant, child, adult or older adult) at risk of developing or suffering from a disease, disorder or condition characterized by (i) the lack of adequate nutrition and/or (ii) the alleviation thereof by the nutritional products of the present invention. An “infant” is generally a human under about age 1 or 2, a “child” is generally a human under about age 18, and an “older adult” or “elderly” human is a human aged about 65 or older.

[0194] In other preferred embodiments, a composition or formulation is nutritional in its provision of carbohydrate capable of hydrolysis by the intended consumer (termed a “nutritional carbohydrate”). A nutritional benefit in a carbohydrate-containing composition can be demonstrated and, optionally, quantified, by a number of metrics. For example, a nutritional benefit is the benefit to a consuming organism equivalent to or greater than at least about 2% of a reference daily intake value of carbohydrate.

[0195] A polypeptide “nutritional domain” as used herein means any domain of a polypeptide that is capable of providing nutrition. Preferably, a polypeptide nutritional domain provides one or more advantages over the full-length polypeptide containing the nutritional domain, such as the nutritional domain provides more nutrition than the full-length polypeptide. For example, a polypeptide nutritional domain has a higher concentration of desirable amino acids, has a lower concentration of undesirable amino acids, contains a site for cleavage by a digestive protease, is easier to digest and/or is easier to produce from the digestion of a larger polypeptide, has improved storage characteristics, or a combination of these and/or other factors, in comparison to (i) a reference polypeptide or a reference polypeptide-containing mixture or composition, (ii) the protein(s) or polypeptide(s) present in an agriculturally-derived food product, and/or (iii) the protein or polypeptide products present in the diet of a mammalian subject. Other advantages of a polypeptide nutritional domain includes easier and/or more efficient production, different or more advantageous physiochemical properties, and/or has different s or more advantageous safety properties (e.g., elimination of one or more allergy domains) relative to full-length polypeptide. A reference polypeptide can be a naturally occurring polypeptide or a recombinantly produced polypeptide, which in turn may have an amino acid sequence identical to or different from a naturally occurring polypeptide. A reference polypeptide may also be a consensus amino acid sequence not present in a naturally-occurring polypeptide. Additionally, a reference polypeptide-containing mixture or composition can be a naturally-occurring mixture, such as a mixture of polypeptides present in a dairy product such as milk or whey, or can be a synthetic mixture of polypeptides (which, in turn, can be naturally-occurring or synthetic). In certain embodiments the nutritional domain contains an amino acid sequence having an N-terminal amino acid and/or a C-terminal amino acid different from the N-terminal amino acid and/or a C-terminal amino acid of a reference secreted polypeptide, such as a full-length secreted polypeptide. For example, a nutritional domain has an N-terminal amino acid sequence that corresponds to an amino acid sequence internal to a larger secreted polypeptide that contains the nutritional domain. A nutritional domain may include or exclude a signal sequence of a larger secreted polypeptide. As used herein, a polypeptide that “contains” a polypeptide nutritional domain contains the entirety of the polypeptide nutritional domain as well as at least one additional amino acid, either N-terminal or C-terminal to the polypeptide nutritional domain. Generally polypeptide nutritional domains are secreted from the cell or organism containing a nucleic acid encoding the nutritional domain, and are termed “secreted polypeptide nutritional domains,” and, in circumstances wherein the nutritional domain is secreted from a unicellular (or single celled) organism, it is termed a “unicellular secreted polypeptide nutritional domain.”

[0196] In other preferred embodiments, a composition or formulation is nutritional in its provision of lipid capable of digestion, incorporation, conversion, or other cellular uses by the intended consumer (termed a “nutritional lipid”). A nutritional benefit in a lipid-containing composition can be demonstrated and, optionally, quantified, by a number of metrics. For example, a nutritional benefit is the benefit to a consuming organism equivalent to or greater than at least about 2% of a reference daily intake value of lipid (i.e., fat).

[0197] As used herein, an “obese” subject has a level of excess body fat that, increasing the likelihood of the subject suffering from diseases including heart disease, type II diabetes, osteoporosis and osteoarthritis, and cancer, while an “overweight” subject is above a weight recognized as normal, acceptable, or desirable, but not obese. In Western countries, a subject having a BMI value exceeding 30 is considered obese, while a subject having a BMI value between 25-30 is considered overweight.

[0198] As used herein, “operatively linked” or “operably linked” expression control sequences refers to a linkage in which the expression control sequence is contiguous with the gene of interest to control the gene of interest, as well as expression control sequences that act in trans or at a distance to control the gene of interest.

[0199] The term “percent sequence identity” or “identical” in the context of nucleic acid sequences refers to the residues in the two sequences that are the same when aligned for maximum correspondence. There are a number of different algorithms known in the art that can be used to measure nucleotide sequence identity. For instance, polynucleotide sequences can be compared using FASTA, Gap or Bestfit, which are programs in Wisconsin Package Version 10.0, Genetics Computer Group (GCG), Madison, Wis. FASTA provides alignments and percent sequence identity of the regions of the best overlap between the query and search sequences. Pearson, Methods Enzymol. 183:63-98 (1990).

[0200] The term “polynucleotide,” “nucleic acid molecule,” “nucleic acid,” or “nucleic acid sequence” refers to a polymeric form of nucleotides of at least 10 bases in length. The term includes DNA molecules (e.g., cDNA or genomic or synthetic DNA) and RNA molecules (e.g., mRNA or synthetic RNA), as well as analogs of DNA or RNA containing non-natural nucleotide analogs, non-native internucleoside bonds, or both. The nucleic acid can be in any topological conformation. For instance, the nucleic acid can be single-stranded, double-stranded, triple-stranded, quadruplexed, partially double-stranded, branched, hairpinned, circular, or in a padlocked conformation. A “synthetic” RNA, DNA or a mixed polymer is one created outside of a cell, for example one synthesized chemically. The term “nucleic acid fragment” as used herein refers to a nucleic acid sequence that has a deletion, e.g., a 5′-terminal or 3′-terminal deletion of one or more nucleotides compared to a full-length reference nucleotide sequence. In an embodiment, the nucleic acid fragment is a contiguous sequence in which the nucleotide sequence of the fragment is identical to the corresponding positions in the naturally-occurring sequence. In some embodiments, fragments are at least 10, 15, 20, or 25 nucleotides long, or at least 20, 30, 40, 50, 60, 70, 80, 90, 100, 110, 120, 130, 140, 150, 200, 250, 300, 350, 400, 450, 500, 550, 600, 650, 700, 750, 800, 850, 900, 950, 1000, 1100, 1200, 1300, 1400, 1500, 1600, 1700, 1800 or greater than 1800 nucleotides long. In some embodiments a fragment of a nucleic acid sequence is a fragment of an open reading frame sequence. In some embodiments such a fragment encodes a polypeptide fragment (as defined herein) of the polypeptide encoded by the open reading frame nucleotide sequence.

[0201] The terms “polypeptide” and “protein” can be interchanged, and these terms encompass both naturally-occurring and non-naturally occurring polypeptides, and, as provided herein or as generally known in the art, fragments, mutants, derivatives and analogs thereof. A polypeptide can be monomeric, meaning it has a single chain, or polymeric, meaning it is composed of two or more chains, which can be covalently or non-covalently associated. Further, a polypeptide may comprise a number of different domains each of which has one or more distinct activities. For the avoidance of doubt, a polypeptide can be any length greater than or equal to two amino acids. The term “isolated polypeptide” is a polypeptide that by virtue of its origin or source of derivation (1) is not associated with naturally associated components that accompany it in any of its native states, (2) exists in a purity not found in nature, where purity can be adjudged with respect to the presence of other cellular material (e.g., is free of other polypeptides from the same species or from the host species in which the polypeptide was produced) (3) is expressed by a cell from a different species, (4) is recombinantly expressed by a cell (e.g., a polypeptide is an “isolated polypeptide” if it is produced from a recombinant nucleic acid present in a host cell and separated from the producing host cell, (5) does not occur in nature (e.g., it is a domain or other fragment of a polypeptide found in nature or it includes amino acid analogs or derivatives not found in nature or linkages other than standard peptide bonds), or (6) is otherwise produced, prepared, and/or manufactured by the hand of man. Thus, an “isolated polypeptide” includes a polypeptide that is produced in a host cell from a recombinant nucleic acid (such as a vector), regardless of whether the host cell naturally produces a polypeptide having an identical amino acid sequence. A “polypeptide” includes a polypeptide that is produced by a host cell via overexpression, e.g., homologous overexpression of the polypeptide from the host cell such as by altering the promoter of the polypeptide to increase its expression to a level above its normal expression level in the host cell in the absence of the altered promoter. A polypeptide that is chemically synthesized or synthesized in a cellular system different from a cell from which it naturally originates will be “isolated” from its naturally associated components. A polypeptide may also be rendered substantially free of naturally associated components by isolation, using protein purification techniques well known in the art. As thus defined, “isolated” does not necessarily require that the protein, polypeptide, peptide or oligopeptide so described has been physically removed from a cell in which it was synthesized.

[0202] The term “polypeptide fragment” or “protein fragment” as used herein refers to a polypeptide or domain thereof that has less amino acids compared to a reference polypeptide, e.g., a full-length polypeptide or a polypeptide domain of a naturally occurring protein. A “naturally occurring protein” or “naturally occurring polypeptide” includes a polypeptide having an amino acid sequence produced by a non-recombinant cell or organism. In an embodiment, the polypeptide fragment is a contiguous sequence in which the amino acid sequence of the fragment is identical to the corresponding positions in the naturally-occurring sequence. Fragments typically are at least 5, 6, 7, 8, 9 or 10 amino acids long, or at least 12, 14, 16 or 18 amino acids long, or at least 20 amino acids long, or at least 25, 30, 35, 40 or 45, amino acids, or at least 50, 60, 70, 80, 90 or 100 amino acids long, or at least 110, 120, 130, 140, 150, 160, 170, 180, 190 or 200 amino acids long, or 225, 250, 275, 300, 325, 350, 375, 400, 425, 450, 475, 500, 525, 550, 575, 600 or greater than 600 amino acids long. A fragment can be a portion of a larger polypeptide sequence that is digested inside or outside the cell. Thus, a polypeptide that is 50 amino acids in length can be produced intracellularly, but proteolyzed inside or outside the cell to produce a polypeptide less than 50 amino acids in length. This is of particular significance for polypeptides shorter than about 25 amino acids, which can be more difficult than larger polypeptides to produce recombinantly or to purify once produced recombinantly. The term “peptide” as used herein refers to a short polypeptide or oligopeptide, e.g., one that typically contains less than about 50 amino acids and more typically less than about 30 amino acids, or more typically less than about 15 amino acids, such as less than about 10, 9, 8, 7, 6, 5, 4, or 3 amino acids. The term as used herein encompasses analogs and mimetics that mimic structural and thus biological function.

[0203] As used herein, “polypeptide mutant” or “mutein” refers to a polypeptide whose sequence contains an insertion, duplication, deletion, rearrangement or substitution of one or more amino acids compared to the amino acid sequence of a reference protein or polypeptide, such as a native or wild-type protein. A mutein may have one or more amino acid point substitutions, in which a single amino acid at a position has been changed to another amino acid, one or more insertions and/or deletions, in which one or more amino acids are inserted or deleted, respectively, in the sequence of the reference protein, and/or truncations of the amino acid sequence at either or both the amino or carboxy termini. A mutein may have the same or a different biological activity compared to the reference protein. In some embodiments, a mutein has, for example, at least 85% overall sequence homology to its counterpart reference protein. In some embodiments, a mutein has at least 90% overall sequence homology to the wild-type protein. In other embodiments, a mutein exhibits at least 95% sequence identity, or 98%, or 99%, or 99.5% or 99.9% overall sequence identity.

[0204] As used herein, a “polypeptide tag for affinity purification” is any polypeptide that has a binding partner that can be used to isolate or purify a second protein or polypeptide sequence of interest fused to the first “tag” polypeptide. Several examples are well known in the art and include a His-6 tag (SEQ ID NO: 4129), a FLAG epitope, a c-myc epitope, a Strep-TAGII, a biotin tag, a glutathione 5-transferase (GST), a chitin binding protein (CBP), a maltose binding protein (MBP), or a metal affinity tag.

[0205] As used herein, “protein-energy malnutrition” refers to a form of malnutrition where there is inadequate protein intake. Types include Kwashiorkor (protein malnutrition predominant), Marasmus (deficiency in both calorie and protein nutrition), and Marasmic Kwashiorkor (marked protein deficiency and marked calorie insufficiency signs present, sometimes referred to as the most severe form of malnutrition). “Malnourishment” and “malnutrition” are used equivalently herein.

[0206] The terms “purify,” “purifying” and “purified” refer to a substance (or entity, composition, product or material) that has been separated from at least some of the components with which it was associated either when initially produced (whether in nature or in an experimental setting), or during any time after its initial production. A substance such as a nutritional polypeptide will be considered purified if it is isolated at production, or at any level or stage up to and including a final product, but a final product may contain other materials up to about 10%, about 20%, about 30%, about 40%, about 50%, about 60%, about 70%, about 80%, about 90%, or above about 90% and still be considered “isolated.” Purified substances or entities can be separated from at least about 10%, about 20%, about 30%, about 40%, about 50%, about 60%, about 70%, about 80%, about 90%, or more of the other components with which they were initially associated. In some embodiments, purified substances are more than about 80%, about 85%, about 90%, about 91%, about 92%, about 93%, about 94%, about 95%, about 96%, about 97%, about 98%, about 99%, or more than about 99% pure. In the instance of polypeptides and other polypeptides provided herein, such a polypeptide can be purified from one or more other polypeptides capable of being secreted from the unicellular organism that secretes the polypeptide. As used herein, a polypeptide substance is “pure” if it is substantially free of other components or other polypeptide components.

[0207] As used herein, “recombinant” refers to a biomolecule, e.g., a gene or polypeptide, that (1) has been removed from its naturally occurring environment, (2) is not associated with all or a portion of a polynucleotide in which the gene is found in nature, (3) is operatively linked to a polynucleotide which it is not linked to in nature, or (4) does not occur in nature. Also, “recombinant” refers to a cell or an organism, such as a unicellular organism, herein termed a “recombinant unicellular organism,” a “recombinant host” or a “recombinant cell” that contains, produces and/or secretes a biomolecule, which can be a recombinant biomolecule or a non-recombinant biomolecule. For example, a recombinant unicellular organism may contain a recombinant nucleic acid providing for enhanced production and/or secretion of a recombinant polypeptide or a non-recombinant polypeptide. A recombinant cell or organism, is also intended to refer to a cell into which a recombinant nucleic acid such as a recombinant vector has been introduced. A “recombinant unicellular organism” includes a recombinant microorganism host cell and refers not only to the particular subject cell but to the progeny of such a cell. Because certain modifications may occur in succeeding generations due to either mutation or environmental influences, such progeny may not, in fact, be identical to the parent cell, but are still included within the scope of the terms herein. The term “recombinant” can be used in reference to cloned DNA isolates, chemically-synthesized polynucleotide analogs, or polynucleotide analogs that are biologically synthesized by heterologous systems, as well as polypeptides and/or mRNAs encoded by such nucleic acids. Thus, for example, a polypeptide synthesized by a microorganism is recombinant, for example, if it is produced from an mRNA transcribed from a recombinant gene or other nucleic acid sequence present in the cell.

[0208] As used herein, an endogenous nucleic acid sequence in the genome of an organism (or the encoded polypeptide product of that sequence) is deemed “recombinant” herein if a heterologous sequence is placed adjacent to the endogenous nucleic acid sequence, such that the expression of this endogenous nucleic acid sequence is altered. In this context, a heterologous sequence is a sequence that is not naturally adjacent to the endogenous nucleic acid sequence, whether or not the heterologous sequence is itself endogenous (originating from the same host cell or progeny thereof) or exogenous (originating from a different host cell or progeny thereof). By way of example, a promoter sequence can be substituted (e.g., by homologous recombination) for the native promoter of a gene in the genome of a host cell, such that this gene has an altered expression pattern. This gene would now become “recombinant” because it is separated from at least some of the sequences that naturally flank it. A nucleic acid is also considered “recombinant” if it contains any modifications that do not naturally occur to the corresponding nucleic acid in a genome. For instance, an endogenous coding sequence is considered “recombinant” if it contains an insertion, deletion or a point mutation introduced artificially, e.g., by human intervention. A “recombinant nucleic acid” also includes a nucleic acid integrated into a host cell chromosome at a heterologous site and a nucleic acid construct present as an episome.

[0209] The term “recombinant host cell” (or simply “recombinant cell” or “host cell”), as used herein, is intended to refer to a cell into which a recombinant nucleic acid such as a recombinant vector has been introduced. In some instances the word “cell” is replaced by a name specifying a type of cell. For example, a “recombinant microorganism” is a recombinant host cell that is a microorganism host cell and a “recombinant cyanobacteria” is a recombinant host cell that is a cyanobacteria host cell. It should be understood that such terms are intended to refer not only to the particular subject cell but to the progeny of such a cell. Because certain modifications may occur in succeeding generations due to either mutation or environmental influences, such progeny may not, in fact, be identical to the parent cell, but are still included within the scope of the term “recombinant host cell,” “recombinant cell,” and “host cell”, as used herein. A recombinant host cell can be an isolated cell or cell line grown in culture or can be a cell which resides in a living tissue or organism.

[0210] As used herein, “sarcopenia” refers to the degenerative loss of skeletal muscle mass (typically 0.5-1% loss per year after the age of 25), quality, and strength associated with aging. Sarcopenia is a component of the frailty syndrome. The European Working Group on Sarcopenia in Older People (EWGSOP) has developed a practical clinical definition and consensus diagnostic criteria for age-related sarcopenia. For the diagnosis of sarcopenia, the working group has proposed using the presence of both low muscle mass and low muscle function (strength or performance). Sarcopenia is characterized first by a muscle atrophy (a decrease in the size of the muscle), along with a reduction in muscle tissue “quality,” caused by such factors as replacement of muscle fibres with fat, an increase in fibrosis, changes in muscle metabolism, oxidative stress, and degeneration of the neuromuscular junction. Combined, these changes lead to progressive loss of muscle function and eventually to frailty. Frailty is a common geriatric syndrome that embodies an elevated risk of catastrophic declines in health and function among older adults. Contributors to frailty can include sarcopenia, osteoporosis, and muscle weakness. Muscle weakness, also known as muscle fatigue, (or “lack of strength”) refers to the inability to exert force with one's skeletal muscles. Weakness often follows muscle atrophy and a decrease in activity, such as after a long bout of bedrest as a result of an illness. There is also a gradual onset of muscle weakness as a result of sarcopenia. Thus, sarcopenia is an exemplary condition associated with muscle wasting.

[0211] As used herein, “satiation” is the act of becoming full while eating or a reduced desire to eat. This halts or diminishes eating.

[0212] As used herein, “satiety” is the act of remaining full after a meal which manifests as the period of no eating follow the meal.

[0213] As used herein, “secrete,” “secretion” and “secreted” all refer to the act or process by which a polypeptide is relocated from the cytoplasm of a cell of a multicellular organism or unicellular organism into the extracellular milieu thereof. As provided herein, such secretion may occur actively or passively. Further, the terms “excrete,” “excretion” and “excreted” generally connote passive clearing of a material from a cell or unicellular organism; however, as appropriate such terms can be associated with the production and transfer of materials outwards from the cell or unicellular organism.

[0214] In general, “stringent hybridization” is performed at about 25° C. below the thermal melting point (Tm) for the specific DNA hybrid under a particular set of conditions. “Stringent washing” is performed at temperatures about 5° C. lower than the Tm for the specific DNA hybrid under a particular set of conditions. The Tm is the temperature at which 50% of the target sequence hybridizes to a perfectly matched probe. See Sambrook et al., Molecular Cloning: A Laboratory Manual, 2d ed., Cold Spring Harbor Laboratory Press, Cold Spring Harbor, N.Y. (1989), page 9.51, hereby incorporated by reference. For purposes herein, “stringent conditions” are defined for solution phase hybridization as aqueous hybridization (i.e., free of formamide) in 6×SSC (where 20×SSC contains 3.0 M NaCl and 0.3 M sodium citrate), 1% SDS at 65° C. for 8-12 hours, followed by two washes in 0.2×SSC, 0.1% SDS at 65° C. for 20 minutes. It will be appreciated by the skilled worker that hybridization at 65° C. will occur at different rates depending on a number of factors including the length and percent identity of the sequences which are hybridizing.

[0215] The term “substantial homology” or “substantial similarity,” when referring to a nucleic acid or fragment thereof, indicates that, when optimally aligned with appropriate nucleotide insertions or deletions with another nucleic acid (or its complementary strand), there is nucleotide sequence identity in at least about 76%, 80%, 85%, or at least about 90%, or at least about 95%, 96%, 97%, 98% or 99% of the nucleotide bases, as measured by any well-known algorithm of sequence identity, such as FASTA, BLAST or Gap, as discussed above.

[0216] The term “sufficient amount” means an amount sufficient to produce a desired effect, e.g., an amount sufficient to modulate protein aggregation in a cell.

[0217] A “synthetic” RNA, DNA or a mixed polymer is one created outside of a cell, for example one synthesized chemically.

[0218] The term “therapeutically effective amount” is an amount that is effective to ameliorate a symptom of a disease. A therapeutically effective amount can be a “prophylactically effective amount” as prophylaxis can be considered therapy.

[0219] As used herein, “thermogenesis” is the process of heat production in a mammal. Thermogenesis is accompanied by an increase in energy expenditure. Thermogenesis is specifically the energy burned following the metabolism of a food component (such as protein). This may also be referred to as the thermic effect of food. Total energy expenditure by an individual equals the sum of resting energy expenditure (energy consumed at rest in a fasting state to support basal metabolism), the thermic effect of food, and energy expenditure related to physical activity. Resting energy expenditure accounts for about 65-75% of total energy expenditure in humans. The amount and activity of muscle mass is one influencer of resting energy expenditure. Adequate protein consumption to support muscle also influences resting energy expenditure. The ingestion of protein tends to increase energy expenditure following a meal; this is the thermic effect of food. The thermic effect of food accounts for about 10% of total energy expenditure in humans. While this is a small proportion of total energy expenditure, small increases in this value can impact body weight. Protein has a higher thermic effect than fat or carbohydrate; this effect along with other metabolic influences of protein makes it a useful substrate for weight control, diabetes management and other conditions.

[0220] As used herein, a “vector” is intended to refer to a nucleic acid molecule capable of transporting another nucleic acid to which it has been linked. One type of vector is a “plasmid,” which generally refers to a circular double stranded DNA loop into which additional DNA segments can be ligated, but also includes linear double-stranded molecules such as those resulting from amplification by the polymerase chain reaction (PCR) or from treatment of a circular plasmid with a restriction enzyme. Other vectors include cosmids, bacterial artificial chromosomes (BAC) and yeast artificial chromosomes (YAC). Another type of vector is a viral vector, wherein additional DNA segments can be ligated into the viral genome (discussed in more detail below). Certain vectors are capable of autonomous replication in a host cell into which they are introduced (e.g., vectors having an origin of replication which functions in the host cell). Other vectors can be integrated into the genome of a host cell upon introduction into the host cell, and are thereby replicated along with the host genome. Moreover, certain vectors are capable of directing the expression of genes to which they are operatively linked. Such vectors are referred to herein as “recombinant expression vectors” (or simply “expression vectors”).

[0221] Proteins present in dietary food sources can vary greatly in their nutritive value. Provided are nutritive polypeptides that have enhanced nutritive value and physiological and pharmacological effects due to their amino acid content and digestibility. Provided are nutritive polypeptides that have enhanced levels of essential amino acids, the inadequate availability of such essential amino acids in a person negatively impacts general health and physiology through the perturbation of a network of cellular functions, and is associated with a wide array of health issues and diseases. Also provided are nutritive polypeptides that have reduced levels of certain amino acids, the presence or overabundance of such amino acids in the diet of an affected subject results in increased morbidity and mortality.

[0222] Traditionally, nutritionists and health researchers have utilized specific source ingredients (e.g., whey protein, egg whites, soya) or fractionates and isolates (e.g., soy protein isolates) to modulate the relative concentration of total protein in the diet, without the ability to modulate the specific amino acid constituents.

[0223] Herein provided are nutritive polypeptides capable of transforming health and treating, preventing and reducing the severity of a multitude of diseases, disorders and conditions associated with amino acid pathophysiology, as they are selected for specific physiologic benefits to improve health and address many nutrition-related conditions, including gastrointestinal malabsorption, muscle wasting, diabetes or pre-diabetes, obesity, oncology, metabolic diseases, and other cellular and systemic diseases. Also provided are the compositions and formulations that contain the nutritive polypeptides, as food, beverages, medical foods, supplements, and pharmaceuticals.

[0224] Herein are provided important elucidations in the genomics, proteomics, protein characterization and production of nutritive polypeptides. The present invention utilizes the synergistic advancements, described herein, of (a) the genomics of edible species those human food source organisms, and human genomics, (b) substantial advances in protein identification and quantification in food protein and food nucleic acid libraries, (c) new correlations between protein physical chemistry, solubility, structure-digestibility relationships and amino acid absorption and metabolism in animals and humans, (d) physiology and pathophysiology information of how amino acids, the components of nutritive polypeptides, affect protein malnutrition, chronic disease, responses to acute injury, and aging, (e) recombinant nutritive polypeptide production utilizing a phylogenetically broad spectrum of host organisms, (f) qualification of allergenicity and toxicogenicity and in vitro and in vivo tests to assess human safety of orally consumed nutritive polypeptides.

[0225] Identification and selection of amino acid sequences encoding nutritive polypeptides.

[0226] In its broadest sense, a nutritive polypeptide encompasses a polypeptide capable of delivering amino acid and peptide nutrition to its intended consumer, who derives a benefit from such consumption. Each nutritive polypeptide contains one or more amino acid sequences, and the present invention provides methods by which an amino acid sequence is identified and utilized in production, formulation and administration of the nutritive polypeptide having such an amino acid sequence.

[0227] In some embodiments, the source of a nutritive polypeptide amino acid sequence encompasses any protein-containing material, e.g., a food, beverage, composition or other product, known to be eaten, or otherwise considered suitable for consumption, without deleterious effect by, e.g., a human or other organism, in particular a mammal.

[0228] Nutritive polypeptide amino acid sequences derived from edible species.

[0229] In some embodiments a nutritive polypeptide comprises or consists of a protein or fragment of a protein that naturally occurs in an edible product, such as a food, or in the organism that generates biological material used in or as the food. In some embodiments an “edible species” is a species known to produce a protein that can be eaten by humans without deleterious effect. A protein or polypeptide present in an edible species, or encoded by a nucleic acid present in the edible species, is termed an “edible species protein” or “edible species polypeptide” or, if the edible species is a species consumed by a human, the term “naturally occurring human food protein” is used interchangeably herein. Some edible products are an infrequent but known component of the diet of only a small group of a type of mammal in a limited geographic location while others are a dietary staple throughout much of the world. In other embodiments an edible product is one not known to be previously eaten by any mammal, but that is demonstrated to be edible upon testing or analysis of the product or one or more proteins contained in the product.

[0230] Food organisms include but are not limited to those organisms of edible species disclosed in PCT/US2013/032232, filed Mar. 15, 2013, PCT/US2013/032180, filed Mar. 15, 2013, PCT/US2013/032225, filed Mar. 15, 2013, PCT/US2013/032218, filed Mar. 15, 2013, PCT/US2013/032212, filed Mar. 15, 2013, PCT/US2013/032206, filed Mar. 15, 2013, and PCT/US2013/038682, filed Apr. 29, 2013 and any phylogenetically related organisms.

[0231] In some embodiments a nutritive polypeptide amino acid sequence is identified in a protein that is present in a food source, such as an abundant protein in food, or is a derivative or mutein thereof, or is a fragment of an amino acid sequence of a protein in food or a derivative or mutein thereof. An abundant protein is a protein that is present in a higher concentration in a food relative to other proteins present in the food. Alternatively, a nutritive polypeptide amino acid sequence is identified from an edible species that produces a protein containing the amino acid sequence in relatively lower abundance, but the protein is detectable in a food product derived from the edible species, or from biological material produced by the edible species. In some embodiments a nucleic acid that encodes the protein is detectable in a food product derived from the edible species, or the nucleic acid is detectable from a biological material produced by the edible species. An edible species can produce a food that is a known component of the diet of only a small group of a type of mammal in a limited geographic location, or a dietary staple throughout much of the world.

[0232] Exemplary edible species include animals such as goats, cows, chickens, pigs and fish. In some embodiments the abundant protein in food is selected from chicken egg proteins such as ovalbumin, ovotransferrin, and ovomucuoid; meat proteins such as myosin, actin, tropomyosin, collagen, and troponin; cereal proteins such as casein, alpha1 casein, alpha2 casein, beta casein, kappa casein, beta-lactoglobulin, alpha-lactalbumin, glycinin, beta-conglycinin, glutelin, prolamine, gliadin, glutenin, albumin, globulin; chicken muscle proteins such as albumin, enolase, creatine kinase, phosphoglycerate mutase, triosephosphate isomerase, apolipoprotein, ovotransferrin, phosphoglucomutase, phosphoglycerate kinase, glycerol-3-phosphate dehydrogenase, glyceraldehyde 3-phosphate dehydrogenase, hemoglobin, cofilin, glycogen phosphorylase, fructose-1,6-bisphosphatase, actin, myosin, tropomyosin a-chain, casein kinase, glycogen phosphorylase, fructose-1,6-bisphosphatase, aldolase, tubulin, vimentin, endoplasmin, lactate dehydrogenase, destrin, transthyretin, fructose bisphosphate aldolase, carbonic anhydrase, aldehyde dehydrogenase, annexin, adenosyl homocysteinase; pork muscle proteins such as actin, myosin, enolase, titin, cofilin, phosphoglycerate kinase, enolase, pyruvate dehydrogenase, glycogen phosphorylase, triosephosphate isomerase, myokinase; and fish proteins such as parvalbumin, pyruvate dehydrogenase, desmin, and triosephosphate isomerase.

[0233] Nutritive polypeptides may contain amino acid sequences present in edible species polypeptides. In one embodiment, a biological material from an edible species is analyzed to determine the protein content in the biological material. An exemplary method of analysis is to use mass spectrometry analysis of the biological material, as provided in the Examples below. Another exemplary method of analysis is to generate a cDNA library of the biological material to create a library of edible species cDNAs, and then express the cDNA library in an appropriate recombinant expression host, as provided in the Examples below. Another exemplary method of analysis is query a nucleic acid and/or protein sequence database as provided in the Examples below.

[0234] Determination of amino acid ratios and amino acid density in a nutritive polypeptide. In some instances herein the portion of amino acid(s) of a particular type within a polypeptide, protein or a composition is quantified based on the weight ratio of the type of amino acid(s) to the total weight of amino acids present in the polypeptide, protein or composition in question. This value is calculated by dividing the weight of the particular amino acid(s) in the polypeptide, protein or a composition by the weight of all amino acids present in the polypeptide, protein or a composition.

[0235] In other instances the ratio of a particular type of amino acid(s) residues present in a polypeptide or protein to the total number of amino acids present in the polypeptide or protein in question is used. This value is calculated by dividing the number of the amino acid(s) in question that is present in each molecule of the polypeptide or protein by the total number of amino acid residues present in each molecule of the polypeptide or protein. A skilled artisan appreciates that these two methods are interchangeable and that the weight proportion of a type of amino acid(s) present in a polypeptide or protein can be converted to a ratio of the particular type of amino acid residue(s), and vice versa.

[0236] In some aspects the nutritive polypeptide is selected to have a desired density of one or more essential amino acids (EAA). Essential amino acid deficiency can be treated or prevented with the effective administration of the one or more essential amino acids otherwise absent or present in insufficient amounts in a subject's diet. For example, EAA density is about equal to or greater than the density of essential amino acids present in a full-length reference nutritional polypeptide, such as bovine lactoglobulin, bovine beta-casein or bovine type I collagen, e.g., EAA density in a nutritive polypeptide is at least about 5%, 10%, 15%, 20%, 25%, 30%, 35%, 40%, 45%, 50%, 55%, 60%, 65%, 70%, 75%, 80%, 85%, 90%, 95%, 100%, 200%, 300%, 400%, 500% or above 500% greater than a reference nutritional polypeptide or the polypeptide present in an agriculturally-derived food product.

[0237] In some aspects the nutritive polypeptide is selected to have a desired density of aromatic amino acids (“AAA”, including phenylalanine, tryptophan, tyrosine, histidine, and thyroxine). AAAs are useful, e.g., in neurological development and prevention of exercise-induced fatigue. For example, AAA density is about equal to or greater than the density of essential amino acids present in a full-length reference nutritional polypeptide, such as bovine lactoglobulin, bovine beta-casein or bovine type I collagen, e.g., AAA density in a nutritive polypeptide is at least about 5%, 10%, 15%, 20%, 25%, 30%, 35%, 40%, 45%, 50%, 55%, 60%, 65%, 70%, 75%, 80%, 85%, 90%, 95%, 100%, 200%, 300%, 400%, 500% or above 500% greater than a reference nutritional polypeptide or the polypeptide present in an agriculturally-derived food product.

[0238] In some aspects the nutritive polypeptide is selected to have a desired density of branched chain amino acids (BCAA). For example, BCAA density, either individual BCAAs or total BCAA content is about equal to or greater than the density of branched chain amino acids present in a full-length reference nutritional polypeptide, such as bovine lactoglobulin, bovine beta-casein or bovine type I collagen, e.g., BCAA density in a nutritive polypeptide is at least about 5%, 10%, 15%, 20%, 25%, 30%, 35%, 40%, 45%, 50%, 55%, 60%, 65%, 70%, 75%, 80%, 85%, 90%, 95%, 100%, 200%, 300%, 400%, 500% or above 500% greater than a reference nutritional polypeptide or the polypeptide present in an agriculturally-derived food product. BCAA density in a nutritive polypeptide can also be selected for in combination with one or more attributes such as EAA density.

[0239] In some aspects the nutritive polypeptide is selected to have a desired density of amino acids arginine, glutamine and/or leucine (RQL amino acids). For example, RQL amino acid density is about equal to or greater than the density of essential amino acids present in a full-length reference nutritional polypeptide, such as bovine lactoglobulin, bovine beta-casein or bovine type I collagen, e.g., RQL amino acid density in a nutritive polypeptide is at least about 5%, 10%, 15%, 20%, 25%, 30%, 35%, 40%, 45%, 50%, 55%, 60%, 65%, 70%, 75%, 80%, 85%, 90%, 95%, 100%, 200%, 300%, 400%, 500% or above 500% greater than a reference nutritional polypeptide or the polypeptide present in an agriculturally-derived food product.

[0240] In some aspects the nutritive polypeptide is selected to have a desired density or distribution of post-translational modifications (PTMs). For example, PTMs include addition, removal or redistribution of biotinylation, pegylation, acylation, alkylation, butyrylation, glycosylation, hydroxylation, iodination, oxidation, propionylation, malonylation, myristoylation, palmitoylation, isoprenylation, succinylation, selenoylation, SUMOylation, ubiquitination, and glypiation removal or redistribution of disulfide bridges.

[0241] In certain embodiments herein the weight proportion of branched chain amino acids, leucine, and/or essential amino acids in whey, egg, or soy is used as a benchmark to measure the amino acid composition of a polypeptide, a protein, or a composition comprising at least one of a polypeptide and a protein. In those embodiments it is understood that the two measures are not completely equivalent, but it is also understood that the measures result in measurements that are similar enough to use for this purpose. For example, when a protein of interest is characterized as comprising a ratio of branched chain amino acid residues to total amino acid residues that is equal to or greater than 24% (the weight proportion of branched chain amino acid residues present in whey), that is a precise description of the branched chain amino acid content of the protein. At the same time, the weight proportion of branched chain amino acid residues present in that protein is not necessarily exactly equal to 24%. Even so, the skilled artisan understands that this is a useful comparison. If provided with the total number of amino acid residues present in the protein of interest the skilled artisan can also determine the weight proportion of branched chain amino acid residues in the protein of interest.

[0242] In some embodiments a protein according to this disclosure comprises a first polypeptide sequence comprising a fragment of an edible species polypeptide. In some embodiments of the nutritrive protein, the protein consists of the first polypeptide sequence. In some embodiments of the nutritrive protein, the protein consists of the fragment of an edible species polypeptide.

[0243] In some embodiments a protein according to this disclosure comprises a first polypeptide sequence that comprises ratio of branched chain amino acid residues to total amino acid residues that is equal to or greater than the ratio of branched chain amino acid residues to total amino acid residues present in at least one of whey protein, egg protein, and soy protein. Thus, in such embodiments the protein comprises a first polypeptide sequence that comprises a ratio of branched chain amino acid residues to total amino acid residues that is equal to or greater than a ratio selected from 24%, 20%, and 18%. In other embodiments, the protein comprises a first polypeptide sequence that comprises a ratio of branched chain amino acid residues to total amino acid residues that is equal to or greater than a percentage ratio selected from 1, 2, 3, 4, 5, 6, 7, 8, 9, 10, 11, 12, 13, 14, 15, 16, 17, 18, 19, 20, 21, 22, 23, 24, 25, 26, 27, 28, 29, 30, 31, 32, 33, 34, 35, 36, 37, 38, 39, 40, 41, 42, 43, 44, 45, 46, 47, 48, 49, 50, 51, 52, 53, 54, 55, 56, 57, 58, 59, 60, 61, 62, 63, 64, 65, 66, 67, 68, 69, 70, 75, 80, 85, 90, 95, or 100%.

[0244] In some embodiments a protein according to this disclosure comprises a first polypeptide sequence that comprises a ratio of L (leucine) residues to total amino acid residues that is equal to or greater than the ratio of L residues to total amino acid residues present in at least one of whey protein, egg protein, and soy protein. In other embodiments, the protein comprises a first polypeptide sequence that comprises a ratio of leucine residues to total amino acid residues that is equal to or greater than a percentage ratio selected from 1, 2, 3, 4, 5, 6, 7, 8, 9, 10, 11, 12, 13, 14, 15, 16, 17, 18, 19, 20, 21, 22, 23, 24, 25, 26, 27, 28, 29, 30, or greater than 30%.

[0245] In some embodiments a protein according to this disclosure comprises a first polypeptide sequence that comprises a ratio of essential amino acid residues to total amino acid residues that is equal to or greater than the ratio of essential amino acid residues to total amino acid residues present in at least one of whey protein, egg protein, and soy protein. In other embodiments, the protein comprises a first polypeptide sequence that comprises a ratio of essential chain amino acid residues to total amino acid residues that is equal to or greater than a percentage ratio selected from 1, 2, 3, 4, 5, 6, 7, 8, 9, 10, 11, 12, 13, 14, 15, 16, 17, 18, 19, 20, 21, 22, 23, 24, 25, 26, 27, 28, 29, 30, 31, 32, 33, 34, 35, 36, 37, 38, 39, 40, 41, 42, 43, 44, 45, 46, 47, 48, 49, 50, 51, 52, 53, 54, 55, 56, 57, 58, 59, 60, 61, 62, 63, 64, 65, 66, 67, 68, 69, 70, 75, 80, 85, 90, 95, or 100%.

[0246] In some embodiments the protein comprises a first polypeptide sequence that comprises a ratio of branched chain amino acid residues to total amino acid residues that is equal to or greater than the ratio of branched chain amino acid residues to total amino acid residues present in at least one of whey protein, egg protein, and soy protein; and/or comprises a first polypeptide sequence that comprises a ratio of L (leucine) residues to total amino acid residues that is equal to or greater than the ratio of L residues to total amino acid residues present in at least one of whey protein, egg protein, and soy protein, and/or comprises a first polypeptide sequence that comprises a ratio of essential amino acid residues to total amino acid residues that is equal to or greater than the ratio of essential amino acid residues to total amino acid residues present in at least one of whey protein, egg protein, and soy protein.

[0247] In some embodiments the protein comprises a first polypeptide sequence that comprises a ratio of branched chain amino acid residues to total amino acid residues that is equal to or greater than the ratio of branched chain amino acid residues to total amino acid residues present in at least one of whey protein, egg protein, and soy protein; and comprises a first polypeptide sequence that comprises a ratio of essential amino acid residues to total amino acid residues that is equal to or greater than the ratio of essential amino acid residues to total amino acid residues present in at least one of whey protein, egg protein, and soy protein. In some embodiments the protein comprises a first polypeptide sequence that comprises a ratio of branched chain amino acid residues to total amino acid residues equal to or greater than 24% and a ratio of essential amino acid residues to total amino acid residues that is equal to or greater than 49%. In some embodiments the protein comprises a first polypeptide sequence that comprises a ratio of branched chain amino acid residues to total amino acid residues equal to or greater than 20% and a ratio of essential amino acid residues to total amino acid residues that is equal to or greater than 51%. In some embodiments the protein comprises a first polypeptide sequence that comprises a ratio of branched chain amino acid residues to total amino acid residues equal to or greater than 18% and a ratio of essential amino acid residues to total amino acid residues that is equal to or greater than 40%.

[0248] In some embodiments the protein comprises a first polypeptide sequence that comprises a ratio of L (leucine) residues to total amino acid residues that is equal to or greater than the ratio of L residues to total amino acid residues present in at least one of whey protein, egg protein, and soy protein; and comprises a first polypeptide sequence that comprises a ratio of essential amino acid residues to total amino acid residues that is equal to or greater than the ratio of essential amino acid residues to total amino acid residues present in at least one of whey protein, egg protein, and soy protein. In some embodiments the protein comprises a first polypeptide sequence that comprises a ratio of L (leucine) residues to total amino acid residues equal to or greater than 11% and a ratio of essential amino acid residues to total amino acid residues that is equal to or greater than 49%. In some embodiments the protein comprises a first polypeptide sequence that comprises a ratio of L (leucine) amino acid residues to total amino acid residues equal to or greater than 9% and a ratio of essential amino acid residues to total amino acid residues that is equal to or greater than 51%. In some embodiments the protein comprises a first polypeptide sequence that comprises a ratio of L (leucine) amino acid residues to total amino acid residues equal to or greater than 8% and a ratio of essential amino acid residues to total amino acid residues that is equal to or greater than 40%. In some embodiments of the protein, the first polypeptide sequence comprises a first polypeptide sequence comprising a ratio of branched chain amino acid residues to total amino acid residues equal to or greater than 24%, a ratio of L (leucine) residues to total amino acid residues that is equal to or greater than 11%, and comprises at least one of every essential amino acid. In some embodiments of the protein, the first polypeptide sequence comprises a first polypeptide sequence comprising a ratio of branched chain amino acid residues to total amino acid residues equal to or greater than 24% and a ratio of essential amino acid residues to total amino acid residues equal to or greater than 49%.

[0249] Provided are nutritive polypeptides that are nutritionally complete. In some embodiments of the protein, the first polypeptide sequence comprises a first polypeptide sequence that contains at least one of every essential amino acid.

[0250] Nutritive glycoproteins and nutritive polypeptides with modulated glycosylation.

[0251] The term “glycan” or “glycoyl” refers to a polysaccharide or oligosaccharide which may be linked to a polypeptide, lipid, or proteoglycan. In some embodiments, a glycan is linked covalently or non-covalently to the polypeptide. In some embodiments the linkage occurs via a glycosidic bond. In some embodiments, the linkage is directly between the glycan (or glycoyl) and polypeptide or via an intermediary molecule. In some embodiments, the glycosidic bond is N-linked or O-linked. The term “polysaccharide” or “oligosaccharide” refers to one or more monosaccharide units joined together by glycosidic bonds. In some embodiments, the polysaccharide or oligosaccharide has a linear or branched structure. In some embodiments, the monosaccharide units comprise N-acetyl galactosamine, N-acetylglucosamine, galactose, neuraminic acid, fructose, mannose, fucose, glucose, xylose, N-acetylneuraminic acid, N-glycolylneuraminic acid, O-lactyl-N-acetylneuraminic acid, O-acetyl-N-acetylneuraminic acid, or O-methyl-N-acetylneuraminic acid. In some embodiments, the monosaccharide is modified by a phosphate, sulfate, or acetate group. The term “glycosylation acceptor site” refers to an amino acid along a polypeptide which carries a glycan or glycoyl in the native composition. In some embodiments the acceptor site consists of a nucleophilic acceptor of a glycosidic bond. In some embodiments, the nucleophilic acceptor site consists of an amino group. In some embodiments the amino acid consists of an asparagine, arginine, serine, threonine, hydroxyproline, hydroxylysine, tryptophan, phosphothreonine, serine, or phosphoserine. The term “exogenous glycosylation acceptor site” refers to a glycosylation acceptor site not present in the native composition of the polypeptide. In some embodiments the amino acid for the exogenous glycosylation acceptor site did not carry a glycan or glycoyl in the native composition. In some embodiments, the amino acid does not occur in the primary sequence of the polypeptide in the native composition. The term “exogenous glycan” or “exogenous glycoyl” refers to a glycan or glycoyl that occupies a glycosylation acceptor site, which was not present in the native composition on the same glycosylation acceptor site. In some embodiments, the glycosylation acceptor site is an exogenous glycosylation site or a native glycosylation site. The term “glycoprotein” refers to a polypeptide that is bound to at least one glycan or glycoyl.

[0252] Disclosed herein are formulations containing isolated nutritive polypeptides at least one exogenous glycosylation acceptor site present on an amino acid of the nutritive polypeptide. In some aspects, the at least one exogenous glycosylation acceptor site is occupied by an exogenous glycoyl or glycan, or alternatively, is unoccupied or is occupied by a non-natively occupying glycol or glycan. In some embodiments, the nutritive polypeptide is a polypeptide having an amino acid sequence at least 90% identical to SEQ ID NOS 1-4136, or is an edible species polypeptide sequence or fragment thereof at least 50 amino acids in length, or is a polypeptide having substantial immunogenicity when the glycosylation acceptor site is not present or is unoccupied. The nutritive polypeptide is more thermostable, is more digestible, and/or has a lower aggregation score than a reference polypeptide that has an amino acid sequence identical to the nutritive polypeptide but the glycosylation acceptor site is not present or is unoccupied in the reference polypeptide. The amino acids, e.g., asparagine, arginine, serine, threonine, hydroxyproline, and hydroxylysine, containing an exogenous glycosylation acceptor site are resistant to proteolysis. Exemplary glycans are N-acetyl galactosamine, N-acetylglucosamine, galactose, neuraminic acid, fructose, mannose, fucose, glucose, xylose, N-acetylneuraminic acid, N-glycolylneuraminic acid, O-lactyl-N-acetylneuraminic acid, O-acetyl-N-acetylneuraminic acid, and O-methyl-N-acetylneuraminic acid.

[0253] In some embodiments provided are formulations containing a nutritive polypeptide that is identical to the amino acid sequence of a polypeptide in a reference edible species glycoprotein, but the carbohydrate component of the nutritive polypeptide differs from a carbohydrate component of the reference edible species glycoprotein. The nutritive polypeptide is produced, for example, by expressing the polypeptide of the reference glycoprotein in a non-native host such as Aspergillus, Bacillus, Saccharomyces or a mammalian cell. Also provided are variant nutritive polypeptides, where the amino acid sequence differs from the amino acid sequence of a polypeptide in a reference glycoprotein by <1%, <5%, <10%, or more than 10%, and the mass of the carbohydrate component of the nutritive polypeptide is different from the mass of the carbohydrate component of the reference glycoprotein. The nutritive polypeptide variant is created by the insertion, deletion, substitution, or replacement of amino acid residues in the amino acid sequence of the polypeptide of the reference glycoprotein. Preferably, the nutritive polypeptide has distinguishable chemical, biochemical, biophysical, biological, or immunological properties from the reference glycoprotein. For example, the nutritive polypeptide is more hygroscopic, hydrophilic, or soluble in aqueous solutions than the reference glycoprotein. Alternatively, the nutritive polypeptide is less hygroscopic, hydrophilic, or soluble in aqueous solutions than the reference glycoprotein.

[0254] In another example, the nutritive polypeptide is more antigenic, immunogenic, or allergenic than the reference glycoprotein, or alternatively, the nutritive polypeptide is less antigenic, immunogenic, or allergenic than the reference glycoprotein. The nutritive polypeptide is more stable or resistant to enzymatic degradation than the reference glycoprotein or the nutritive polypeptide is more unstable or susceptible to enzymatic degradation than the reference glycoprotein. The carbohydrate component of the nutritive polypeptide is substantially free of N-glycolylneuraminic acid or has reduced N-glycolylneuraminic acid in comparison to the reference glycoprotein. Alternatively, the carbohydrate component of the nutritive polypeptide has elevated N-glycolylneuraminic acid in comparison to the reference glycoprotein.

[0255] Also provided is a nutritive polypeptide that has at least one exogenous glycosylation acceptor site present on an amino acid of the nutritive polypeptide, and the at least one exogenous glycosylation acceptor site is occupied by an exogenous glycoyl or glycan, and the nutritive polypeptide includes a polypeptide having an amino acid sequence at least 90% identical to SEQ ID NOS 1-4136, where the nutritive polypeptide is present in at least 0.5 g at a concentration of at least 10% on a mass basis, and where the formulation is substantially free of non-comestible products

[0256] Reference nutritional polypeptides and reference nutritional polypeptide mixtures. Three natural sources of protein generally regarded as good sources of high quality amino acids are whey protein, egg protein, and soy protein. Each source comprises multiple proteins. Table RNP1 presents the weight proportional representation of each amino acid in the protein source (g AA/g protein) expressed as a percentage.

TABLE RNP1

| Amino Acid | Whey | Egg | Soy |
|---|---|---|---|
| Isoleucine | 6.5% | 5.5% | 5.0% |
| Leucine | 11.0% | 8.6% | 8.0% |
| Lysine | 9.1% | 7.2% | 6.3% |
| Methionine | 2.1% | 3.1% | 1.3% |
| Phenylalanine | 3.4% | 5.3% | 1.2% |
| Threonine | 7.0% | 4.8% | 3.7% |
| Tryptophan | 1.7% | 1.2% | 1.3% |
| Valine | 6.2% | 6.1% | 4.9% |
| Histidine | 2.0% | 2.4% | 2.7% |
| Other | 51.7% | 49.5% | 60.4% |

[0257] Table RNP2 presents the weight proportion of each protein source that is essential amino acids, branched chain amino acids (L, I, and V), and leucine (L) (alone).

TABLE RNP2

| Protein | Essential | Branched Chain | |
|---|---|---|---|
| Source | Amino Acids | Amino Acids | Leucine |
| Whey | 49.0% | 23.7% | 11.0% |
| Egg | 50.5% | 20.1% | 8.6% |
| Soy | 39.6% | 17.9% | 8.0% |

[0258] The sources relied on to determine the amino acid content of Whey are: Belitz H D., Grosch W., and Schieberle P. Food Chemistry (4th Ed). Springer-Verlag, Berlin Heidelberg 2009; <gnc.com/product/index.jsp?productId=2986027>; <nutrabio.com/Products/whey_protein_concentrate.htm>; and <nutrabio.com/Products/whey_protein_isolate.htm>. The amino acid content values from those sources were averaged to give the numbers presented in Tables RNP1 and RNP2. The source for soy protein is Egg, National Nutrient Database for Standard Reference, Release 24 (<ndb.nal.usda.gov/ndb/foods/list>). The source for soy protein is Self Nutrition Data (<nutritiondata.self com/facts/legumes-and-legume-products/4389/2>).

[0259] According to the USDA nutritional database whey can include various non-protein components: water, lipids (such as fatty acids and cholesterol), carbohydrates and sugars, minerals (such as Ca, Fe, Mg, P, K, Na, and Zn), and vitamins (such as vitamin C, thiamin, riboflavin, niacin, vitamin B-6, folate, vitamin B-12, and vitamin A). According to the USDA nutritional database egg white can include various non-protein components: water, lipids, carbohydrates, minerals (such as Ca, Fe, Mg, P, K, Na, and Zn), and vitamins (such as thiamin, riboflavin, niacin, vitamin B-6, folate, and vitamin B-12). According to the USDA nutritional database soy can include various non-protein components: water, lipids (such as fatty acids), carbohydrates, minerals (such as Ca, Fe, Mg, P, K, Na, and Zn), and vitamins (such as thiamin, riboflavin, niacin, vitamin B-6, folate).

[0260] Engineered Nutritive Polypeptides.

[0261] In some embodiments a protein comprises or consists of a derivative or mutein of a protein or fragment of an edible species protein or a protein that naturally occurs in a food product. Such a protein can be referred to as an “engineered protein.” In such embodiments the natural protein or fragment thereof is a “reference” protein or polypeptide and the engineered protein or a first polypeptide sequence thereof comprises at least one sequence modification relative to the amino acid sequence of the reference protein or polypeptide. For example, in some embodiments the engineered protein or first polypeptide sequence thereof is at least 40%, 45%, 50%, 55%, 60%, 65%, 70%, 75%, 80%, 85%, 86%, 87%, 88%, 89%, 90%, 91%, 92%, 93%, 94%, 95%, 96%, 97%, 98%, 99%, or 99.5% identical to at least one reference protein amino acid sequence. Typically the ratio of at least one of branched chain amino acid residues to total amino acid residues, essential amino acid residues to total amino acid residues, and leucine residues to total amino acid residues, present in the engineered protein or a first polypeptide sequence thereof is greater than the corresponding ratio of at least one of branched chain amino acid residues to total amino acid residues, essential amino acid residues to total amino acid residues, and leucine residues to total amino acid residues present in the reference protein or polypeptide sequence.

[0262] Nutritive Polypeptides—Orthologs and Homologs.

[0263] In another aspect, provided are nutritive polypeptides that contain amino acid sequences homologous to edible species polypeptides, which are optionally secreted from unicellular organisms and purified therefrom. Such homologous polypeptides can be 70%, 75%, 80%, 85%, 90%, 91%, 92%, 93%, 94%, 95%, 96%, 97%, 98%, 99% or greater than 99% similar, or can be 70%, 75%, 80%, 85%, 90%, 91%, 92%, 93%, 94%, 95%, 96%, 97%, 98%, 99% or greater than 99% identical to an edible species polypeptide. Such nutritive polypeptides can be endogenous to the host cell or exogenous, can be naturally secreted in the host cell, or both, and can be engineered for secretion.

[0264] Also provided are orthologs of nutritive polypeptides. The disclosure of a nutritive polypeptide sequence encompasses the disclosure of all orthologs of such a nutritive polypeptide sequence, from phylogenetically related organisms or, alternatively, from a phylogenetically diverse organism that is homologous to the nutritive polypeptide, such as 30%, 35%, 40%, 45%, 50%, 55%, 60%, 65%, 70%, 75%, 80%, 85%, 90%, 91%, 92%, 93%, 94%, 95%, 96%, 97%, 98%, 99% or greater than 99% similar, or can be 70%, 75%, 80%, 85%, 90%, 91%, 92%, 93%, 94%, 95%, 96%, 97%, 98%, 99% or greater than 99% identical.

[0265] Nutritive Polypeptide Fragments, Nutritive Polypeptide Length.

[0266] In some embodiments herein a nutritive polypeptide contains a fragment of an edible species polypeptide. In some embodiments the fragment comprises at least 25 amino acids. In some embodiments the fragment comprises at least 50 amino acids. In some embodiments the fragment consists of at least 25 amino acids. In some embodiments the fragment consists of at least 50 amino acids. In some embodiments an isolated recombinant protein is provided. In some embodiments the protein comprises a first polypeptide sequence, and the first polypeptide sequence comprises a fragment of at least 25 or at least 50 amino acids of an edible species protein. In some embodiments the proteins is isolated. In some embodiments the proteins are recombinant. In some embodiments the proteins comprise a first polypeptide sequence comprising a fragment of at least 50 amino acids of an edible species protein. In some embodiments the proteins are isolated recombinant proteins. In some embodiments the isolated recombinant proteins disclosed herein are provided in a non-isolated and/or non-recombinant form.

[0267] In some embodiments the protein comprises from 10 to 5,000 amino acids, from 20-2,000 amino acids, from 20-1,000 amino acids, from 20-500 amino acids, from 20-250 amino acids, from 20-200 amino acids, from 20-150 amino acids, from 20-100 amino acids, from 20-40 amino acids, from 30-50 amino acids, from 40-60 amino acids, from 50-70 amino acids, from 60-80 amino acids, from 70-90 amino acids, from 80-100 amino acids, at least 10 amino acids, at least 11 amino acids, at least 12 amino acids, at least 13 amino acids, at least 14 amino acids, at least 15 amino acids, at least 16 amino acids, at least 17 amino acids, at least 18 amino acids, at least 19 amino acids, at least 20 amino acids, at least 21 amino acids, at least 22 amino acids, at least 23 amino acids, at least 24 amino acids, at least 25 amino acids, at least 30 amino acids, at least 35 amino acids, at least 40 amino acids, at least 45 amino acids, at least 50 amino acids, at least 55 amino acids, at least 60 amino acids, at least 65 amino acids, at least 70 amino acids, at least 75 amino acids, at least 80 amino acids, at least 85 amino acids, at least 90 amino acids, at least 95 amino acids, at least 100 amino acids, at least 105 amino acids, at least 110 amino acids, at least 115 amino acids, at least 120 amino acids, at least 125 amino acids, at least 130 amino acids, at least 135 amino acids, at least 140 amino acids, at least 145 amino acids, at least 150 amino acids, at least 155 amino acids, at least 160 amino acids, at least 165 amino acids, at least 170 amino acids, at least 175 amino acids, at least 180 amino acids, at least 185 amino acids, at least 190 amino acids, at least 195 amino acids, at least 200 amino acids, at least 205 amino acids, at least 210 amino acids, at least 215 amino acids, at least 220 amino acids, at least 225 amino acids, at least 230 amino acids, at least 235 amino acids, at least 240 amino acids, at least 245 amino acids, or at least 250 amino acids. In some embodiments the protein consists of from 20 to 5,000 amino acids, from 20-2,000 amino acids, from 20-1,000 amino acids, from 20-500 amino acids, from 20-250 amino acids, from 20-200 amino acids, from 20-150 amino acids, from 20-100 amino acids, from 20-40 amino acids, from 30-50 amino acids, from 40-60 amino acids, from 50-70 amino acids, from 60-80 amino acids, from 70-90 amino acids, from 80-100 amino acids, at least 25 amino acids, at least 30 amino acids, at least 35 amino acids, at least 40 amino acids, at least 2455 amino acids, at least 50 amino acids, at least 55 amino acids, at least 60 amino acids, at least 65 amino acids, at least 70 amino acids, at least 75 amino acids, at least 80 amino acids, at least 85 amino acids, at least 90 amino acids, at least 95 amino acids, at least 100 amino acids, at least 105 amino acids, at least 110 amino acids, at least 115 amino acids, at least 120 amino acids, at least 125 amino acids, at least 130 amino acids, at least 135 amino acids, at least 140 amino acids, at least 145 amino acids, at least 150 amino acids, at least 155 amino acids, at least 160 amino acids, at least 165 amino acids, at least 170 amino acids, at least 175 amino acids, at least 180 amino acids, at least 185 amino acids, at least 190 amino acids, at least 195 amino acids, at least 200 amino acids, at least 205 amino acids, at least 210 amino acids, at least 215 amino acids, at least 220 amino acids, at least 225 amino acids, at least 230 amino acids, at least 235 amino acids, at least 240 amino acids, at least 245 amino acids, or at least 250 amino acids. In some aspects, a protein or fragment thereof includes at least two domains: a first domain and a second domain. One of the two domains can include a tag domain, which can be removed if desired. Each domain can be 1, 2, 3, 4, 5, 6, 7, 8, 9, 10, 11, 12, 13, 14, 15, 16, 17, 18, 19, 20, 21, 22, 23, 24, 25, or greater than 25 amino acids in length. For example, the first domain can be a polypeptide of interest that is 18 amino acids in length and the second domain can be a tag domain that is 7 amino acids in length. As another example, the first domain can be a polypeptide of interest that is 17 amino acids in length and the second domain can be a tag domain that is 8 amino acids in length.

[0268] In some embodiments herein a fragment of an edible species polypeptide is selected and optionally isolated. In some embodiments the fragment comprises at least 25 amino acids. In some embodiments the fragment comprises at least 50 amino acids. In some embodiments the fragment consists of at least 25 amino acids. In some embodiments the fragment consists of at least 50 amino acids. In some embodiments an isolated recombinant protein is provided. In some embodiments the protein comprises a first polypeptide sequence, and the first polypeptide sequence comprises a fragment of at least 25 or at least 50 amino acids of an edible species protein. In some embodiments the proteins is isolated. In some embodiments the proteins are recombinant. In some embodiments the proteins comprise a first polypeptide sequence comprising a fragment of at least 50 amino acids of an edible species protein. In some embodiments the proteins are isolated recombinant proteins. In some embodiments the isolated nutritive polypeptides disclosed herein are provided in a non-isolated and/or non-recombinant form.

[0269] Nutritive Polypeptide Physicochemical Properties.

[0270] Digestibility. In some aspects the nutritive polypeptide is substantially digestible upon consumption by a mammalian subject. Preferably, the nutritive polypeptide is easier to digest than at least a reference polypeptide or a reference mixture of polypeptides, or a portion of other polypeptides in the consuming subject's diet. As used herein, “substantially digestible” can be demonstrated by measuring half-life of the nutritive polypeptide upon consumption. For example, a nutritive polypeptide is easier to digest if it has a half-life in the gastrointestinal tract of a human subject of less than 60 minutes, or less than 50, 40, 30, 20, 15, 10, 5, 4, 3, 2 minutes or 1 minute. In certain embodiments the nutritive polypeptide is provided in a formulation that provides enhanced digestion; for example, the nutritive polypeptide is provided free from other polypeptides or other materials. In some embodiments, the nutritive polypeptide contains one or more recognition sites for one or more endopeptidases. In a specific embodiment, the nutritive polypeptide contains a secretion leader (or secretory leader) sequence, which is then cleaved from the nutritive polypeptide. As provided herein, a nutritive polypeptide encompasses polypeptides with or without signal peptides and/or secretory leader sequences. In some embodiments, the nutritive polypeptide is susceptible to cleavage by one or more exopeptidases.

[0271] Digestion Assays

[0272] Digestibility is a parameter relevant to the benefits and utility of proteins. Information relating to the relative completeness of digestion can serve as a predictor of peptide bioavailability (Daniel, H., 2003. Molecular and Integrative Physiology of Intestinal Peptide Transport. Annual Review of Physiology, Volume 66, pp. 361-384). In some embodiments proteins disclosed herein are screened to assess their digestibility. Digestibility of proteins can be assessed by any suitable method known in the art. In some embodiments digestibility is assessed by a physiologically relevant in vitro digestion reaction that includes one or both phases of protein digestion, simulated gastric digestion and simulated intestinal digestion (see, e.g., Moreno, et al., 2005. Stability of the major allergen Brazil nut 2S albumin (Ber e 1) to physiologically relevant in vitro gastrointestinal digestion. FEBS Journal, pp. 341-352; Martos, G., Contreras, P., Molina, E. & Lopez-Fandino, R., 2010. Egg White Ovalbumin Digestion Mimicking Physiological Conditions. Journal of Agricultural and food chemistry, pp. 5640-5648; Moreno, F. J., Mackie, A. R. & Clare Mills, E. N., 2005). Phospholipid interactions protect the milk allergen a-Lactalbumin from proteolysis during in vitro digestion. Journal of agricultural and food chemistry, pp. 9810-9816). Briefly, test proteins are sequentially exposed to a simulated gastric fluid (SGF) for 120 minutes (the length of time it takes 90% of a liquid meal to pass from the stomach to the small intestine; see Kong, F. & Singh, R. P., 2008. Disintegration of Solid Foods in Human Stomach. Journal of Food Science, pp. 67-80) and then transferred to a simulated duodenal fluid (SDF) to digest for an additional 120 minutes. Samples at different stages of the digestion (e.g., 2, 5, 15, 30, 60 and 120 min) are analyzed by electrophoresis (e.g., chip electrophoresis or SDSPAGE) to monitor the size and amount of intact protein as well as any large digestion fragments (e.g., larger than 4 kDa). The disappearance of protein over time indicates the rate at which the protein is digested in the assay. By monitoring the amount of intact protein observed over time, the half-life (τ½) of digestion is calculated for SGF and, if intact protein is detected after treatment with SGF, the τ½ of digestion is calculated for SIF. This assay can be used to assess comparative digestibility (i.e., against a benchmark protein such as whey) or to assess absolute digestibility. In some embodiments the digestibility of the protein is higher (i.e., the SGF τ½ and/or SIF τ½ is shorter) than whey protein. In some embodiments the protein has a SGF τ½ of 30 minutes or less, 20 minutes or less, 15 minutes or less, 10 minutes or less, 5 minutes or less, 4 minutes or less, 3 minutes or less, 2 minutes or less or 1 minute or less. In some embodiments the protein has a SIF τ½ of 30 minutes or less, 20 minutes or less, 15 minutes or less, 10 minutes or less, 5 minutes or less, 4 minutes or less, 3 minutes or less, 2 minutes or less or 1 minute or less. In some embodiments the protein is not detectable in one or both of the SGF and SIF assays by 2 minutes, 5 minutes, 15 minutes, 30 minutes, 60 minutes, or 120 minutes. In some embodiments the protein is digested at a constant rate and/or at a controlled rate in one or both of SGF and SIF. In such embodiments the rate of digestion of the protein may not be optimized for the highest possible rate of digestion. In such embodiments the rate of absorption of the protein following ingestion by a mammal can be slower and the total time period over which absorption occurs following ingestion can be longer than for proteins of similar amino acid composition that are digested at a faster initial rate in one or both of SGF and SIF. In some embodiments the protein is completely or substantially completely digested in SGF. In some embodiments the protein is substantially not digested or not digested by SGF; in most such embodiments the protein is digested in SIF.

[0273] Assessing protein digestibility can also provide insight into a protein's potential allergenicity, as proteins or large fragments of proteins that are resistant to digestive proteases can have a higher risk of causing an allergenic reaction (Goodman, R. E. et al., 2008. Allergenicity assessment of genetically modified crops—what makes sense? Nature Biotechnology, pp. 73-81). To detect and identify peptides too small for chip electrophoresis analysis, liquid chromatography and mass spectrometry can be used. In SGF samples, peptides can be directly detected and identified by LC/MS. SIF protein digestions may require purification to remove bile acids before detection and identification by LC/MS.

[0274] In some embodiments digestibility of a protein is assessed by identification and quantification of digestive protease recognition sites in the protein amino acid sequence. In some embodiments the protein comprises at least one protease recognition site selected from a pepsin recognition site, a trypsin recognition site, and a chymotrypsin recognition site.

[0275] As used herein, a “pepsin recognition site” is any site in a polypeptide sequence that is experimentally shown to be cleaved by pepsin. In some embodiments it is a peptide bond after (i.e., downstream of) an amino acid residue selected from Phe, Trp, Tyr, Leu, Ala, Glu, and Gln, provided that the following residue is not an amino acid residue selected from Ala, Gly, and Val.

[0276] As used herein, a “trypsin recognition site” is any site in a polypeptide sequence that is experimentally shown to be cleaved by trypsin. In some embodiments it is a peptide bond after an amino acid residue selected from Lys or Arg, provided that the following residue is not a proline.

[0277] As used herein, a “chymotrypsin recognition site” is any site in a polypeptide sequence that is experimentally shown to be cleaved by chymotrypsin. In some embodiments it is a peptide bond after an amino acid residue selected from Phe, Trp, Tyr, and Leu.

[0278] Disulfide bonded cysteine residues in a protein tend to reduce the rate of digestion of the protein compared to what it would be in the absence of the disulfide bond. For example, it has been shown that the rate of digestion of the protein b-lactoglobulin is increased when its disulfide bridges are cleaved (I. M. Reddy, N. K. D. Kella, and J. E. Kinsella. “Structural and Conformational Basis of the Resistance of B-Lactoglobulin to Peptic and Chymotryptic Digestion”. J. Agric. Food Chem. 1988, 36, 737-741). Accordingly, digestibility of a protein with fewer disulfide bonds tends to be higher than for a comparable protein with a greater number of disulfide bonds. In some embodiments the proteins disclosed herein are screened to identify the number of cysteine residues present in each and in particular to allow selection of a protein comprising a relatively low number of cysteine residues. For example, edible species proteins or fragments can be identified that comprise a no Cys residues or that comprise a relatively low number of Cys residues, such as 10 or fewer Cys residues, 9 or fewer Cys residues, 8 or fewer Cys residues, 7 or fewer Cys residues, 6 or fewer Cys residues, 5 or fewer Cys residues, 4 or fewer Cys residues, 3 or fewer Cys residues, 2 or fewer Cys residues, 1 Cys residue, or no Cys residues. In some embodiments one or more Cys residues in an edible species protein or fragment thereof is removed by deletion and/or by substitution with another amino acid. In some embodiments 1 Cys residue is deleted or replaced, 1 or more Cys residues are deleted or replaced, 2 or more Cys residues are deleted or replaced, 3 or more Cys residues are deleted or replaced, 4 or more Cys residues are deleted or replaced, 5 or more Cys residues are deleted or replaced, 6 or more Cys residues are deleted or replaced, 7 or more Cys residues are deleted or replaced, 8 or more Cys residues are deleted or replaced, 9 or more Cys residues are deleted or replaced, or 10 or more Cys residues are deleted or replaced. In some embodiments the protein of this disclosure comprises a ratio of Cys residues to total amino acid residues equal to or lower than 5%, 4%, 3%, 2%, or 1%. In some embodiments the protein comprises 10 or fewer Cys residues, 9 or fewer Cys residues, 8 or fewer Cys residues, 7 or fewer Cys residues, 6 or fewer Cys residues, 5 or fewer Cys residues, 4 or fewer Cys residues, 3 or fewer Cys residues, 2 or fewer Cys residues, 1 Cys residue, or no Cys residues. In some embodiments, the protein comprises 1 or fewer Cys residues. In some embodiments, the protein comprises no Cys residues.

[0279] Alternatively or in addition, disulfide bonds that are or can be present in a protein can be removed. Disulfides can be removed using chemical methods by reducing the disulfide to two thiol groups with reducing agents such as beta-mercaptoethanol, dithiothreitol (DTT), or tris(2-carboxyethyl)phosphine (TCEP). The thiols can then be covalently modified or “capped” with reagents such as iodoacetamide, N-ethylmaleimide, or sodium sulfite (see, e.g., Crankshaw, M. W. and Grant, G. A. 2001. Modification of Cysteine. Current Protocols in Protein Science. 15.1.1-15.1.18).

[0280] Nutritive Polypeptides and Nutritive Polypeptide Formulations with Modulated Viscosity.

[0281] Disclosed herein are compositions, formulations, and food products that contain viscosity-modulating nutritive polypeptides. In one aspect, provided are formulations substantially free of non-comestible products that contain nutritive polypeptides present in a nutritional amount, and the nutritive polypeptide decreases the viscosity of a food product. In some embodiments, the nutritive polypeptide is present at about 10 g/1 and the viscosity of the formulation is from about 1,000 mPas to about 10,000 mPas at 25 degrees C., such as from about 2,500 mPas to about 5,000 mPas at 25 degrees C.

[0282] The formulations are incorporated into food products having advantages over similar food products lacking the nutritive polypeptides, or the formulations are incorporated into other products such as beverage products or animal feed products. For example, the food products have a reduced fat content, a reduced sugar content, and/or a reduced calorie content compared to a food product not having the nutritive polypeptide. Preferably, the nutritive polypeptide is present in the food product such that consumption of a nutritional amount of the food product is satiating. In an embodiment of the invention, gelatin, an animal-derived material, is replaced by a non-animal derived product, containing one or more nutritive polypeptides. Typically the nutritive polypeptide is present in an amount effective to replace gelatin in the product. The gelatin replacement is incorporated into a food product, a beverage product, or an animal feed product, and the formulation is substantially free of non-comestible products.

[0283] Also provided are formulations containing a nutritive polypeptide present in a functional and/or nutritional amount, which increases the viscosity of a food or beverage product, such as formulations containing viscosity-increasing nutritive polypeptides incorporated into food products having advantages over similar food products lacking the nutritive polypeptides. For example, the food products have a reduced fat content, a reduced sugar content, and/or a reduced calorie content compared to a food product not having the nutritive polypeptide. Viscous nutritive polypeptides can be used as a nutritionally favorable low calorie substitute for fat. Additionally, it may be desired to add to the compositions and products one or more polysaccharides or emulsifiers, resulting in a further improvement in the creamy mouthfeel.

[0284] In some embodiments, the viscosity of nutritive polypeptide-containing materials is enhanced by crosslinking the nutritive polypeptides or crosslinking nutritive polypeptides to other proteins present in the material. An example of an effective crosslinker is transglutaminase, which crosslinks proteins between an ε-amino group of a lysine residue and a γ-carboxamide group of glutamine residue, forming a stable covalent bond. The resulting gel strength and emulsion strength of nutritive polypeptides identified and produced as described herein are examined by preparing a transglutaminase-coupled nutritive protein composition, followed by gel strength and emulsion strength assays. A suitable transglutaminase derived from microorganisms in accordance with the teachings of U.S. Pat. No. 5,156,956 is commercially available. These commercially available transglutaminases typically have an enzyme activity of about 100 units. The amount of transglutaminase (having an activity of about 100 units) added to isolated nutritive polypeptide is expressed as a transglutaminase concentration which is the units of transglutaminase per 100 grams of isolated nutritive polypeptide. The isolated nutritive polypeptide contains from 5 to 95%, preferably 20 to 80%, preferably 58% to 72% protein and also preferably from 62% to 68% protein. The transglutaminase concentration is at least 0.15, preferably 0.25 and most preferably 0.30 units transglutaminase per gram protein up to 0.80 and preferably 0.65 units transglutaminase per gram protein. Higher and lower amounts may be used. This enzyme treatment can also be followed by thermal processing to make a viscous solution containing a nutritive polypeptide. To generate nutritive polypeptide samples containing crosslinks, a sample is mixed with a transglutaminase solution at pH 7.0 to give an enzyme to protein weight ratio of 1:25. The enzyme-catalyzed cross-linking reaction is conducted at 40° C. in most of the experiments.

[0285] Oscillatory shear measurements can be used to investigate the rheological properties of nutritive polypeptides. Also, to determine the viscosity of nutritive polypeptide solutions and gels viscoelasticity is investigated by dynamic oscillatory rheometry. A 2 mL sample of nutritive polypeptide solution or nutritive polypeptide solution containing transglutaminase is poured into the Couette-type cylindrical cell (2.5 cm i.d., 2.75 cm o.d.) of the rheometer and covered with a thin layer of low-viscosity silicone oil to prevent evaporation. For samples with enzyme present, gelation is induced in situ by incubation at 40° C. For nutritive polypeptide samples without enzyme, gelation is induced by subjecting the sample to the following thermal treatment process: temperature increased at constant rate of 2 K min-1 from 40 to 90° C., kept at 90° C. for 30 min, cooled at 1 K min-1 from 90 to 30° C., and kept at 30° C. for 15 min. Some samples can be subjected to this thermal treatment after the enzyme treatment. Small deformation shear rheological properties are mostly determined in the linear viscoelastic regime (maximum strain amplitude 0.5%) with storage and loss moduli (G′ and G″) measured at a constant frequency of 1 Hz. In addition, some small deformation measurements are made as a function of frequency e.g., 2×10-3 to 2 Hz, and some large deformation measurements are carried out at strains up to nearly 100%.

[0286] Nutritive Polypeptides for Treatment of Gastrointestinal Tract Malabsorption Diseases and Inflammatory Conditions

[0287] Provided are nutritive polypeptides, and compositions and formulations containing nutritive polypeptides, which are useful for the treatment of gastrointestinal tract malabsorption diseases and inflammatory conditions. The nutritive polypeptides are also useful for treating and preventing loss of muscle mass and muscle function in a subject suffering from a gastrointestinal tract malabsorption disease and inflammatory condition. Moreover, the nutritive polypeptides are further useful for reducing or preventing a side effect (meaning a secondary effect, usually undesirable, of a pharmaceutical agent or medical treatment) of other therapeutic or prophylactic regimens for gastrointestinal tract malabsorption diseases, as such regimens may result in decreased amino acid availability to the subject, in addition to causing loss of muscle mass and muscle function.

[0288] Gastrointestinal diseases affect an estimated 60 to 70 million subjects in the United States. (See, e.g., Peery, A. F. et al. (2012) Burden of Gastrointestinal Disease in the United States: 2012 Update. Gastroenterology. 143(5): 1179-1187.e3). As used herein, a “gastrointestinal tract malabsorption disease” includes any disease, disorder or condition causing or resulting in reduced absorption of polypeptides, peptides and/or amino acids through the gastrointestinal tract of a subject, and the term “protein malabsorption syndrome” may be used interchangeably. Gastrointestinal tract malabsorption diseases may include, for example, structural defects, and malabsorption caused by infection, drugs, surgical procedures (such as bariatric surgery), mucosal abnormalities, inflammation, enzyme deficiency, radiation, digestive failures, systemic diseases, or other causes. Gastrointestinal diseases result in over 21 million hospitalizations (CDC/NCHS national hospital discharge survey: United States, 2010. Centers for Disease Control and Prevention) and over 250,000 deaths annually. (National Institutes of Health, U.S. Department of Health and Human Services. Opportunities and Challenges in Digestive Diseases Research: Recommendations of the National Commission on Digestive Diseases. Bethesda, Md.: National Institutes of Health; 2009. NIH Publication 08-6514.)

[0289] Adequate treatment regimens do not exist to treat and prevent gastrointestinal diseases or the gastrointestinal malabsorption associated with them. Gastrointestinal diseases therefore represent a significant morbidity, mortality and health economic burden.

[0290] The Center for Disease Control estimates that irritable bowel disease (IBD), one of the most prevalent gastrointestinal diseases, results in annual US healthcare costs in excess of $1.7 billion.

[0291] The nutritive polypeptides, compositions and formulations disclosed herein are useful for the treatment and prevention of gastrointestinal protein malabsorption diseases, in particular in human subjects at risk of loss of muscle mass and/or muscle function due to the disease or another treatment regimen therefor. By way of non-limiting example, a human subject may suffer from or be at risk of a gastrointestinal protein malabsorption disease due to an infection. Exemplary infections include viral infections, bacterial infections, and other parasitic infections, which cause or exacerbate diseases including HIV related malabsorption, Traveler's diarrhea, Tropical sprue, Whipple's disease, Intestinal tuberculosis, and hepatitis.

[0292] A human subject may suffer from or be at risk of a gastrointestinal protein malabsorption disease due to structural complications of the GI tract or inflammatory diseases or resulting from gastrointestinal reparative surgery. Exemplary diseases include Crohn's Disease, Ulcerative Colitis, Short bowel Syndrome, Mucositis, Fistulae, Diverticulae and Strictures, Eosinophilic gastroenteritis, Radiation enteritis, Systemic Sclerosis and Collagen Vascular Diseases, Menetrier's disease, Ulcers, Necrotizing Enterocolitis, Polyps, Esophagitis and Gastroparesis, Gastrointestinal Occlusions, Bariatric surgery and Gastrointestinal resection.

[0293] In addition, a human subject may suffer from or be at risk of a gastrointestinal protein malabsorption disease due to enzymatic deficiencies. Exemplary diseases include Intestinal Enteropeptidase deficiency, Enterokinase deficiency, Zollinger-Ellison syndrome, Pancreatic enzyme deficiency, Lactase deficiency inducing lactose intolerance (constitutional, secondary, congenital); Sucrose intolerance; Intestinal Disaccharidase deficiency.

[0294] A human subject may suffer from or be at risk of a gastrointestinal protein malabsorption disease due to other systemic disease states. Exemplary diseases include Hypothyroidism and Hyperthyroidism, Addison's disease, Diabetes mellitus, Hyperparathyroidism and Hypoparathyroidism, Carcinoid syndrome, Protein Malnutrition (Hypoproteinemia, Anemia, edema, asthenia, alopecia, hypoalbuminemia), Fiber Deficiency, Abeta-lipoproteinaemia, amyloidosis, Proctitis, Gastroesophageal reflux disease, Pancreatitis, Porphyria, Lysinuric protein intolerance, Shwachman-Diamond syndrome.

[0295] Further, a human subject may suffer from or be at risk of a gastrointestinal protein malabsorption disease due to eating disorders. Exemplary diseases include Anorexia, Anorexia Nervosa, Bulimia Nervosa, Binge Eating Disorder, Eating Disorder Not Otherwise Specified (EDNOS) and Dysphagias. (See, e.g., Yamada, T. (Ed) (2009) Textbook of Gastroenterology. Blackwell Publishing Ltd).

[0296] Short bowel syndrome (SBS) can occur congenitally or from surgery to treat diseases such as crohn's disease, ulcerative colitis, necrotizing enterocolitis or trauma. Since the gastrointestinal tract is the primary absorptive surface for dietary nutrients, a shortened bowel can cause malabsorption of nutrients and fluids, resulting in nutrient deficiencies, severe diarrhea, dehydration, electrolyte imbalances, weight loss, and frequently, a long-term dependence on parenteral nutrition. Jeppesen, P. B. (2014). Spectrum of Short Bowel Syndrome in Adults: Intestinal Insufficiency to Intestinal Failure. J. Parent. Ent. Nutr. 38:8S-13S. Patients with SBS, particularly those patients who are dependent on PN/IV support, can manifest deficiencies in protein-calorie malnutrition, which may result in delayed wound healing.

[0297] Glucagon-like peptide-2 (GLP-2), a peptide hormone, may act to control nutrient absorptive capacity within the bowel. Amino acids also function as signals of nutrient status, and therefore nutritive polypeptides can be used to deliver GLP-2 secretagogues into the gastrointestinal tract. GLP-2 receptors are found throughout the small and large bowel in humans, mice, marmoset, and rat. (See, Ørskov, C., (2005) GLP-2 stimulates colonic growth via KGF, released by subepithelial myofibroblasts with GLP-2 receptors. Regul. Pept. 124: 105-112.) GLP-2 is co-secreted with GLP-1 from intestinal L cells in response to nutrient ingestion and acts to maintain epithelial barrier function while increasing crypt cell proliferation and weight gain. (Martin, G R., (2006). Gut hormones, and short bowel syndrome: The enigmatic role of glucagon-like peptide-2 in the regulation of intestinal adaptation. World J Gastroenterol. 12(26): 4117-4129).

[0298] A further example of gastrointestinal malabsorption is eating disorders, including but not limited to anorexia nervosa. Anorexia is characterized by extreme dietary restriction. Dietary restriction and the resulting reduction in total stomach capacity in these individuals can lead to eventual multi organ failure, Hypothermia, Gastrointestinal complications, Cardiac complications including arrhythmia, bradycardia, hypotension and damaged heart muscle. Long term side effects of anorexia are significant and debilitating and include osteoporosis, growth arrest, and amenorrhea. (See, Katzman, D K. (2005). Medical complications in adolescents with anorexia nervosa: a review of the literature. Int. J. Eat. Disord. (37)S52-9; Salvioli, B. Et al. (2013). Audit of digestive complaints and psychopathological traits in patients with eating disorders: A prospective study. Digestive and Liver Disease. 45(8) 639-644)

[0299] Amino acids are key effectors of gut protein turnover, both as constituents of proteins and as regulatory molecules limiting intestinal injury and maintaining intestinal functions. Low glutamine levels are reported in gastrointestinal malabsorption diseases, e.g. Crohn's disease (See, Sido B, (2006) Low intestinal glutamine level and low glutaminase activity in Crohn's disease: a rational for glutamine supplementation? Dig Dis Sci 51(12):2170-2179)). Thus, glutamine delivery via nutritive polypeptides is a useful treatment for Crohn's disease and other indications such as IBS (See, Zhou Q, (2010) MicroRNA-29a regulates intestinal membrane permeability in patients with irritable bowel syndrome. Gut 59(6):775-78.) It has been noted that glutamine supplementation improves gut barrier function in several experimental conditions of injury (Amasheh et al. (2009) Barrier effects of nutritional factors. Ann. NY Acad. SCi. 1165:267-73).

[0300] Diseases characterized by inflammation can be treated and prevented with nutritive polypeptides containing levels of certain amino acids, such as arginine, glutamine, or cysteine, or combinations thereof.

[0301] Studies in rodents and humans show that supplemental free arginine, administered either orally or parenterally, accelerates wound healing mainly by increasing collagen deposition in wounds. (See, e.g., Barbul A., Lazarou S., Efron D. T., Wasserkrug H. L., and Efron G. (1990). Arginine enhances wound healing in humans. Surgery. 108:331.) Further, Arginine improves epithelial reconstitution after intestinal injury. (See, e.g., Singh K., Coburn L. A., Barry D. P., Boucher J., Chaturvedi R., and Wilson, K. T. (2012)). L-arginine uptake by cationic amino acid transporter 2 is essential for colonic epithelial cell restitution. (Am J Physiol Gastrointest Liver Physiol. 302:G1061). Cysteine has been shown to reduce NF-κB activation and inhibitor κBα (IκBα) degradation in human coronary arterial endothelial cells stimulated with TNF-α. (Hasegawa S, (2012). Cysteine, histidine and glycine exhibit anti-inflammatory effects in human coronary arterial endothelial cells. Clin Exp Immunol. 167(2):269-74.) L-cysteine administration aids in restoring gut immune homeostasis by attenuating inflammatory responses and restores susceptibility of activated immune cells to apoptosis. (Kim C J, (2009). L-cysteine supplementation attenuates local inflammation and restores gut homeostasis in a porcine model of colitis. Biochim Biophys Acta. 1790(10):1161-9.) Thus, the gastrointestinal delivery of cysteine in cysteine-containing nutritive polypeptides is useful for prevention of gut inflammation, and for the reduction of gut inflammation and sequelae thereof.

[0302] Nutritive Polypeptides for Maintaining and Increasing Muscle Mass, Strength and Performance

[0303] Provided are nutritive polypeptides, and compositions and formulations containing nutritive polypeptides, which are useful for maintaining and increasing muscle mass, strength and performance as well as the treatment and prevention of muscle wasting diseases. The nutritive polypeptides are also useful for treating and preventing loss of muscle mass and muscle function in a subject. Moreover, the nutritive polypeptides are further useful for reducing or preventing a side effect (meaning a secondary effect, usually undesirable, of a pharmaceutical agent or medical treatment) of therapeutic or prophylactic regimens for diseases, as such regimens may result in decreased amino acid availability to the subject, in addition to causing loss of muscle mass and muscle function. In addition, the nutritive polypeptides are useful to treat and prevent muscle wasting as a result of injury or other non-disease conditions that result in muscle wasting.

[0304] Nutritive Polypeptides for Prevention and Reduction of Tumorigenesis, Cancer Cell Proliferation and Invasion, and Methods of Production and Use Thereof in Cancer Treatment, and for Maintaining and Increasing Muscle Mass, Strength and Performance During Cancer Treatment

[0305] Cancer includes uncontrolled growth of abnormal cells that have undergone a metabolic change due to genetic defect or imbalance of progrowth and antigrowth factors. Cancer is a global issue: over 13 million cancer cases were reported in 2012 and it is a leading cause of mortality worldwide, causing the death of 8.2 million individuals in 2012 (See, e.g., de Martel C, Global burden of cancers attributable to infections in 2008: a review and synthetic analysis. The Lancet Oncology (2012) 13: 607-615). Highly lethal forms of malignancy include cancers of the lung, liver, stomach, colon, breast, and esophagus.

[0306] While cancer is caused and exacerbated by a variety of factors, both inherited (genetic) and external, some major risk factors include tobacco use, obesity, poor diet, alcohol consumption, certain infections (hepatitis, human papillomavirus), pollutant and ionizing radiation exposure (Cancer Fact sheet No. 297. World Health Organization. February 2014). During oncogenesis, these pro-cancer factors ultimately result in genetic changes to individual cells in the exposed tissue that results in uncontrolled growth and tumor development.

[0307] Cellular metabolism is substantially altered during oncogenesis and malignant tumor growth. In order to support constant growth and division, cancer cells uniquely rely on a number of metabolic pathways to shunt nutrients into the development of additional cellular material and meet their augmented energetic needs (See, e.g., Galluzzi, (2013), Nature reviews. Drug discovery: 12: 829-46). In many cases, these pathways are important to cancerous versus noncancerous cells, and the ability to differentially modulate such pathways offers a means to selectively affect cancer vs healthy tissue. Specifically, the metabolic auxotrophies of certain cancer cells can be exploited through metabolite starvation or overexposure, which can slow or prevent tumor growth.

[0308] Provided are nutritive polypeptides, and compositions and formulations containing nutritive polypeptides, which are useful for prevention and reduction of tumorigenesis, cancer cell proliferation and invasion, and methods of production and use thereof in cancer treatment. The nutritive polypeptides are also useful for treating and preventing loss of muscle mass and muscle function in a subject, particularly a subject undergoing cancer treatment. Moreover, the nutritive polypeptides are further useful for reducing or preventing a side effect (meaning a secondary effect, usually undesirable, of a pharmaceutical agent or medical treatment) of therapeutic or prophylactic regimens for cancer treatment such as chemotherapy and radiation therapy, as such therapeutic regimens result in decreased amino acid availability to the subject, in addition to causing loss of muscle mass and muscle function.

[0309] Cancer and tumor cells have a disproportionate requirement for certain amino acids as compared to non-cancer cells (Galluzzi, (2013) Nature reviews. Drug discovery: 12: 829-46). For example, serine and glycine play essential roles in mammalian metabolism including protein synthesis, de novo synthesis of nucleotides, methylation of DNA and polyamine synthesis (J. W. Locasale (2013) Nature reviews. Cancer: 13: 572-83). Certain tumor cells exhibit dependence on serine and glycine for survival and proliferation, due to amplification, deletions, polymorphisms or alterations in expression of genes in the serine and glycine metabolic pathways, while normal cells are less sensitive to starvation of serine and glycine (J. Locasale & Cantley, 2011, Cell Cycle: 10: 3812-3813)(Labuschagne, van den Broek, Mackay, Vousden, & Maddocks, 2014, Cell reports: 7: 1248-58)(Zhang et al., 2012, Cell: 148: 259-72). Certain tumor cells exhibit dependence on methionine for survival and proliferation, due to deletions, polymorphisms or alterations in expression of genes in the methionine de novo and salvage pathways (Cavuoto & Fenech, 2012, Cancer treatment reviews: 38: 726-36), while normal cells are not sensitive to methionine starvation (Kreis & Goodenow, 1978, Cancer Res: 38: 2259-2262). Certain tumor cells exhibit dependence on arginine due to deficient utilization of citrulline or arginosuccinate (Currie and Basham 1978)(Wheatley & Campbell, 2003, British journal of cancer: 89: 573-6). Certain tumor cells exhibit dependence on glutamine for survival and proliferation, due to upregulation of glutaminases (Hensley, 2013a, Journal of Clinical Investigation: 123: 3678-3684)(Hensley, 2013b, Journal of Clinical Investigation: 123: 3678-3684)(Yang et al., 2014, Molecular systems biology: 10: 728). Therefore, restriction of serine, glycine, methionine, arginine, and glutamine within a protein diet can limit tumor cell growth.

[0310] Selective inhibition of the proliferation of serine and glycine dependent cancer cells has been demonstrated using media deficient in serine and glycine (Maddocks et al., 2013, Nature: 493: 542-6), and animal studies utilizing a serine and glycine restricted diet show inhibition of cancer growth and extension of life-span (Labuschagne et al., 2014, Cell reports: 7: 1248-58). Selective killing of methionine dependent cancer cells in co-culture with normal cells has been demonstrated using media deficient in methionine, and animal studies utilizing a methionine restricted diet show inhibition of cancer growth and extension of life-span (Cavuoto & Fenech, 2012, Cancer treatment reviews: 38: 726-36). Moreover, homocysteine supplementation selectively rescues normal cells from the toxicity of methionine starvation while tumor cells fail to utilize homocysteine and strictly rely on methionine (Kreis & Goodenow, 1978, Cancer Res: 38: 2259-2262). Glutamine is a key mitochondrial substrate required for TCA cycle, and several approaches have been taken to target glutamine dependence of cancers in clinical trials (Wise & Thompson, 2010, Trends in Biochemical Sciences: 35: 427-433). One of the approaches is glutamine depletion by the use of L-asparaginase which degrades both asparagine and glutamine (Avramis & Panosyan, 2005, Clinical Pharmacokinetics: 44: 367-393). Arginine deprivation by arginase or arginine deaminase shows promising anti-cancer effects in clinical trials (Phillips, Sheaff, & Szlosarek, 2013, Cancer Res Treat: 45: 251-262).

[0311] Nutritive Polypeptides for Prevention and Treatment of Diabetes and Obesity, and Methods of Production and Use Thereof in Glucose and Caloric Control

[0312] Provided are nutritive polypeptides, and compositions and formulations containing nutritive polypeptides, which are useful for prevention and treatment of diabetes and obesity, and methods of production and use thereof in use thereof in glucose and caloric control. The nutritive polypeptides are also useful for treating and preventing loss of muscle mass and muscle function in a subject, particularly a subject undergoing treatment for diabetes, or in weight management treatments. Moreover, the nutritive polypeptides are further useful for reducing or preventing a side effect (meaning a secondary effect, usually undesirable, of a pharmaceutical agent or medical treatment) of therapeutic or prophylactic regimens for diabetes treatment, as such regimens may result in decreased amino acid availability to the subject, in addition to causing loss of muscle mass and muscle function.

[0313] It has been shown that brown fat deposits in adult humans are composed of a combination of brown and beige adipocytes (See Wu, Jun, et al. “Beige adipocytes are a distinct type of thermogenic fat cell in mouse and human.” Cell 150.2 (2012): 366-376). Brown fat generates heat via the mitochondrial uncoupling protein UCP1, defending against hypothermia and obesity. Beige adipocytes are white fat cells that switch into brown fat-like under specific stimulation (cold and exercise). The phenomenon of white fat “browning” is the process by which white adipose tissue depots acquire thermogenic, fat-burning properties, and is characterized by a significant increase in the gene expression of uncoupling protein UCP1. Initially, beige adipocytes have extremely low basal expression of UCP1, similar to white adipocytes, but they respond to cyclic AMP stimulation with high UCP1 expression and respiration rates, similar to brown adipocytes. UCP1 is a transmembrane protein located in the inner membrane of the mitochondria that plays a major role in dissipating energy as heat instead of ATP. Restricted to brown or beige adipocytes, it provides a unique mechanism to generate heat by non-shivering thermogenesis. In vivo, prolonged cold exposure or exercises (adrenergic stimulation) turn on high levels of UCP1 expression. In vitro, cold treatment, electric pulses, beta3-adrenergic (epinephrine and norepinephrine) or retinoic acid, the active metabolite of vitamin A, stimulate UCP1 expression.

[0314] When muscles are contracting, PGC-1α (Peroxisome proliferator-activated receptor gamma coactivator 1-alpha), a transcriptional activator that regulates mitochondrial biogenesis and respiration, is activated. The increased levels of PGC-1α in muscle cells controls an extensive set of metabolic programs by binding to nuclear receptors and transcriptional factors. For example, PGC-1α induces the type I membrane protein FNDC5, which is cleaved to form the myokine hormone irisin. Once in circulation, irisin acts on WA and induces the expression of UCP1 and other brown adipose associated genes. Both irisin and α-aminoisobutyric acid (BAIBA), a metabolite of valine secreted from skeletal muscles, have been identified as agents involved in the conversion of white adipocytes (WA) into beige adipocytes (BeA), and both are expressed and released by skeletal muscle fibers during physical activity (Bostrom, Pontus, et al. “A PGC1-[agr]-dependent myokine that drives brown-fat-like development of white fat and thermogenesis.” Nature 481.7382 (2012): 463-468; Roberts L. D. et al. B-Aminoisobutyric Acid Induces Browning of White Fat and Hepatic B-oxidation and Is Inversely Correlated with Cardiometabolic Risk Factors. Cell Metab. (2014) 19: 96-108).

[0315] PGC1-α is a downstream target of the mammalian target of rapamycin (mTOR) pathway (Cunningham, J. T., et al. mTOR controls mitochondrial oxidative function through a YY1-PGC-1alpha transcriptional complex. Nature (2007) 450: 736-740.). This pathway is controlled by the checkpoint protein kinase mTOR complex I, a multiprotein assembly that when activated, turns on a large number of growth factors that control the expression of protein synthesis machinery, mitochondrial biogenesis, as well as de novo lipogenesis (Laplante M., Sabatini D. M. mTOR Signaling in Growth Control and Disease. Cell (2009) 149: 274-292.). It has been shown that the mTOR pathway is activated via sensing of essential amino acids, with leucine playing a direct role in controlling mTORC1 cellular localization (Han J. M., et al. Leucyl-tRNA synthetase is an intracellular leucine sensor for the mTORC-1 signaling pathway. Cell (2012) 149: 410-424. Bonfils G. et al. Leucyl-tRNA synthetase controls TORC1 via the EGO complex. Mol. Cell (2012) 46: 105-110.). Consistent with this picture, recent studies have shown that PGC1-α gene expression is induced after leucine treatment in C2C12 cells (Sun, Xiaocun, and Michael B. Zemel. “Leucine modulation of mitochondrial mass and oxygen consumption in skeletal muscle cells and adipocytes.” Nutr Metab (Lond) 6 (2009): 26.).

[0316] Leucine is also important for induction of satiety. It has been shown that leucine induced activation of the mTORC1 complex in the hypothalamus, which is concomitant with decreases food intake and body weight (Cota D. et al. Hypothalamic mTOR Signaling Regulates Food Intake. Science. (2006) 312: 927-930). Leucine-containing nutritive polypeptides are formulated to induce satiety and/or satiation in a human or other mammal after oral administration.

[0317] Nutritive Polypeptides for Increasing Renal Function and Treatment and Prevention of Renal Diseases

[0318] Provided are nutritive polypeptides, and compositions and formulations containing nutritive polypeptides, which are useful for increasing renal function and treatment and prevention of renal diseases. The nutritive polypeptides are also useful for treating and preventing loss of muscle mass and muscle function in a subject, particularly a subject undergoing treatment for a renal disease. Moreover, the nutritive polypeptides are further useful for reducing or preventing a side effect (meaning a secondary effect, usually undesirable, of a pharmaceutical agent or medical treatment) of therapeutic or prophylactic regimens for renal disease treatment, as such regimens may result in decreased amino acid availability to the subject, in addition to causing loss of muscle mass and muscle function.

[0319] Provided are nutritive polypeptides, and compositions and formulations containing nutritive polypeptides, which are useful for the treatment and prevention of kidney diseases, particularly those suffering from chronic kidney disease (CKD) and urea cycle disorders. As used herein, a “chronic kidney disease” includes any pathological condition such that one or both of a subject's kidneys are damaged and cannot filter blood comparable to a healthy kidney. A “urea cycle disorder” includes any deficiency in one or more of the enzymes or transporters that are involved in the urea cycle.

[0320] The CDC estimates that more than 10% of adults in the United States may have CKD, of varying levels of seriousness (CDC, US Department of Health and Human Services, Centers for Disease Control and Prevention (2014)). The likelihood of having CKD increases with age and is most common among adults older than 70 years. Deterioration of the kidneys leads to kidney failure, a type of CKD where waste is no longer effectively removed from the blood. Kidney failure is also called end-stage renal disease (ESRD). In 2011, 113,136 patients in the United States started treatment for end stage renal disease. Health related consequences of CKD are swelling in the arms and legs, high blood pressure, pulmonary edema, pericarditis, hyperkalemia, weakened bone strength, anemia, weakened immune system, depression, and malnourishment. A reduction or prevention of each of these consequences is useful to demonstrate efficacious treatment using nutritive polypeptides.

[0321] Exemplary kidney diseases include Alport Syndrome, Diabetic Nephropathy, Fabry Disease, Focal Segmental Glomerulosclerosis, Glomerulonephritis, IgA Nephropathy, Kidney Stones, Minimal Change Disease, Nephrotic Syndrome, and Polycystic Kidney Disease.

[0322] Exemplary urea cycle disorders include NAGS deficiency, Carbamoylphosphate synthetase I deficiency, Ornithine transcarbamylase deficiency, Citrullinemia type I, Argininosuccinic aciduria, Arginase deficiency, Ornithine Translocase Deficiency, (Summar, et al. GeneClinics: Medical Genetics Knowledge Base. Seattle, University of Washington (2005)).

[0323] Subjects with CKD undergo damage to the kidneys that results in decreased kidney function, and as kidney function deteriorates, waste products build to high levels in blood and diminish health. Complications associated with chronic kidney disease include high blood pressure, anemia (low blood count), weak bones, poor nutritional health and nerve damage. As a result, subjects have an increased risk of having heart and blood vessel disease. Maintaining subject and kidney health prevents or slows progression of disease to kidney failure, which requires dialysis or a kidney transplant to maintain life. As a result of inadequate metabolic and nutritional status, high mortality and morbidity rates remain prevalent in patients suffering from CKD, particularly in those with ESRD receiving dialysis. This altered status, deemed protein energy wasting (PEW), is often caused by inadequate dietary protein intake and amino acid utilization, and has a significant effect on subject mortality rate. Dialysis depletes the body of amino acids, and the compromised kidneys alter amino acid homeostasis in the human body. PEW generally results in loss of muscle and protein stores, compounding the effects of renal disease. To limit the effects of PEW, attempts have been made to optimize dietary nutrient intake, and provide appropriate treatment of metabolic disturbances such as metabolic acidosis, systemic inflammation, and hormonal deficiencies, and optimized dialytic regimens. (See, e.g., Ikizler, T. et al. Kidney international 84.6 (2013): 1096-1107). In patients where oral dietary intake is insufficient, enteral or parenteral nutrition supplementation is required to replenish protein and energy stores. A nutritional polypeptide formulation as described herein, provides a effective composition and formulation to prevent and treat PEW. These treatments are beneficially combined with exercise.

[0324] Uremic toxicity, where excess nitrogenous waste products exist in circulation often occurs in CKD and, must be monitored. CKD patients are sometimes placed on a low protein diet to prevent uremic toxicity. Urea, the main nitrogenous metabolite from ingestion of protein, may or may not be toxic alone, and can serve as an indicator of accumulation of other toxins as a consequence of altered renal function.

[0325] CKD patients are known to have abnormal amino acid profiles in serum, in particular, low levels of essential amino acids (EAAs) and branched chain amino acids (BCAAs). For example, Kim et. al. report lower serum BCAAs levels in ESRD dialysis patients compared to a control group. More specifically, lower levels of serine, tyrosine and lysine as well as the BCAAs-valine, leucine and isoleucine have been reported (Kim, D. H. Kor. Journ. Int. Med. 1998. 13(1): 33-40). Therefore, BCAA-enriched nutritive polypeptides and/or EAA-enriched nutritive polypeptides are of particular utility for patients with CKD.

[0326] Moreover, it has been shown that supplementation of free BCAAs in the diet can improve the nutritional status and appetite of dialysis patients. (Hiroshige, K. Nephr. Dial. Transplant. 2001. 16:1856-62). Levels of BCAAs were normalized by 12 g/day oral supplements. Nutritive polypeptides high in BCAAs are an effective treatment for patients compromised by renal disease. PEW can be remedied by restoring the specific amino acids lost by dialysis and diminished metabolic function by nutritive polypeptide administration while diminishing stress on an already compromised patient. A nutritive polypeptide selected for improving the status of ESRD patients, particularly those with PEW, delivers effective combinations of amino acids at a beneficial quantity, and in a formulation that results in high compliance. Specifically, a nutritive polypeptide high in BCAAs satisfies these requirements. Optionally, the nutritive polypeptide is low in glutamine and glutamic acid content, since patients with renal disease do not efficiently excrete ammonia, a by-product of glutamic acid and glutamine metabolism. Accumulation of ammonia in the blood, also known as hyperammonemia, is a dangerous condition that may lead to death (See, e.g., Sacks, G. S. Ann. Pharmacol. 1999. 33:348-354).

[0327] Uremic toxicity, where excess nitrogenous waste products exist in circulation, is prevalent in CKD and should be monitored. In order to prevent uremic toxicity, nutritive formulations are administered to CKD subjects; currently, CKD patients are sometimes placed on a low protein diet to prevent uremic toxicity, which results in decreased amino acid availability, muscle loss, and other effects of decreased amino acid levels. Urea, the main nitrogenous metabolite from ingestion of protein, is a useful indicator of accumulation of other toxins as a consequence of altered renal function. Thus, a nutritive polypeptide is able to deliver amino acids effectively to meet a subject's nutritional needs, while diminishing risks of these side effects. In particular, a high BCAA protein satisfies these requirements. Whereas some ESRD patients are placed on a low protein diet, in contrast, dialysis patients are placed on a high protein diet due to loss of amino acids that occur during the dialysis process. Hyperphosphatemia is a complication of a poorly optimized high protein diet, where high phosphorous levels from food can become toxic in individuals with CKD (Mandayam, S. Nephrology. 2006. 11:53-57). Even mild increases in serum phosphorous levels increased mortality rates in CKD patients (Kestenbaum, B. J. Am. Soc. Nephrol. 2005. 16: 520-28). A nutritive polypeptide is advantageous in CKD, as it counteracts the loss of amino acids, while sparing the kidneys of extraneous dietary phosphorous.

[0328] Patients with urea cycle disorders have genetic mutations that result in a deficiency of one of the enzymes or transporters that are involved in the urea cycle, which are responsible for removing ammonia from the blood. Disrupting the urea cycle limits the removal of nitrogen from the blood by converting it into urea and transferring to the urine. The accumulation of nitrogen in the blood causes an increase in ammonia (hyperammonemia). Ammonia is highly toxic and can cause irreversible brain damage, coma, and possibly death. In some embodiments, the nutritive polypeptides provided herein are useful to lower creatinine and urine osmolality.

[0329] Urea cycle disorder (UCD) patients are treated or symptoms prevented by administration of nutritive polypeptides. The urea cycle is the main nitrogenous waste disposal pathway in humans. UCD is a hereditary disorder caused by deficiency of one or more enzymes in the cycle, ultimately resulting in hyperammonemia. UCD patients present low BCAA serum levels. (Boneh, A. Mol. Genet. Metab. 2014. S1096-7192). Disruption of the normal urea cycle causes diminished synthesis of arginine, normally a nonessential amino acid (Leonard, J. V. Journ. Pediatrics. 2001. 138(1):540-45). Arginine plays a major role in the urea cycle. The synthetic pathway of arginine interacts closely with the urea cycle enzymes in the liver and kidneys, and is made from ornithine via citrulline (Barbul A. J Parenter Enteral Nutr. 1986. 10: 227-238). Citrulline and ornithine are required to be supplemented in UCD patients; however, they are not found in natural proteins and are not generally present in nutritive polypeptides. A nutritive polypeptide indicated for urea cycle disorders contains high levels of BCAAs and arginine. Supplementation of glutamine and glutamic acid produces the nitrogenous waste product ammonia, so a nutritive polypeptide useful for UCD is generally low in these amino acids. A nutritive polypeptide provides an optimized therapy for UCD patients, as it can deliver essential amino acids such as the BCAAs, as well as arginine, without delivering excess free amino acids.

[0330] Amino Acid Pharmacology.

[0331] Amino acids are organic molecules containing both amino and acid groups. All amino acids have asymmetric carbon except for glycine and all protein amino acids, except proline, have an alpha-carbon bound to a carboxyl group and a primary amino group.

[0332] Amino acids exhibit a diverse range of biochemical properties and biological function due to their varying side chains. They are stable in solution at physiological pH, save for glutamine and cysteine. In the context of some proteins, conditional upon the host and translational machinery, amino acids can undergo post-translational modification. This can have significant effects on their bioavailability, metabolic function, and bioactivity in vivo. Sugar moieties appended to proteins post-translationally may reduce the usefulness of the nutritive proteins by affecting the gastrointestinal release of amino acids and embedded peptides. A comparison of digestion of glycosylated and non-glycosylated forms of the same proteins shows that the non-glycosylated forms are digested more quickly than the glycosylated forms (our data).

[0333] Although over 300 amino acids exist in nature, 20 serve as building blocks in protein. Non-protein alpha-AAs and non-alpha AAs are direct products of these 20 protein amino acids and play significant roles in cell metabolism. Due to the metabolic reactions of amino acid catabolism that drive the interconversion between amino acids, a subset of 11 of the 20 standard protein amino acids are considered non-essential for humans because they can be synthesized from other metabolites (amino acids, ketones, etc.) in the body: Alanine; Arginine; Asparagine; Aspartic acid; Cysteine; Glutamic acid; Glutamine; Glycine; Proline; Serine; and Tyrosine.

[0334] Arginine, cysteine, glycine, glutamine, histidine, proline, serine and tyrosine are considered conditionally essential, as they are not normally used in the diet, and are not synthesized in adequate amounts in specific populations to meet optimal needs where rates of utilization are higher than rates of synthesis. Functional needs such as reproduction, disease prevention, or metabolic abnormalities, however, can be taken into account when considering whether an amino acid is truly non-essential or can be conditionally essential in a population. The other 9 protein amino acids, termed essential amino acids, are taken as food because their carbon skeletons are not synthesized de novo by the body to meet optimal metabolic requirements: Histidine; Isoleucine; Leucine; Lysine; Methionine; Phenylalanine; Threonine; Tryptophan; and Valine.

[0335] All 20 protein amino acids (and non-protein metabolites) are used for normal cell functionality, and shifts in metabolism driven by changing availability of a single amino acid can affect whole body homeostasis and growth. Additionally, amino acids function as signaling molecules and regulators of key metabolic pathways used for maintenance, growth, reproduction, immunity.

[0336] In the body skeletal muscle represents the largest store of both free and protein-bound amino acids due to its large composition of body mass (around 40-45%). The small intestine is another important site for amino acid catabolism, governing the first pass metabolism and entry of dietary amino acids into the portal vein and into the peripheral plasma. 30-50% of EAA in the diet may be catabolized by the small intestine in first-pass metabolism. The high activity of BCAA transaminases in the intestinal mucosa leads to BCAA conversion to branched-chain alpha-ketoacids to provide energy for enterocytes similar as is done in skeletal muscle. Differences in physiological state of muscle and small intestine metabolism have large implications on amino acid biology systemically across tissues in humans.

[0337] Amino acids can exist in both L- and D-isoforms, except for glycine (non-chiral). Almost all amino acids in proteins exist in the L-isoform, except for cysteine (D-cys) due to its sulfur atom at the second position of the side-chain, unless otherwise enzymatically postranslationally modified or chemically treated for storing or cooking purposes. Most D-amino acids, except for D-arg, D-cys, D-his, D-lys, and D-thr, can be converted into the L chirality by D-AA oxidases and transaminases. In order to be catabolized, these D enantiomers are transported across the plasma and other biological membranes and undergo D-oxidation or deaminate the amino acid to convert to its alpha-ketoacid or racemization to convert the D-AA to its L-isoform. The transport of D-isomers is limited by a lower affinity of L-AA transporters to D-AAs. For this reason the efficiency of D-AA utilization, on a molar basis of the L-isomer, can range from 20-100% depending on the amino acid and the species.

[0338] Alanine:

[0339] Alanine is a glucogenic non-essential amino acid due to its ability to be synthesized in muscle cells from BCAAs and pyruvate as part of the glucose-alanine cycle. This involves a tightly regulated process by which skeletal muscle frees energy from protein stores for the generation of glucose distally in the liver for use by extrahepatic cells (including immunocytes) and tissues. The resulting stimulation of gluconeogenesis provides a source of energy in the form of glucose during periods of food deprivation. Alanine becomes a very sensitive intermediary to balance the utilization of BCAAs in the muscle for protein production and generation of available energy through gluconeogenesis in the liver. Furthermore, the alanine induction of gluconeogenesis is integral to support the function of many tissues, not limited to muscle, liver, and immunocytes. Beyond acting as simply an intermediate, however, it also directly regulates activity of a key enzyme in this energy balance, pyruvate kinase. Alanine has the ability to inhibit pyruvate kinase by facilitating its phosphorylation, slowing glycolysis and driving the reverse reaction of pyruvate to phosphoenolpyruvate (PEP) for initiation of gluconeogenesis.

[0340] High Alanine

[0341] A lack of ATP-producing substrates, as occurs in a fasted state, can lead to autophagy and the turnover of intracellular protein in the lysosome to provide an energy source. Low levels of the glucogenic amino acids, including alanine can stimulate hepatic autophagy, leading to degradation of liver function.

[0342] Beta-cells show increased autophagy when under high fat diet feeding as a response to increased demand for insulin production and protein turnover as the body reacts to rising plasma glucose concentrations. This progression towards increased insulin production in obesity is an early marker for pre-diabetes, an indicator of insulin resistance, and a risk factor for the deterioration of islet beta cell functionality which eventually leads to the onset of diabetes in overweight individuals. The ability to regulate alanine levels via nutrition may provide a powerful lever for shifting hepatic and beta cell autophagy to perturb impaired insulin metabolism in overweight individuals.

[0343] Alanine directly produces beta-alanine, important to the biosynthesis of panthothenic acid (vitamin b5), coenzyme A, and carnosine (or which it is the rate-limiting precursor). Carnosine, as well as other beta-alanine derived di-peptides (which don't incorporate into proteins) carcinine, anserine, and balenine act as antioxidant buffers in the muscle tissue, constituting up to 20% of the buffer capacity in type I and II muscle fibres. This buffering is important for maintaining tissue pH in muscle during the breakdown of glycogen to lactic acid. In weight loss/gain trials in college athletes, supplementation with beta-alanine was shown to prevent loss of lean mass in weight loss and larger increases in lean mass during weight gain compared to placebo. Beta-alanine is also implicated in decreasing fatigue and increasing muscular work done.

[0344] Carnosine is an antioxidant and transition metal ion-sequestering agent. It acts as an anti-glycating agent by inhibiting the formation of advanced glycation end products (AGEs). AGEs are prevalent in diabetic vasculature and contribute to the development of atherosclerosis. The presence of AGEs in various cells types affect both the extracellular and intracellular structure and function. (Golden, A. et. al. Advanced Glycosylation End Products, Circulation 2006). Also, the accumulation of AGEs in the brain is a characteristic of aging and degeneration, particularly in Alzheimer's disease. AGE accumulation explains many neuropathological and biochemical features of Alzheimer's disease such as protein crosslinking, oxidative stress, and neuronal cell death. Because of its combination of antioxidant and antiglycating properties, carnosine is able to diminish cellular oxidative stress and inhibit the intracellular formation of reactive oxygen species and reactive nitrogen species.

[0345] Low Alanine

[0346] In states of obesity and diabetes, animals have been shown to exhibit reduced hepatic autophagy, leading to increased insulin resistance. Autophagy is important for maintenance of the ER and cellular homeostasis, which when stressed can lead to impaired insulin sensitivity. High fat diet feeding in animal models stresses the ER, while leading to depressed hepatic autophagy through over-stimulation of mTORC1, which reinforces the progression towards insulin sensitivity impaired beta cell function in diabetes. Reducing the level of systemic Alanine provides an opportunity to lower mTORC1 activity and restore healthy levels of autophagy.

[0347] Arginine:

[0348] Arginine is a glucogenic non-essential amino acid, which can be synthesized via glutamate, aspartate, glutamine, and proline. It is produced by the mammalian small intestine via oxidation of glutamate, glutamine, and aspartate, which generates ornithine, citrulline, arginine, and alanine. It can also be produced (along with ornithine and citrulline) via the proline oxidase pathway from active degradation of proline in enterocytes. Arginine is converted from citrulline released into circulation by the enterocytes in the kidneys and some endothelial cells (leukocytes and smooth muscle). Newborns utilize most of the free citrulline locally in the small intestine for arginine synthesis rather than systemic release. Arginine and proline oxidation is constrained to the mucosa due to reduced activity of pyrroline-5-carboxylate dehydrogenase across the other tissues.

[0349] High Arginine

[0350] Citrulline is produced from arginine as a by-product of a reaction catalyzed by the NOS family. Dietary supplement of either arginine or citrulline is known to reduce plasma levels of glucose, homocysteine, and asymmetric dimethylarginine, which are risk factors for metabolic syndrome. L-citrulline accelerates the removal of lactic acid from muscles, likely due to the affects on vascular tone and endothelial function. Recent studies have also shown that L-citrulline from watermelon juice provides greater recovery from exercise, and less soreness the next day. It also appears that delivery of L-citrulline as a free form results in less uptake into cells in vitro than in the context of watermelon juice (which contains high levels of L-citrulline). This suggests an opportunity to deliver peptide doses, which can traffic arginine into muscle tissue for conversion into citrulline by eNOS at the endothelial membrane for improved efficacy.

[0351] Arginine is a highly functional amino acid implicated in many signaling pathways and as a direct precursor of nitric oxide (NO), which facilitates systemic signaling between tissues and regulation of nutrient metabolism and immune function. NO is important for normal endothelial function and cardiovascular health (including vascular tone, hemodynamics, and angiogenesis). Arginine stimulates insulin secretion by directly depolarizing the plasma membrane of the (3 cell, leading to the influx of Ca′ and subsequent insulin exocytosis.

[0352] Arginine supplementation was shown to improve endothelium-dependent relaxation, an indicator of cardiovascular function in type I and type II models of diabetes mellitus. Notably, arginine supplementation reduced white adipose tissue but increased brown fat mass in Zucker diabetic rats and diet-induced obese rats. Arginine and/or its metabolites may enhance the proliferation, differentiation, and function of brown adipocytes. In addition, both skeletal muscle mass and whole body insulin sensitivity were enhanced in response to arginine supplementation via mechanisms involving increases in muscle mTOR and NO signaling. Surprisingly, long-term oral administration of arginine decreased fat mass in adult obese humans with type II diabetes (Lucotti et al 2006). Moreover, supplementation with arginine to a conventional corn- and soybean-based diet reduced fat accretion and promoted protein deposition in the whole body of growing-finishing pigs. In a small pilot trial in humans data indicated that defective insulin-mediated vasodilatation in obesity and non-insulin dependent diabetics (NIDDM) can be normalized by intravenous L-arginine; L-arginine also improved insulin sensitivity in healthy subjects, obese patients and NIDDM patients, indicating a possible mechanism that is different from the restoration of insulin-mediated vasodilatation. In addition, a chronic administration of L-arginine improved glucose levels, insulin induced-hepatic glucose production, and insulin sensitivity in type II diabetic patients (Piatti et al 2001). Arginine rich peptides have not been isolated and tested.

[0353] Amino acid administration at high doses (10-20× that available in diet, or 0.1-0.3 g/kg body weight dosed over 20 minutes, via intravenous or oral routes, can stimulate hormone secretion from the gut via endocrine cells. Arginine is a well-studied secretagogue that can stimulate the systemic release of insulin, growth hormone, prolactin, glucagon, progesterone, and placental lactogen. This biology has direct implications on both digestive biology and the absorption of nutrients present in the intestine, as well as affecting energy balance by triggering satiety signals mediated by endocrine hormones. The ability to modulate these hormones provides a therapeutic opportunity for decreasing caloric intake in metabolic disorders such as obesity or alternatively triggering appetite in muscle wasting, sarcopenia, and cachexia, as well as by shifting insulin sensitivity in the onset of diabetes.

[0354] Arginine is an important signaling molecule for stimulating mTOR1 phosphorylation in a cell-specific manner. This regulates cellular protein turnover (autophagy) and integrates insulin-like growth signals to protein synthesis initiation across tissues. This biology has been directly linked to biogenesis of lean tissue mass in skeletal muscle, metabolic shifts in disease states of obesity and insulin resistance, and aging. It is also a central signaling pathway which can be hijacked for the proliferation of fast-growing cancer cells.

[0355] There is evidence for Arginine increasing levels of protein synthesis in the small intestine under catabolic states such as viral infection and malnutrition, where amino acid levels are dramatically shifted from their normal post-absorptive states. Additionally, demonstrated mTOR activation in the intestinal epithelial cells by Arginine provides a mechanism to repair intestinal epithelium by stimulating protein synthesis and cell proliferation. Similar anabolic signaling has been observed in myocytes in response to rising plasma levels of Arginine, leading to increased whole body and skeletal muscle protein synthesis. Arginine is an amino acid maintained at sufficient levels to support the anabolic effects of EAAs. Lysine, Methionine, Threonine, Tryptophan, Leucine, Isoleucine, and Valine have been shown unable to support increased protein synthesis and whole-body growth when added to a 12.7% crude protein diet, indicating a deficiency in the anabolic mediating non-essential amino acids, including Arginine.

[0356] Arginine also up-regulates proteins and enzymes related to mitochondrial biogenesis and substrate oxidation, stimulating metabolism of fatty acid stores and reducing fat tissue mass. Supplementation of dietary Arginine provides a therapeutic benefit in obese and pre-diabetic populations who suffer from insulin resistance due to their increased caloric intake. Likewise, the ability to stimulate mitochondrial biogenesis has direct implications in aging and the ability to regenerate functional proteins and healthy cells subject to oxidative stress.

[0357] It is established that dietary deficiency of protein reduces the availability of most amino acids, including Arginine despite it not being considered essential. Arginine deficiency is known to cause decreases in sperm counts by 90% after 9 days, increasing the proportion of non-motile sperm by a factor of 10. Arginine supplementation has been demonstrated in animals to increase levels of Arginine, Proline, Ornithine, and other Arginine metabolites such as Polyamines in seminal fluid, corresponding with increased sperm counts and sperm motility. Changes in NO synthesis and polyamines (via), likewise are seen during gestation when placental growth rate peaks, indicating a role for Arginine in fetal development during pregnancy. In uterine fluids during early gestation, Arginine levels also decrease in response to expression of specific amino acid transporters at the embryo. Arginine supplementation to the diet of animals during early gestation has shown embryonic survival and increase in litter size, indicating a significant potential for delivering high levels of arginine during pregnancy.

[0358] Arginine has an extensively studied effect on enhancing immune function, based on direct effects on NO production (which can potentiate a phagocyte's killing ability), hormonal secretagogue activity, and stimulation of mTOR. Proline catabolism by proline oxidase is known to have high levels of activity in the placentae and small intestine of mammals. This activity points to a crucial role for Arginine in gut and placentae immunity, both through generation of H₂O₂, which is cytotoxic to pathogenic bacteria, and synthesis of arginine. In critically injured patients leukocyte count normalizes more quickly after 6 days of Arginine enriched diet, with recovery to normal TNF response after 10 days (100% improvement). A clinical study in 296 surgery, trauma, or sepsis patients examining Arginine enriched (12.5 g/L Arginine) formulation vs enteral formula indicates highly reduced hospital stay (8-10 days) and major reduction in frequency of acquired infections. A separate clinical study of 181 septic patients fed Arginine enriched (12.5 g/L Arginine) vs. enteral formula show significantly reduced bacteremia (8% vs 22%), nosocomial infection (6% vs 20%).

[0359] Arginine is also a key substrate for the synthesis of collagen. Oral supplementation of arginine enhances wound healing and lymphocyte immune response in healthy subjects. A 2.4× increase in collagen deposition was observe at wound sites (24 nmol/cm vs. 10.1 nmol/cm), along with increased lymphocyte proliferation vs. control.

[0360] Arginine is an allosteric activator of N-acetylglutamate synthase, an enzyme which converts glutamate and acetyl-CoA into N-acetylglutamate in the mitochondria. This pushes the hepatic urea cycle towards the active state, useful for ammonia detoxification. This means that dietary delivery of nutrients with low doses of arginine may be useful in the context of kidney disease, where patients struggle to clear urea from their circulation. Elimination of arginine to limit uremia from the available nitrogen sources, while being able to maintain a limited protein intake to prevent tissue catabolism, is a novel strategy against a disruptive nutritional consequence of kidney disease.

[0361] Arginine up-regulates the activity of GTP cyclohydrolase-I, freeing tetrahydrobiopterin (THB) for NO synthesis and the hydroxylation of aromatic amino acids (ArAAs) by aromatic amino acid hydroxylase (AAAH). For this reason, delivery of high levels of Arginine to raise cellular levels of THB directly stimulates the biosynthesis of many neurotransmitters in the CNS capillary endothelial cells. ArAAs serve as precursors for biosynthesis of monoamine neurotransmitters, including melatonin, dopamine, norepinephrine (noradrenaline), and epinephrine (adrenaline).

[0362] Low Arginine

[0363] Excessive arginine intake, stimulating production of high levels of NO in the blood can lead to oxidative injury and apoptosis of cells.

[0364] Arginine excess or depletion affects global gene expression in mammalian hepatocytes. Depletion leads to 1419 genes with significantly (p<0.05) altered expression using in-vitro models, of which 56 showed at least 2-fold variation using a 9-way bioinformatics analysis. The majority rise in expression, including multiple growth, survival, and stress-related genes such as GADD45, TA1/LAT1, and caspases 11 and 12. Many are relevant in luminal ER stress response. LDLr, a regulator of cholesterol and steroid biosynthesis, was also modulated in response to arginine depletion. Consistent with Arginine affecting gene expression, dietary arginine supplementation up-regulates anti-oxidative genes and lowers expression of proinflammatory genes in the adipose and small intestinal tissues.

[0365] Lower arginine levels inhibit neurotransmitter biosynthesis, which has shown clinical efficacy in indications such as mania, parkinsons, and dyskenisia.

[0366] Asparagine:

[0367] Asparagine is a glucogenic nonessential amino acid, whose precursor is oxaloacetate (OAA) and which is synthesized via glutamine and aspartate by a transaminase enzyme. It is used for the function of some neoplastic cells such as lymphoblasts.

[0368] Asparagine is typically located at the ends of alpha helices of proteins and provides important sites for N-linked glycosylation to add carbohydrate chains, which affects immune response to amino acid ingestion.

[0369] Acyrlamide is formed by heat-induced reactions between Asparagine and carbonyl groups of glucose and fructose in many plant-derived foods. Acrylamide is an oxidant that can be cytotoxic, cause gene mutations, and generally affect food quality. Compositions with low levels of asparagine are useful in making safer food products that may be subject to cooking or non-refrigerated storage conditions.

[0370] Aspartate:

[0371] Aspartate is a glucogenic nonessential amino acid synthesized via the oxaloacetate (OAA) precursor by a transaminase enzyme. As part of the urea cycle, it can also be produced from ornithine and citrulline (or arginine) as the released fumarate is converted to malate and subsequently recycled to OAA. Aspartate provides a nitrogen atom in the synthesis of inosine, which is the precursor in purine biosynthesis. It is also involved in the synthesis of beta-alanine. Aspartate oxidizes in enterocytes of the small intestine, leading to nitrogeneous products ornithine, citrulline, arginine, and alanine.

[0372] Aspartate is an agonist of NMDA receptors (Glutamate receptors), releasing Ca2+ as a second messenger in many cellular signaling pathways. There are dopaminergic and glutaminergic abnormalities implicated in schitzophrenia, with NMDA antagonists mimicking some positive and negative symptoms of schitzophrenia, while carrying less risk of brain harm than do dopamine agonists. Ketamine and PCP, for example, produce similar phenotypes observed in schitzophrenia, with PCP showing less representative symptomology yet similar brain structure changes. Glutamate receptors have increased function, contributing to the onset of schizophrenia. An increased proportion of post-synaptic glutamate receptors to pre-synaptic glutamate receptors result in increased glutamate signaling. Both agonizing and antagonizing NMDA receptors has shown some benefit in treating Alzheimer's dementia, depending on the MOA and receptor specificity. Thus delivering proteins with either high or low levels of Aspartate, which also as NMDA agonist activity, could be therapeutic for this patient population. Proteins with low levels of Aspartate would likely provide a synergistic benefit along side NMDA antagonists, such as Memantine. Likewise, clinical trials on LY2140023 have demonstrated glutamate-based treatments as having potential for treating schizophrenia without the side effects seen with xenochemical anti-psychotics. Similar studies combining co-agonist glycine with anti-psychotics, showed improved symptomology, suggesting that delivering high doses of Aspartate, also a NMDA agonist, will yield similar therapeutic benefits in this patient population.

[0373] Aspartate is an acidic amino acid, with a low Pka of 3.9. Aspartate in the dipeptide form with phenylalanine via a methyl ester yields aspartame, which is used as a commercial artificial sweetener.

[0374] Cysteine:

[0375] Cysteine is a nonessential amino acid, and is synthesized from homocysteine, which is itself synthesized from the metabolism of methionine. Serine is involved in cysteine's synthesis by condensing with homocysteine to form cystathionine. Cystathionine is then deaminated and hydrolyzed to form cysteine and alpha ketobutyrate. Cysteine's sulfur comes from homocysteine, but the rest of the molecule comes from the initial serine residue. The biosynthesis of cysteine occurs via a different mechanism in plants and prokaryotes. Cysteine is a vital amino acid because it plays an important role in protein folding. The disulfide linkages formed between cysteine residues helps to stabilize the tertiary and quaternary structure of proteins, and these disulfide linkages are most common among the secreted proteins, where proteins are exposed to more oxidizing conditions that are found in the cellular interior. Despite the benefits of homocysteine, having high systemic levels is a risk factor for developing cardiovascular disease. Elevated homocysteine may be caused by a genetic deficiency of cystathionine beta-synthase and excess methionine intake may be another explanation. Control of methionine intake and supplementation with folic acid and vitamin B12 in the diet has been used to lower homocysteine levels. Furthermore, because the availability of cysteine is a key component that limits the synthesis of glutathionine, dietary supplementation with N-acetyl-cysteine, a precursor for cysteine, is highly effective in enhancing immunity under a wide range of disease states.

[0376] Cysteine undergoes rapid oxidation to Cystine. It facilitates the biosynthesis of glutathionine, a powerful antioxidant which can donate a reducing equivalent to unstable molecules such as reactive oxygen species (ROS) free radicals. After reducing an oxidative species, it can form a glutathionine sulfide with another reactive glutathionine, providing a mechanism of depleting oxidative stress inducing molecules from cells (The liver can maintain concentrations of up to 5 mM). Glutathionine is a powerful neutralizer of toxins in the liver, and helps to protect the liver from the damaging effects of toxins. Additionally, this detoxifying ability helps to diminish muscle weakness, prevents brittle hair, and protects against radiation associated with these toxins. As a result, it is beneficial for those suffering from chemical allergies or exposed to high levels of air pollution. Glutathionine also is a cofactor for iNOS, allow maximal synthesis of NO in the arg-NO pathway. NO is important for normal endothelial function and cardiovascular health (including vascular tone, hemodynamics, angiogenesis).

[0377] In addition to being a precursor to glutatithionine, cysteine is a precursor for the H2S, which can induce endothelial-dependent relaxation, and can be further converted to cysteine sulfinate. Cysteine sulfunate can be converted to taurine, which has the ability to decrease methionine uptake. An excess of methionine increases the risks of the development of atherosclerosis by inducing hyperhomocysteinemia because homocysteine is an intermediate between methionine and cysteine. However, it is not known whether cysteine decreases homocysteine directly or through the reduction of methionine (Sebastiaan Wesseling, et al., Hypertension. 2009; 53: 909-911).

[0378] Furthermore, Cysteine is a precursor for Taurine, which modulates the arginine-NO pathway. Taurine has several potentially protective effects. First, taurine has the ability to reduce oxidative stress by binding to hypochlorite. It has been hypothesized that taurine conjugates to mitochondrial transfer RNA, and in so doing, prevents the formation of mitochondrial superoxide. Additionally, taurine inhibits homocysteine-induced stress of the endoplasmic reticulum of vascular smooth muscle cells and thus restores the expression and secretion of extracellular superoxide dismutase.

[0379] Glutamate:

[0380] Glutamate oxidizes in enterocytes of the small intestine, leading to nitrogeneous products ornithine, citrulline, arginine, and alanine. Glutamate also modulates the arginine-NO pathway. NO is important for normal endothelial function and cardiovascular health (including vascular tone, hemodynamics, angiogenesis).

[0381] High Glutamate

[0382] A lack of ATP-producing substrates, as occurs in a fasted state, can lead to autophagy and the turnover of intracellular protein in the lysosome to provide an energy source. Low levels of the glucogenic amino acids, including glutamate can stimulate hepatic autophagy, leading to degradation of liver function.

[0383] Citrulline is produced from Glutamate as a by-product of a reaction catalyzed by the NOS family. Dietary supplement of citrulline is known to reduce plasma levels of glucose, homocysteine, and asymmetric dimethylarginine, which are risk factors for metabolic syndrome. L-citrulline accelerates the removal of lactic acid from muscles, likely due to the effects on vascular tone and endothelial function. Recent studies have also shown that L-citrulline from watermelon juice provides greater recovery from exercise, and less soreness the next day. It also appears that delivery of L-citrulline as a free form results in less uptake into cells in vitro than in the context of watermelon juice (which contains high levels of L-citrulline). This suggests an opportunity to deliver peptide doses, which can traffic arginine into muscle tissue for conversion into citrulline by eNOS at the endothelial membrane for improved efficacy.

[0384] Glutamate facilitates the biosynthesis of glutathione, which can donate a reducing equivalent to unstable molecules such as reactive oxygen species (ROS) and free radicals. After reducing an oxidative species, it can form a glutathione disulfide with another reactive glutathione, providing a mechanism of depleting oxidative stress inducing molecules from cells (maintains high concentrations of up to 5 mM in the liver). Glutathione also is a cofactor for iNOS, allow maximal synthesis of NO in the arg-NO pathway.

[0385] Gluatamate with co-agonists glycine or serine is an agonist of NMDA receptors, releasing Ca2+ as a second messenger in many cellular signaling pathways. There are dopaminergic and glutaminergic abnormalities implicated in schitzophrenia, with NMDA antagonists mimicking some positive and negative symptoms of schitzophrenia, while carrying less risk of brain harm than do dopamine agonists. Ketamine and PCP, for example, produce similar phenotypes observed in schitzophrenia, with PCP showing less representative symptomology yet similar brain structure changes. Glutamate receptors have increased function, contributing to the onset of schizophrenia. An increased proportion of post-synaptic glutamate receptors to pre-synaptic glutamate receptors result in increased glutamate signaling. Both agonizing and antagonizing NMDA receptors has shown some benefit in treating Alzheimer's dementia, depending on the MOA and receptor specificity. Thus delivering proteins with either high or low levels of Glutamate, which also as NMDA agonist activity, could be therapeutic for this patient population. Proteins with low levels of Glutamate would likely provide a synergistic benefit alongside NMDA antagonists, such as Memantine. Likewise, clinical trials on LY2140023 have demonstrated Glutamate-based treatments as having potential for treating schizophrenia without the side effects seen with xenochemical anti-psychotics. Similar studies combining co-agonist Glycine with anti-psychotics, showed improved symptomology, suggesting that delivering high doses of Aspartate, also a NMDA agonist, will yield similar therapeutic benefits in this patient population.

[0386] Low Glutamate

[0387] Glutamate and acetyl-CoA are converted into N-acetylglutamate in the mitochondria. This pushes the hepatic urea cycle towards the active state, useful for ammonia detoxification. This means that dietary delivery of nutrients with low doses of Glutamate may be useful in the context of kidney disease, where patients struggle to clear urea from their circulation. Elimination of Glutamate to limit uremia from the available nitrogen sources, while being able to maintain a limited protein intake to prevent tissue catabolism, is a novel strategy against a disruptive nutritional consequence of kidney disease.

[0388] Glutamine:

[0389] Glutamine oxidizes in enterocytes of the small intestine, leading to nitrogeneous products ornithine, citrulline, arginine, and alanine.

[0390] Citrulline is produced from Glutamine as a by-product of a reaction catalyzed by the NOS family. Dietary supplement of citrulline is known to reduce plasma levels of glucose, homocysteine, and asymmetric dimethylarginine, which are risk factors for metabolic syndrome. L-citrulline accelerates the removal of lactic acid from muscles, likely due to the affects on vascular tone and endothelial function. Recent studies have also shown that L-citrulline from watermelon juice provides greater recovery from exercise, and less soreness the next day. It also appears that delivery of L-citrulline as a free form results in less uptake into cells in vitro than in the context of watermelon juice (which contains high levels of L-citrulline). This suggests an opportunity to deliver peptide doses, which can traffic arginine into muscle tissue for conversion into citrulline by eNOS at the endothelial membrane for improved efficacy.

[0391] High Glutamine

[0392] Glutamine is a well studied secretagogue that can stimulate the systemic release of insulin from beta-cells, growth hormone, prolactin, glucagon, progesterone, and placental lactogen. It has also been shown to reduce circulating glucocorticoids and stress hormones. This biology has direct implications on both digestive biology and the absorption of nutrients present in the intestine, as well as affecting energy balance by triggering satiety signals mediated by endocrine hormones. The ability to modulate these hormones provides a therapeutic opportunity for decreasing caloric intake in metabolic disorders such as obesity or alternatively triggering appetite in muscle wasting, sarcopenia, and cachexia, as well as by shifting insulin sensitivity in the onset of diabetes.

[0393] Dietary Glutamine supplementation up-regulates anti-oxidative genes and lowers expression of proinflammatory genes in the adipose and small intestinal tissues.

[0394] Glutamine is an important signaling molecule for stimulating mTOR1 phosphorylation in a cell-specific manner. This regulates cellular protein turnover (autophagy) and integrates insulin-like growth signals to protein synthesis initiation across tissues. This biology has been directly linked to biogenesis of lean tissue mass in skeletal muscle, metabolic shifts in disease states of obesity and insulin resistance, and aging.

[0395] Glutamine is an amino acid that is maintained at sufficient levels to support the anabolic effects of EAAs. Lysine, Methionine, Threonine, Tryptophan, Leucine, Isoleucine, and Valine have been shown unable to support increased protein synthesis and whole-body growth when added to a 12.7% crude protein diet, indicating a deficiency in the anabolic mediating non-essential amino acids, including Glutamine.

[0396] Glutamine is slowly cyclized to pyroglutamate. Glutamine is the preferred source of fuel for rapidly dividing cells, including enterocytes, lymphocytes, macrophages, and tumors. Supplementation with glutamine in the diet has significant demonstrated benefits in gut integrity and immune function in surgery, critical illness, burn and infection. A 12-day burn injury study of Glutamine supplementation (0.35 g/kg) showed decreased intestinal permeability, lower endotoxin levels, and shorter length of hospital stay. It provided 8.8× decrease vs 5.5× decrease in Lactulose/mannitol ratio after 3 days and a 6-day reduction in hospital stay. 2 week Glutamine total parenteral nutrition (TPN) (0.23 g/kg) vs Glutamine-Free TPN study of malnourished patients waiting for surgery showed increased gut permeability in Glutamine-Free group. It provided a 3.6× vs 0.81× increase in Lactulose/Mannitol ratio after 2 weeks. These improvements point to an opportunity to deliver high levels of Glutamine in the clinic to improve intestinal immunity and reduced bacteraemia.

[0397] This also improves lymphocyte counts systemically and reduces infectious complications during a hospital stay. A study of glutamine supplementation (26 g/day until discharge) in patients with serious burn injury shows 3× more frequent positive blood culture in standard total enteral nutrition (TEN) vs Glutamine-enriched, significantly reducing mortality rate. Additionally, Glutamine supplementation shows increased lymphocyte count and function, increased HGH, reduced infectious complications, reduced hospital stay, reduced morbidity, reduced mortality, and reduced gut permeability.

[0398] Intramuscular levels of Glutamine decrease under catabolic states such as stress, burn, injury, and sepsis. This decrease causes an net negative protein in lean tissue. Administration of Glutamine to the skeletal muscle has been shown to increase protein synthesis while inhibiting breakdown in-vitro. Furthermore, dose dependence from physiological concentrations (1 mM Glutamine) up to 15-fold higher concentrations has been observed in skeletal muscle. The effect was further demonstrated in mucosal cells taken from the small intestine.

[0399] Branched chain amino acids are all metabolic substrates for glutamine synthesis, providing a source of Glutamine in the fetus, enhancing placental and fetal growth, suggesting a role for Glutamine in mediating their effects on anabolism in mammals. Moreover, it has been shown that Glutamine levels and timing of availability from the plasma affect the cellular uptake of Leucine, and the subsequent profile of mTOR activation. A buildup of intracellular Glutamine is used for uptake of Leucine via the Glutamine/Leucine antiporter, SLC7A5. Administration of glutamine at equal proportions to Leucine in-vitro causes a more sustained stimulation of protein synthesis via mTOR, whereas priming the cells with Glutamine prior to Leucine administration leads to a more rapid, yet transient mTOR activation (Nicklin, P. et. al. Cell 2009).

[0400] A lack of ATP-producing substrates, as occurs in a fasted state, can lead to autophagy and the turnover of intracellular protein in the lysosome to provide an energy source. Low levels of the glucogenic amino acids, including glutamine can stimulate hepatic autophagy, leading to degradation of liver function.

[0401] Low Glutamine

[0402] mTOR is a central signaling pathway which can be hijacked for the proliferation of fast-growing cancer cells, as is evidence by oncogenic cells' preferential uptake of Glutamine.

[0403] Glycine:

[0404] A lack of ATP-producing substrates, as occurs in a fasted state, can lead to autophagy and the turnover of intracellular protein in the lysosome to provide an energy source. Low levels of the glucogenic amino acids, including glycine can stimulate hepatic autophagy, leading to degradation of liver function.

[0405] Glycine facilitates the biosynthesis of glutathione, which can donate a reducing equivalent to unstable molecules such as reactive oxygen species (ROS) and free radicals. After reducing an oxidative species, it can form a glutathione disulfide with another reactive glutathione, providing a mechanism of depleting oxidative stress inducing molecules from cells (maintains high concentrations of up to 5 mM in the liver). Glutathione also is a cofactor for iNOS, allow maximal synthesis of NO in the arg-NO pathway.

[0406] Histidine:

[0407] Histidine is an essential amino acid, and is a precursor for carnosine. Carnosine is an antioxidant and transition metal ion-sequestering agent. It acts as an anti-glycating agent by inhibiting the formation of advanced glycation end products (AGEs). AGEs are prevalent in diabetic vasculature and contribute to the development of atherosclerosis. The presence of AGEs in various cells types affect both the extracellular and intracellular structure and function. (Golden, A. et. al. Advanced Glycosylation End Products, Circulation 2006). Also, the accumulation of AGEs in the brain is a characteristic of aging and degeneration, particularly in Alzheimer's disease. AGE accumulation explains many neuropathological and biochemical features of Alzheimer's disease such as protein crosslinking, oxidative stress, and neuronal cell death. Because of its combination of antioxidant and antiglycating properties, carnosine is able to diminish cellular oxidative stress and inhibit the intracellular formation of reactive oxygen species and reactive nitrogen species.

[0408] Histidine has antioxidant, anti-inflammatory, and anti-secretory properties. Histidine's imidazole rings have the ability to scavenge reactive oxygen species (ROS), which are made by cells during acute inflammatory response. Histidine administration inhibits cytokine and growth factors involved in cell and tissue damage. Histidine administration is instrumental in rheumatoid arthritis treatment, and administering 4.5 g daily has been used to effectively treat patients with severe rheumatoid arthritis. Rheumatoid arthritis patients have been found to have low serum histidine levels due to its very rapid removal from the blood. Low plasma Histidine levels have also been found in patients with chronic renal failure, obese women (where it also had negative impact on oxidative stress and inflammation), pediatric patients with pneumonia, and asthma patients. Histidine supplementation has been shown to diminish insulin resistance, reduce BMI and fat mass. Histidine suppresses inflammation and oxidative stress in obese subjects with a metabolic syndrome. Lastly, as a precursor to histamine, histidine increases levels of histamine in the blood and in the brain. Low blood histamine is found in some manic, schizophrenic, high copper and hyperactive groups of psychiatric patients.

[0409] Posttranslational modification of proteins involved in transcriptional regulation is a mechanisms used to regulate genes. This modification can alter protein functions in specific ways. One form of modification is protein methylation, which is one of the most abundant protein modifications. Protein methylation carries important biological functions, including gene regulation and signal transduction. Histidine plays a role in protein modification, and ultimately gene regulation, in that it accepts methyl group transferred from S-adenosylmethionine by protein methyltransferases (Young-Ho Lee and Michael R. Stallcup, Mol Endocrinol. 2009 April; 23(4): 425-433).

[0410] Histidine supplementation can be instrumental in the treatment of multiple diseases including: Alzheimer's disease, diabetes, atherosclerosis, metabolic syndrome in women, rheumatoid arthritis, and various psychiatric conditions (manic, schizophrenic, high copper, and hyperactive groups). Additionally, due to its role in protein modifications, Histidine provides an avenue to combat diseases resulting from gene deregulation, including cancer.

[0411] Low Histidine

[0412] There exists a mechanistic understanding of how uncharged tRNA allosterically activates GCN2, leading to downstream phosphorylation of transcription factors related to lipogenesis and protein synthesis, along with many biosynthetic pathways in eukaryotes (SREBP-1c, eIF2a, and GCN4p discussed below). Diets devoid of an essential amino acid remarkably trigger this signaling within minutes after diet introduction (Hao et. Al., science 2005). Signaling through SREBP-1c has been shown in vivo to have dramatic effects on mobilizing lipid stores by repressing genes related to lipogenesis. SREBP-1c has been shown to specifically act on hepatic lipid synthesis, and an ability to cause a hepatic steatosis phenotype as well as increase in visceral fat mass (Knebel, B. et. Al. Liver-Specific Expression of Transcriptionally Active SREBP-1c Is Associated with Fatty Liver and Increased Visceral Fat Mass. PLoS, 2012). An unbalanced diet lacking Histidine has been shown to signal GCN2 for rats on a basal casein diet with 1-5.4% of an amino acid mixture supplemented lacking Histidine. Histidine deprivation, through its action on GCN2, has an effect on SREBP-1c and decreased physiologic measures of liver weight (and fatty liver phenotype), adipose tissue weight, cholesterol/triglyceride content, and food intake. Driving decreased fat mass, while maintaining lean mass, provides a therapeutic opportunity in areas such as obesity, diabetes, and cardiovascular health.

[0413] Isoleucine:

[0414] Isoleucine is an EAA, and is also a BCAA. Isoleucine is used in combination with other BCAAs to improve the nutritional status of patients suffering from hepatic disease. BCAAs, including isoleucine, serve as fuel sources for skeletal muscle during periods of metabolic stress; promote protein synthesis, suppress protein catabolism, and serve as substrates for gluconeogenesis. BCAAs, and specifically isoleucine, are catabolized in the skeletal muscle, and stimulate the production of L-alanine and L-glutamine.

[0415] BCAAs have been shown to have anabolic effects on protein metabolism by increasing the rate of protein synthesis and decreasing the rate of protein degradation in resting human muscle. Additionally, BCAAs are shown to have anabolic effects in human muscle during post endurance exercise recovery. These effects are mediated through the phosphorylation of mTOR and sequential activation of 70-kD S6 protein kinase (p70-kD S6), and eukaryotic initiation factor 4E-binding protein 1. P70-kD S6 is known for its role in modulating cell-cycle progression, cell size, and cell survival. P70-kD S6 activation in response to mitogen stimulation up-regulates ribosomal biosynthesis and enhances the translational capacity of the cell (W-L An, et al., Am J Pathol. 2003 August; 163(2): 591-607; E. Blomstrand, et al., J. Nutr. January 2006 136: 269S-273S). Eukaryotic initiation factor 4E-binding protein 1 is a limiting component of the multi-subunit complex that recruits 40S ribosomal subunits to the 5′ end of mRNAs. Activation of p70 S6 kinase, and subsequent phosphorylation of the ribosomal protein S6, is associated with enhanced translation of specific mRNAs.

[0416] BCAAs given to subjects during and after one session of quadriceps muscle resistance exercise show an increase in mTOR, p70 S6 kinase, and S6 phosphorylation was found in the recovery period after the exercise. However, there was no such effect of BCAAs on Akt or glycogen synthase kinase 3 (GSK-3). Exercise without BCAA intake leads to a partial phosphorylation of p70 S6 kinase without activating the enzyme, a decrease in Akt phosphorylation, and no change in GSK-3. BCAA infusion also increases p70 S6 kinase phosphorylation in an Akt-independent manner in resting subjects. This mTOR activity regulates cellular protein turnover (autophagy) and integrates insulin-like growth signals to protein synthesis initiation across tissues. This biology has been directly linked to biogenesis of lean tissue mass in skeletal muscle, metabolic shifts in disease states of obesity and insulin resistance, and aging.

[0417] Isoleucine supplementation can be used to improve athletic performance and muscle formation, prevent muscle loss that accompanies aging, aid those suffering from hepatic disease, support the growing bodies of children, and improve the nutritive quality of foods given to the starving populations. Additionally, as a precursor for L-alanine and L-glutamine, isoleucine mediates their significant metabolic signaling activities.

[0418] Low Isoleucine

[0419] In states of obesity and diabetes, animals have been shown to exhibit reduced hepatic autophagy, leading to increased insulin resistance. Autophagy is important for maintenance of the ER and cellular homeostasis, which when stressed can lead to impaired insulin sensitivity. High fat diet feeding in animal models stresses the ER, while leading to depressed hepatic autophagy through over-stimulation of mTORC1, which reinforces the progression towards insulin sensitivity impaired beta-cell function in diabetes. Reducing the level of systemic Isoleucine provides an opportunity to lower mTORC1 activity and restore healthy levels of autophagy.

[0420] There exists a mechanistic understanding of how uncharged tRNA allosterically activates GCN2, leading to downstream phosphorylation of transcription factors related to lipogenesis and protein synthesis, along with many biosynthetic pathways in eukaryotes (SREBP-1c, eIF2a, and GCN4p discussed below). Diets devoid of any EAAs remarkably trigger this signaling within minutes after diet introduction (Hao et. Al., science 2005). Signaling through SREBP-1c has been shown in vivo to have dramatic effects on mobilizing lipid stores by repressing genes related to lipogenesis. SREBP-1c has been shown to specifically act on hepatic lipid synthesis, and an ability to cause a hepatic steatosis phenotype as well as increase in visceral fat mass (Knebel, B. et. Al. Liver-Specific Expression of Transcriptionally Active SREBP-1c Is Associated with Fatty Liver and Increased Visceral Fat Mass. PLoS, 2012). Isoleucine deprivation, through its action on GCN2, has an effect on SREBP-1c and decreased physiologic measures of liver weight (and fatty liver phenotype), adipose tissue weight, cholesterol/triglyceride content, and food intake. Driving decreased fat mass, while maintaining lean mass, provides a therapeutic opportunity in areas such as obesity, diabetes, and cardiovascular health.

[0421] Leucine:

[0422] Leucine is an essential amino acid and a branched chain amino acid. The branched chain amino acids, including Leucine, serve as fuel sources for skeletal muscle during periods of metabolic stress; promote protein synthesis, suppress protein catabolism, and serve as substrates for gluconeogenesis. BCAAs, and including Leucine, are catabolized in the skeletal muscle, and stimulate the production of L-alanine and L-glutamine. Leucine plays a direct role in the regulation of protein turnover through cellular mTOR signaling and gene expression as well as serving to activate glutamate dehydrogenase.

[0423] BCAAs have been shown to have anabolic effects on protein metabolism by increasing the rate of protein synthesis and decreasing the rate of protein degradation in resting human muscle. Additionally, BCAAs are shown to have anabolic affects in human muscle during post endurance exercise recovery. These affects are mediated through the phosphorylation of mTOR and sequential activation of 70-kD S6 protein kinase (p70-kD S6), and eukaryotic initiation factor 4E-binding protein 1. P70-kD S6 is known for its role in modulating cell-cycle progression, cell size, and cell survival. P70-kD S6 activation in response to mitogen stimulation up-regulates ribosomal biosynthesis and enhances the translational capacity of the cell (W-L An, et al., Am J Pathol. 2003 August; 163(2): 591-607; E. Blomstrand, et al., J. Nutr. January 2006 136: 269S-273S). Eukaryotic initiation factor 4E-binding protein 1 is a limiting component of the multi-subunit complex that recruits 40S ribosomal subunits to the 5′ end of mRNAs. Activation of p70 S6 kinase, and subsequent phosphorylation of the ribosomal protein S6, is associated with enhanced translation of specific mRNAs.

[0424] BCAAs given to subjects during and after one session of quadriceps muscle resistance exercise show an increase in mTOR, p70 S6 kinase, and S6 phosphorylation was found in the recovery period after the exercise. However, there was no such effect of BCAAs on Akt or glycogen synthase kinase 3 (GSK-3). Exercise without BCAA intake leads to a partial phosphorylation of p70 S6 kinase without activating the enzyme, a decrease in Akt phosphorylation, and no change in GSK-3. BCAA infusion also increases p70 S6 kinase phosphorylation in an Akt-independent manner in resting subjects. Leucine is furthermore known to be the primary signaling molecule for stimulating mTOR1 phosphorylation in a cell-specific manner. This regulates cellular protein turnover (autophagy) and integrates insulin-like growth signals to protein synthesis initiation across tissues. This biology has been directly linked to biogenesis of lean tissue mass in skeletal muscle, metabolic shifts in disease states of obesity and insulin resistance, and aging.

[0425] Leucine is a well-studied secretagogue that can stimulate the systemic release of insulin from beta-cells, growth hormone, prolactin, glucagon, progesterone, and placental lactogen. This biology has direct implications on both digestive biology and the absorption of nutrients present in the intestine, as well as affecting energy balance by triggering satiety signals mediated by endocrine hormones. The ability to modulate these hormones provides a therapeutic opportunity for decreasing caloric intake in metabolic disorders such as obesity or alternatively triggering appetite in muscle wasting, sarcopenia, and cachexia, as well as by shifting insulin sensitivity in the onset of diabetes.

[0426] Leucine activates glutamate dehydrogenase, which is an enzyme that catalyzes the reversible interconversion between glutamate, α-ketoglutarate, and ammonia. In mammals, glutamate dehydrogenase has high levels of activity in the liver, kidney, brain, and pancreas. In the liver, glutamate dehydrogenase provides the appropriate ratio of ammonia and amino acids for urea synthesis in periportal hepatocytes, and the glutamate dehydrogenase reactions seem to be in a close-to-equilibrium state. Additionally, glutamate dehydrogenase has been shown to produce glutamate for glutamine synthesis in a small rim of pericentral hepatocytes, enabling it to serve as either a source for ammonia or an ammonia scavenger. In the kidney, glutamate dehydrogenase functions to produce ammonia from glutamate to control acidosis (C. Spanaki and A. Plaitakis, Neurotox Res. 2012 January; 21(1):117-27).

[0427] Leucine supplementation can be used to improve athletic performance and muscle formation, prevent muscle loss that accompanies aging, aid those suffering from hepatic disease, support the growing bodies of children, and improve the nutritive quality of foods given to the starving populations. Additionally, leucine plays an important role in urea synthesis in hepatocytes, and may be given to treat those who suffer from conditions that cause them to be hyperammonemic. Lastly, leucine may be used to treat acidosis.

[0428] Low Leucine

[0429] In states of obesity and diabetes, animals have been shown to exhibit reduced hepatic autophagy, leading to increased insulin resistance. Autophagy is important for maintenance of the ER and cellular homeostasis, which when stressed can lead to impaired insulin sensitivity. High fat diet feeding in animal models stresses the ER, while leading to depressed hepatic autophagy through over-stimulation of mTORC1, which reinforces the progression towards insulin sensitivity impaired beta cell function in diabetes. Reducing the level of systemic Leucine provides an opportunity to lower mTORC1 activity and restore healthy levels of autophagy.

[0430] mTOR is a central signaling pathway which can be hijacked for the proliferation of fast-growing cancer cells. Depletion of Leucine may reduce a fast-growing cell's ability to sustain constitutive mTOR activation.

[0431] There exists a mechanistic understanding of how uncharged tRNA allosterically activates GCN2, leading to downstream phosphorylation of transcription factors related to lipogenesis and protein synthesis, along with many biosynthetic pathways in eukaryotes (SREBP-1c, eIF2a, and GCN4p discussed below). Diets devoid of an EAA remarkably trigger this signaling within minutes after diet introduction (Hao et. Al., science 2005). Signaling through SREBP-1c has been shown in vivo to have dramatic effects on mobilizing lipid stores by repressing genes related to lipogenesis. SREBP-1c has been shown to specifically act on hepatic lipid synthesis, and an ability to cause a hepatic steatosis phenotype as well as increase in visceral fat mass (Knebel, B. et. Al. Liver-Specific Expression of Transcriptionally Active SREBP-1c Is Associated with Fatty Liver and Increased Visceral Fat Mass. PLoS, 2012). Leucine deprivation, through its action on GCN2, has an affect on SREBP-1c and decreased physiologic measures of liver weight (and fatty liver phenotype), adipose tissue weight, cholesterol/triglyceride content, and food intake. Driving decreased fat mass, while maintaining lean mass, provides a therapeutic opportunity in areas such as obesity, diabetes, and cardiovascular health.

[0432] Leucine deprivation, furthermore, has directly shown up-regulation of UCP1 in brown adipose tissue (BAT), a direct measure of thermogenesis, an increase in energy expenditure (presumably due to an increase in thermogenesis in BAT), and a corresponding decrease in fat mass by stimulation of lipolysis in the white adipose tissue (WAT). UCP1 up-regulation results in decreased food intake, body weight, abdominal fat mass, fat mass, and maintenance of lean mass (Guo, F. The GCN2 eIF2alpha kinase regulates fatty-acid homeostasis in the liver during deprivation of an essential amino acid. Cell Metab., 2007).

[0433] Lysine:

[0434] Lysine is an EAA that is important for proper growth, and plays a vital role in the production of carnitine. Carnitine is a quaternary amine that plays an important role in the production of energy in the myocardium. Carnitine transports free fatty acids into the mitochondria, and in so doing, increases the preferred substrate for oxidative metabolism in the heart. Additionally, carnitine prevents the fatty acid accumulation that occurs during ischemic events, which may lead to ventricular arrhythmias. As the myocardial carnitine levels are quickly diminished during an ischemic event, exogenous supplementation with carnitine replenishes the depleted myocardial carnitine levels and improve cardiac metabolic and left ventricular function. Additionally, an analysis of 4 studies demonstrated that supplementation with L-carnitine after an acute myocardial infarction (AMI), in comparison to a placebo, significantly reduces left ventricular dilation in the first year after the AMI. This is significant because the prevention of left ventricular dilation and the preservation of cardiac function after an AMI is a powerful predictor of the progression to heart failure and death. Additionally, carnitine aids in lowering cholesterol, which further supports heart health, and aids in the prevention of acute myocardial infarctions (James J. DiNicolantonio, et al., Mayo Clinic Proceedings, 2013; 88, 544-551).

[0435] Lysine supplementation is useful to support heart health and during ischemic events to prevent ventricular arrhythmia. In addition, Lysine supplementation may help heart attack patients recover effectively, and aid in the prevention of heart attacks in those with the left ventricular dilation. Also, Lysine can be used for to decrease cholesterol levels in patients with high cholesterol.

[0436] Lysine is instrumental in helping the body to absorb calcium and decreases the amount of calcium that is lost in urine. Due to calcium's role in bone health, Lysine supplementation is helpful in preventing the bone loss that is associated with osteoporosis. Furthermore, a combination of L-arginine and Lysine makes the bone building cells more active and enhances production of collagen, which is substance that is important for bones and connective tissues including: skin, tendon, and cartilage.

[0437] Lysine supplementation is useful for patients suffering from osteoporosis, and those at risk for developing osteoporosis; the elderly, menopausal women, growing children, in cosmetics due to its role in collagen production, and athletes for improved ligament integrity.

[0438] A lysine deficiency causes fatigue, nausea, dizziness, loss of appetite, agitation, bloodshot eyes, slow growth, anemia, and reproductive disorders.

[0439] Lysine helps to prevent and suppress outbreaks of cold sores and genital herpes when taken on a regular basis. When 45 patients with frequently recurring herpes infection were given 312-1200 mg of lysine daily in single or multiple doses, recovery from the infection and suppression of recurrence was evidenced (Griffith R. S., et al., Dermatologica 1978; 156:257-267). This is because lysine has antiviral effects, which act by blocking the activity of arginine, which promotes herpes simplex virus (HSV) replication. In tissue culture studies, herpes viral replication is enhanced when the arginine/lysine ratio favors arginine. However, when the arginine/lysine ratio favors lysine, viral replication is suppressed, ad cyto-pathogenicity of HSV is inhibited. (Griffith R. S., et al., Dermatologica 1978; 156:257-267). It has been shown that oral lysine is more effective for preventing an outbreak than it is at reducing the severity and duration of the outbreak.

[0440] Supplementing the diet with Lysine for those infected with the HSV suppresses outbreak of cold sores and genital warts, and when actively taken on a regular basis is very beneficial in the prevention of outbreaks.

[0441] Lysine modulates the arginine-NO pathway. NO is important for normal endothelial function and cardiovascular health (including vascular tone, hemodynamics, angiogenesis). Lysine is a natural inhibitor of L-arginine transport, and competes with L-arginine for uptake through the system y+, which is the major transport system of cationic amino acids in mammalian cells. Excess nitric oxide contributes to refractory hypotension associated with sepsis, and can be combatted with administration of L-lysine because it inhibits Arginine, which is an important component of NO synthesis (K. G. Allman, et al., British Journal of Anaesthesia (1998) 81: 188-192). Moreover, an excess of NO may lead to diseases, due to its release from cerebral vasculature, brain tissue, and nerve endings, which are prime regions for neurodegeneration. Excess NO may lead to migraines, brain cell damage that can lead to neurodegenerative diseases like Parkinson disease, Alzheimer's disease, Huntington disease, and amyotrophic lateral sclerosis. Furthermore, NO that is produced by the pancreas may damage the beta-cells as occurs in type 1 diabetes.

[0442] Lysine supplementation is useful for the prevention of hypotension associated with sepsis by preventing vasodilation. Additionally, lysine may be used to prevent/treat migraines, and prevent/slow down the progression of neurodegenerative diseases like AD, Parkinson's disease, Huntington, and amyotrophic lateral sceloris.

[0443] Low Lysine

[0444] There exists a mechanistic understanding of how uncharged tRNA allosterically activates GCN2, leading to downstream phosphorylation of transcription factors related to lipogenesis and protein synthesis, along with many biosynthetic pathways in eukaryotes (SREBP-1c, eIF2a, and GCN4p discussed below). Diets devoid of an EAA remarkably trigger this signaling within minutes after diet introduction (Hao et. Al., science 2005). Signaling through SREBP-1c has been shown in vivo to have dramatic effects on mobilizing lipid stores by repressing genes related to lipogenesis. SREBP-1c has been shown to specifically act on hepatic lipid synthesis, with an ability to cause a hepatic steatosis phenotype as well as increase in visceral fat mass (Knebel, B. et. Al. Liver-Specific Expression of Transcriptionally Active SREBP-1c Is Associated with Fatty Liver and Increased Visceral Fat Mass. PLoS, 2012). Lysine deprivation, through its action on GCN2, has an affect on SREBP-1c and decreased physiologic measures of liver weight (and fatty liver phenotype), adipose tissue weight, cholesterol/triglyceride content, and food intake. Driving decreased fat mass, while maintaining lean mass, provides a therapeutic opportunity in areas such as obesity, diabetes, and cardiovascular health.

[0445] Methionine:

[0446] Methionine is an essential amino acid, and is the initiating amino acid in the synthesis of virtually all eukaryotic proteins. Methionine is one of the most hydrophobic AAs. Most of the methionine residues in globular proteins can be found in the interior of the hydrophobic core. Methionine is often found to interact with the lipid bilayer in membrane-spanning protein domains. Due to its location and powerful antioxidative properties, methionine has been regarded as endogenous antioxidants in proteins (John T. Brosnan and Margaret E. Brosnan, J. Nutr. June 2006 vol. 136 no. 6 1636S-1640S). Methionine residues have a high susceptibility to oxidation by oxidases, ozone, hydrogen peroxide, superoxide, γ-irradiation, metal-catalyzed oxidation, “leakage” from the electron transport chain, and auto-oxidation of flavins or xenobiotics. Once oxidized, the Methionine residue is converted to methionine sulfoxide, which can be converted back to Methionine though methionine sulfoxide reductases (Rodney L. Levine, et al., Proc Natl Acad Sci USA, 1996 Dec. 24; 93(26): 15036-15040). As an antioxidant, methionine supplementation can aid in the prevention of cancer, degenerative diseases, heart disease, liver and kidney pathologies. It can also be used in cosmetics to fight the damage of UV rays to the skin.

[0447] Methionine is a lipotropic AA, and helps the liver process lipids, and thereby helps prevent the build-up of fat in the liver and arteries that may ultimately lead to an obstruction of blood flow to the brain, heart, and kidneys. Additionally, the build-up of fat in the liver drives a pathology known as hepatic steatosis, which may ultimately lead to cirrhosis of the liver. Methionine supplementation for individuals undergoing drug detoxification may improve the process, as well as for those taking medications which have toxic side effects.

[0448] In addition, to being a lipotropic AA, Methionine promotes heart health by increasing of the liver's production of lectithin, which is known to help reduce cholesterol levels. Methionine supplementation can prevent cirrhosis of the liver from fat deposition therein. Additionally, it can promote cardiovascular health by preventing the deposition of fat into the arteries, thereby preventing possible myocardial infarctions and strokes. Further, Methionine may help those with high cholesterol levels lower their cholesterol, improving the risk of cardiovascular disease

[0449] Methionine aids in the proper functioning of the immune system in that elevated levels of methionine increases the levels of taurine, and homocysteine and glutathione which help improve immune function. The underlying mechanism for the immune functions may involve mTOR activation, NO and glutathionine synthesis, H2S signaling, and cellular redox state. Methionine is a precursor for Taurine, which modulates the arginine-NO pathway. NO is important for normal endothelial function and cardiovascular health (including vascular tone, hemodynamics, angiogenesis).

[0450] Methionine is also converted into cysteine, which is a precursor for Glutathionine. Glutathionine is a powerful neutralizer of toxins in the liver, and helps to protect the liver from the damaging effects of toxins. Additionally, this detoxifying ability helps to diminish muscle weakness, prevents brittle hair, and protects against radiation associated with these toxins. As a result, it is beneficial for those suffering from chemical allergies or exposure to high levels of air pollution. Methionine can be helpful to patients with compromised immune systems, such as AIDS patients and cancer patients. Likewise, it can be a useful supplement during flu seasons, particularly to groups who are most susceptible, including: the elderly, children, and pregnant women. Furthermore, it can be used for those travelling to countries where they will likely be susceptible to regional infections. Methionine levels are observed to be lower in patients with AIDS. This decreased level of methionine has been linked to deterioration in the nervous system that leads to symptoms like dementia, and diminished memory recall. Supplementing with 6 grams of methionine per day can lead to improvements in the memory recall in these patients. Likewise, Methionine can be beneficial to those who have diseases that involve nervous system degeneration including Alzheimer's Disease, ALS, MS, and Huntington's.

[0451] Methionine participates in one-carbon metabolism, and thereby also participates in the methylation of proteins and DNA, which in turn helps regulate gene expression and the biological activity of proteins. Methionine supplementation for those at risk for related genetic disorders can be used to promote proper gene regulation in all individuals.

[0452] Low Methionine

[0453] Methionine is a precursor for the toxic homocysteine, which mediates ADMA by down-regulating DDAH in body to metabolize ADMA, interfering with the arginine-NO pathway. NO is important for normal endothelial function and cardiovascular health (including vascular tone, hemodynamics, angiogenesis).

[0454] There exists a mechanistic understanding of how uncharged tRNA allosterically activates GCN2, leading to downstream phosphorylation of transcription factors related to lipogenesis, protein synthesis, along with many biosynthetic pathways in eukaryotes (SREBP-1c, eIF2a, and GCN4p discussed below). Diets devoid of any EEAs remarkably trigger this signaling within minutes after diet introduction (Hao et. Al., science 2005). Signaling through SREBP-1c has been shown in vivo to have dramatic effects on mobilizing lipid stores by repressing genes related to lipogenesis. SREBP-1c has been shown to specifically act on hepatic lipid synthesis, and an ability to cause a hepatic steatosis phenotype as well as increase in visceral fat mass (Knebel, B. et. Al. Liver-Specific Expression of Transcriptionally Active SREBP-1c Is Associated with Fatty Liver and Increased Visceral Fat Mass. PLoS, 2012). Methionine deprivation, through its action on GCN2, has an affect on SREBP-1c and decreased physiologic measures of liver weight (and fatty liver phenotype), adipose tissue weight, cholesterol/triglyceride content, and food intake. Driving decreased fat mass, while maintaining lean mass, provides a therapeutic opportunity in areas such as obesity, diabetes, and cardiovascular health.

[0455] Phenylalanine:

[0456] Phenylalanine is an EEA, AuAA, and precursor for synthesis of norepinephrine in the brain, as well as a metabolic precursor for tyrosine, which is another aromatic amino acid and precursor for the synthesis of dopamine.

[0457] Norepinephrine (NE) is synthesized in the adrenal medulla and postganglionic neurons in the sympathetic nervous system by the β-oxidation of dopamine by β-hydroxylase along with the cofactor ascorbate. It works by being secreted into the synaptic cleft where it stimulates adrenergic receptors and is then either degraded or up-taken by surrounding cells. As a cathecolamine, it does not cross the blood-brain barrier.

[0458] NE can be used to combat attention-deficit/hyperactivity disorders (ADHD), depression, and hypotension. In terms of attention disorders, like ADHD, medications prescribed tend to help increase levels of NE and dopamine. Furthermore, depression is typically treated with medications that inhibit the reuptake of serotonin and NE thereby increasing the amount of serotonin and NE that is available in the postsynaptic cells in the brain. Recent evidence has suggested that serotonin-norepinephrine reuptake inhibitors (SNRIs) may also increase dopamine transmission because if the norepinephrine transporter ordinarily recycled dopamine as well, then SNRIs will also enhance the dopaminergic transmission. As a result, the effects antidepressants may also be associated with the increased NE levels may partly be due to the simultaneous increase in dopamine (in particular in the prefrontal cortex of the brain).

[0459] NE is used to treat patients with critical hypotension. NE is a vasopressor and acts on both α1 and α2 adrenergic receptors to cause vasoconstriction, thereby increasing the blood pressure.

[0460] As a precursor for NE, Phenylalanine can be used to treat attention disorders like ADHD and ADD. Additionally, it can be used to treat those suffering from depression or post-traumatic stress syndrome. Phenylalaline can also be used to treat depression or alter the function of neurotransmitter modulating drugs such as SSRIs. Additionally, due to its ability to increase blood pressure through the increase of vascular tone, it may be used to treat those with a hypotensive tendency. Furthermore, phenylalanine may be used as an upstream regulator of tyrosine levels, and thereby Tyrosine function.

[0461] Tyrosine supplementation can help in the treatment of Parkinson's disease due to its role as a precursor to L-DOPA and dopamine. Additionally, it can be used in the treatment of those with emotional/psychiatric disorder like depression and in the treatment of addiction. Furthermore, it can promote learning by increasing the reward/pleasure response during learning difficult or complex concepts or movements.

[0462] Dopamine, which is a monoamine catecholamine neurotransmitter, plays a regulatory role in the immune system. Neurotransmitters and neuropeptides that interact with specific receptors present in particular immune effector cells are released by the immune system to influence the functions of these cells in the host against disease and other environmental stress. The immunoregulatory actions of dopamine have been shown to be regulated via five different G protein-coupled receptors that are present in target cells. There are two broad classes of these receptors: G1 and G2, which encompass the varying subtypes. The D1 class of receptors includes D2 and D5 subtypes, and increase intracellular cAMP upon activation. The D2 class of receptors consists of the D2, D3, and D4 subtypes, and has been reported to inhibit intracellular cAMP upon stimulation. Dopamine receptors have been found on normal human leukocytes. Likewise, the lymphoid tissues have dopaminergic innervations through sympathetic nerves, which suggests that dopamine may be able to regulate the immune system effector cells (Basu, Sujit & Sarkar, Chandrani, Dopamine and immune system. SciTopics 2010).

[0463] Dopamine affects T cells by activating the resting T cells and inhibiting the activation of stimulated T cells. In normal resting peripheral human T lymphocytes, dopamine activates the D2 and D3 subclass of receptors, which in turn activates integrins (α4β1 and α5β1). These integrins are heterodimeric transmembrane glycoproteins that attach cells to the extracellular matrix component, fibronectin. Fibronectin is used for the trafficking and extravasation of T cells across the tissue barriers and blood vessels. Furthermore, dopamine acts through the D3 receptors to selectively induce the migration and homing of CD8+ T cells. Moreover, dopamine affects T cells by influencing the secretions of cytokines by the T cells. When dopamine stimulates the D3 and D1/D5 receptors, the secretion of TNF-α (a pleiotropic inflammatory cytokine) is increased. When the D2 receptors are stimulated, IL-10 (an anti-inflammatory cytokine) is induced to secrete. Dopamine, however, can inhibit the activated T cell receptor induced cell proliferation and secretion of a number of cytokines like 11-2, IFN-γ and IL-4 through the down-regulation of the expression of non-receptor tyrosine kinases lck and fyn, which are important tyrosine kinases in the initiation of TCR activation (Basu, Sujit & Sarkar, Chandrani Dopamine and immune system. SciTopics 2010).

[0464] The B cells have a very high expression of dopamine D2, D3, and D5 receptors. Dopamine has the ability to inhibit the proliferation of the resting and the malignant B lymphocytes. Dopamine acts by promoting apoptosis in cycling B cells through oxidative stress. However, this dopaminergic action has not been observed in resting lymphocytes, therefore suggesting a role in the prevention of cancer (Basu, Sujit & Sarkar, Chandrani, Dopamine and immune system. SciTopics 2010).

[0465] Tyrosine, as a precursor for Dopamine, can be used to improve immune responses and improve the overall immune system functionality. It can provide a benefit to the elderly, women who are pregnant, children, and those with compromised immune functions like AIDS patients, and cancer patients. It also can be given to teachers, those travelling, and anyone frequently exposed to germs.

[0466] Epinephrine, which is popularly known as adrenaline, is a hormone that is secreted by the medulla of the adrenal glands. Epinephrine is released in response to strong emotions such as fear or anger, which causes an increase in heart rate, muscle strength, blood pressure, and sugar metabolism. It is responsible for the flight or fight response that prepares the body for difficult or strenuous activity. Epinephrine is used as a stimulant during cardiac arrest, as a vasoconstrictor during shock to increase blood pressure, and as a bronchodilator and antispasmodic in bronchial asthma. Epinephrine is not found in large quantities in the body, but is nevertheless very important in the maintenance of cardiovascular homeostasis because it has the ability to divert blood to tissues under stress. Epinephrine has this effect by influencing muscle contraction. Contraction of the muscles occurs through the binding calmodulin to calcium ions when the concentration is 10× larger than normal in the cell. The calcium-calmodulin complex then goes on to activate the myosin light chain kinase, which then phosphorylates the LC2 causing the contraction. Epinephrine binds to the epinephrine receptors, which activates adenylyl cyclase, and produces cyclic AMP from ATP. cAMP activates a protein kinase which thus phosphorylates the myosin light chain kinase. This phosphorylated myosin light chain kinase has a lower affinity for the calcium-calmodulin complex, and is thus inactive. As such, the smooth muscle tissue is relaxed. It is this action of epinephrine that makes it very useful in treating asthma, cardiac arrest, and anaphylactic shock. Tyrosine, as a precursor for Epinephrine, can be used for patients who are at risk for cardiac arrest, those suffering from asthma, and those who are at risk for anaphylactic shock.

[0467] Epinephrine is one of two main hormones that breakdown glycogen by binding to a receptor on exterior of a liver cell. This binding causes a conformational change to take place thereby allowing G protein to bind and become active. The activation of the G-protein coupled receptor causes a conformational change on the molecule to occur which causes adenylate cyclase to bind. Once adenylate cyclase binds the complex, adenylate cyclase breaks down ATP into cAMP, which then becomes the second messenger protein in this process and activates protein kinase. The activated protein kinase activates phosphorylase, which is an enzyme that catalyzes breaks down the glycogen to glucose. Tyrosine, as a precursor for Epinephrine, can be used to improve athletic performance by making glucose readily available to fuel exercise.

[0468] Melanin is a metabolite of Tyrosine, and is a powerful antioxidant. Additionally, it is influential in the inhibition of the production of inflammatory cytokines and superoxide. When pro-inflammatory cytokines are overproduced, it mediates the damaging effects of inflammation in pathologic conditions like rheumatoid arthritis, graft vs. host reactions, cachexia, and sepsis syndrome. It has been found that melanin inhibits ongoing cytokine synthesis, which strongly suggests that melanin may be useful as a superimposed therapy for conditions that involve proinflammatory cytokines (Mohagheghpour N., et al., Cell Immunol. 2000 Jan. 10; 199(1):25-36).

[0469] Tyrosine can be used in the treatment of rheumatoid arthritis, cachexia, sepsis syndrome, those with inflammation related to autoimmune disorder, and other inflammatory sequela of pathologic conditions.

[0470] Phenylalanine up-regulates the activity of GTP cyclohydrolase-I, freeing tetrahydrobiopterin (THB) for NO synthesis and the hydroxylation of ArAAs by aromatic amino acid hydroxylase (AAAH). For this reason, delivery of high levels of Phenylalanine to raise cellular levels of THB directly stimulates the biosynthesis of many neurotransmitters in the CNS capillary endothelial cells. ArAAs serve as precursors for biosynthesis of monoamine neurotransmitters, including melatonin, dopamine, norepinephrine (noradrenaline), and epinephrine (adrenaline). In promoting NO synthesis, phenylalanine can be used to treat hypertension, to decrease blood pressure, and may be used in the context of diving, or those travelling to high altitudes to increase vasodilation.

[0471] Low Phenylalanine

[0472] There exists a mechanistic understanding of how uncharged tRNA allosterically activates GCN2, leading to downstream phosphorylation of transcription factors related to lipogenesis and protein synthesis, along with many biosynthetic pathways in eukaryotes (SREBP-1c, eIF2a, and GCN4p discussed below). Diets devoid of any EAAs remarkably trigger this signaling within minutes after diet introduction (Hao et. Al., science 2005). Signaling through SREBP-1c has been shown in vivo to have dramatic effects on mobilizing lipid stores by repressing genes related to lipogenesis. SREBP-1c has been shown to specifically act on hepatic lipid synthesis, and an ability to cause a hepatic steatosis phenotype as well as increase in visceral fat mass (Knebel, B. et. Al. Liver-Specific Expression of Transcriptionally Active SREBP-1c Is Associated with Fatty Liver and Increased Visceral Fat Mass. PLoS, 2012). Phenylalanine deprivation, through its action on GCN2, has an effect on SREBP-1c and decreased physiologic measures of liver weight (and fatty liver phenotype), adipose tissue weight, cholesterol/triglyceride content, and food intake. Driving decreased fat mass, while maintaining lean mass, provides a therapeutic opportunity in areas such as obesity, diabetes, and cardiovascular health.

[0473] Proline:

[0474] Citrulline is produced from Glutamine as a by-product of a reaction catalyzed by the NOS family. Dietary supplement of citrulline is known to reduce plasma levels of glucose, homocysteine, and asymmetric dimethylarginine, which are risk factors for metabolic syndrome. L-citrulline accelerates the removal of lactic acid from muscles, likely due to the effects on vascular tone and endothelial function. Recent studies have also shown that L-citrulline from watermelon juice provides greater recovery from exercise and less soreness the next day. It also appears that delivery of L-citrulline as a free form results in less uptake into cells in vitro than in the context of watermelon juice (which contains high levels of L-citrulline). This suggests an opportunity to deliver peptide doses, which can traffic arginine into muscle tissue for conversion into citrulline by eNOS at the endothelial membrane for improved efficacy.

[0475] Changes in NO synthesis and polyamines (via Proline), are seen during gestation when placental growth rate peaks, indicating a role for arginine in fetal development during pregnancy.

[0476] Serine:

[0477] Serine is a nonessential amino acid, and is biosynthesized from glycolysis via 3-phosphoglycerate. Serine plays a vital role in intermediary metabolism in that it contributes to phospholipid, sphingolipid, and cysteine biosynthesis as well as tryptophan synthesis in bacteria and is a primary source of glycine. The body has a need for glycine, which probably exceeds dietary intake by 10-50 fold. This demand is not only for the synthesis of protein, particularly collagen, but also for glycine being a precursor for 5 major metabolic biosynthetic pathways: creatine, porphyrins, purines, bile acids, and glutathione. Additionally, due to its role in glycine production, serine is also a major donor of folate-linked one-carbon units that are used in the biosynthesis of purines and 2′ deoxythymidine 5′-monophosphate and the remethylation of homocystein to methionine. It is important to note that for every glycine molecule that is derived from serine, there is one-carbon unit formed. (Cook, R. Defining the steps of the folate one-carbon shuffle and homocysteine metabolism 1′2; Am. J Clin Nutr; 2000)

[0478] In one-carbon metabolism, one-carbon units for biosynthesis are carried and chemically activated by a family of cofactors called tetrahydrofolate (THF) polyglutamates. THF-mediated one-carbon metabolism is a metabolic system of interdependent biosynthetic pathways compartmentalized in the cytoplasm, the mitochondria, and the nucleus. In the cytoplasm, one-carbon metabolism is used for the synthesis of purines and thymidylates and the remethylation of homocysteine to methionine (an overabundance of homocysteine may be harmful to the body). In the mitochondria, one-carbon metabolism is used for the synthesis of formylated methionyl-tRNA; the catabolism of choline, purines, and histidine; and the interconversion of serine and glycine. Additionally, the mitochondria is the primary source for one-carbon units for cytoplasmic metabolism. Disruption of the folate-mediated one-carbon metabolism has been linked with many pathologies and developmental anomalies. (J. T. Fox and P. J. Stover, Chapter 1, Folate-Mediated One-Carbon Metabolism, In: Gerald Litwack, Editor(s), Vitamins & Hormones, Academic Press, 2008, Volume 79, Pages 1-44).

[0479] Serine hydroxymethyltransferase (SHMT) catalyzes the freely reversible interconversion of serine and glycine in a reaction that is both folate- and pyridoxal 5-phosphate dependent. The conversion of serine to glycine involves the removal of the C-3 serine and the formation of 5,10-methylenetetrahydrofolate, which can be utilized in the folate-dependent one-carbon metabolism or oxidized to carbon dioxide via 10-foryltetrahydrofolate (Robert J Cook, Am J Clin Nutr December 2000 vol. 72 no. 6 1419-1420).

[0480] Serine is a precursor for cysteine. Cysteine is synthesized from homocysteine, which is itself synthesized from the metabolism of methionine. Serine is involved in cysteine's synthesis by condensing with homocysteine to form cystathionine. Cystathionine is then deaminated and hydrolyzed to form cysteine and alpha ketobutyrate. Cysteine's sulfur comes from homocysteine, but the rest of the molecule comes from the initial serine residue. The biosynthesis of cysteine occurs via a different mechanism in plants and prokaryotes. Cysteine is a vital amino acid because it plays an important role in protein folding. The disulfide linkages formed between cysteine residues helps to stabilize the tertiary and quaternary structure of proteins, and these disulfide linkages are most common among the secreted proteins, where proteins are exposed to more oxidizing conditions that are found in the cellular interior. Despite the benefits of homocysteine, high levels can be a risk factor for developing cardiovascular disease. Elevated homocysteine may be caused by a genetic deficiency of cystathionine beta-synthase and excess methionine intake may be another explanation. Control of methionine intake and supplementing with folic acid and vitamin B12 in the diet have been used to lower homocysteine levels. Likewise, increased Serine levels to support homocysteine to cysteine conversion can be beneficial.

[0481] N-methyl-D-aspartate (NMDA) is one of the most fundamental neurotransmitters in the brain. It is a glutamate receptor and is a vital molecular device for the control of synaptic plasticity and memory function. This receptor is an ionotropic receptor for glutamate and is characterized by high affinity for glutamate, a high unitary conductance, high calcium permeability, and a voltage-dependent block by magnesium ions. In order for the NMDA receptor to open, it is bound by glutamate and glycine or D-serine. D-serine is a neurotransmitter and a gliotransmitter that is biosynthesized in the brain by serine racemase from L-serine. It is a powerful or potent agonist to glycine for the NMDA receptor binding site. (Jean-Pierre Mothet, et al., Proc Natl Acad Sci USA, 2000, 97 (9) 4926-4931; Zito K and Scheuss V. (2009) NMDA Receptor Function and Physiological Modulation. In: Encyclopedia of Neuroscience (Squire L R, ed), volume 6, pp. 1157-1164. Oxford: Academic Press).

[0482] Serine plays an important role in learning and synaptic plasticity, as a result, serine supplementation can be useful to the elderly, growing children, school age children, and those experiencing learning difficulties. Additionally, it can be given to anyone trying to learn a new task, be it an instrument, or athletes/dancers trying to improve or learn new exercises and movements. Furthermore, due to its role as a precursor for cysteine, may be given as an upstream regulator for the effects of cysteine. As a precursor for the synthesis of glycine, serine may be used in cosmetic products, to combat aging, and promote proper growth because of its role in collagen synthesis. Furthermore, it can be used to improve athletic abilities because of its role in the creatine biosynthetic pathway. Moreover, it may be very useful in the detoxification and immune health because of its role in the glutathionine metabolic pathway.

[0483] Threonine:

[0484] Threonine is an EAA, and is one of the few AAs that is not converted into its L-isomer via transaminases and d-AA oxidases. Threonine is used for the synthesis of mucin protein, which is used for maintaining the integrity and function of the intestines. Mucus, which is composed of mucin and inorganic salts suspended in water, serve as a diffusion barrier against contact with noxious substances such as gastric acid and smoke. Mucus also acts as a lubricant to minimize shear stresses (G. K. Law, et al., Am J Physiol Gastrointest Liver Physiol 292:G1293-G1301, 2007).

[0485] 90% of dietary threonine is used in the gut for mucus synthesis. Mucin is continuously synthesized and is very resistant to intestinal proteolysis, and is therefore not very easily recycled. As such, a substantial and consistent supply of threonine is used in order to effectively maintain gut function and structure. As a result, it is very important that the diet is rich with threonine in order to prevent mucus production from decreasing, which can lead to cancers in the gut, ulcers, etc. (G. K. Law, et al., Am J Physiol Gastrointest Liver Physiol 292:G1293-G1301, 2007; A. Hamard, et al., Journal of Nutritional Biochemistry, October 2010, Volume 21, Issue 10, Pages 914-921). Due to the importance of mucus to the integrity and structure of the gut, threonine supplementation can be useful in the prevention of gut disorder including cancers, ulcers, infections, and erosions.

[0486] Threonine plays a key role in humoral immunity because threonine is a major component of immunoglobulins, which are secreted by B lymphocytes in the blood. Once released, they reach the site of infection, recognize, bind, and inactivate their antigens. Because of the high threonine content of immunoglobulins, a threonine deficiency may have negatively affect immunoglobulin production, and thereby decrease immune response. Threonine supplementation is essential for its role in the immune response and can support leukemia patients, AIDS patients, and individuals who have immunodeficiency. Additionally, it can support those susceptible to infection during the flu season, such as the elderly and small children, as well as throughout the year to strengthen immune response.

[0487] Low Threonine

[0488] There exists a mechanistic understanding of how uncharged tRNA allosterically activates GCN2, leading to downstream phosphorylation of transcription factors related to lipogenesis, protein synthesis, along with many biosynthetic pathways in eukaryotes (SREBP-1c, eIF2a, and GCN4p discussed below). Diets devoid of any EAAs remarkably trigger this signaling within minutes after diet introduction (Hao et. Al., science 2005). Signaling through SREBP-1c has been shown in vivo to have dramatic effects on mobilizing lipid stores by repressing genes related to lipogenesis. SREBP-1c has been shown to specifically act on hepatic lipid synthesis, and an ability to cause a hepatic steatosis phenotype as well as increase in visceral fat mass (Knebel, B. et. Al. Liver-Specific Expression of Transcriptionally Active SREBP-1c Is Associated with Fatty Liver and Increased Visceral Fat Mass. PLoS, 2012). An unbalanced diet lacking Threonine has been shown to signal GCN2 for rats on a basal casein diet with 1-5.4% of an amino acid mixture supplemented lacking Threonine. Threonine deprivation, through its action on GCN2, has an effect on SREBP-1c and decreased physiologic measures of liver weight (and fatty liver phenotype), adipose tissue weight, cholesterol/triglyceride content, and food intake. Driving decreased fat mass, while maintaining lean mass, provides a therapeutic opportunity in areas such as obesity, diabetes, and cardiovascular health.

[0489] Tryptophan:

[0490] Tryptophan is both an EAA that plays an important role in immune functions. For example, concentrations of tryptophan progressively decline due to chronic lung inflammation. This suggests that catabolism of tryptophan via the indoleamine 2,3-dioxygenase (IDO) appears to be very important for function of macrophages and lymphocytes. Thus, antranilic acid (ANS) inhibits the production of proinflammatory T-helper 1 cytokines and prevents autoimmune neuroinflammation. Tryptophan can be used to treat the inflammatory effects of certain diseases include arthritis and asthma or other autoimmune diseases.

[0491] It is also a precursor for serotonin (5-HT) synthesis, a neurotransmitter that affects appetite, sleep and is widely implicated in onset of depression. Abnormality in 5-HT activity in recovered depression patients (on SSRIs or other neurotransmitter re-uptake inhibitors) leads to an acute sensitivity to low levels of Tryptophan in the bloodstream. 5-HT production can be increased 2-fold by oral intake of free Tryptophan, indicating a role for Tryptophan administration in depression. Furthermore, Tryptophan can potentiate the effects of SSRIs due to the apparent dependence on 5-HT availability for improvement in patient outcome.

[0492] Tryptophan can furthermore be used to help in weight loss/maintenance, benefit those suffering from sleep disorders, recovery from travel and jet lag; in addition to those suffering from mood disorders like depression or the effects of PMS.

[0493] Low Tryptophan

[0494] There exists a mechanistic understanding of how uncharged tRNA allosterically activates GCN2, leading to downstream phosphorylation of transcription factors related to lipogenesis, protein synthesis, along with many biosynthetic pathways in eukaryotes (SREBP-1c, eIF2a, and GCN4p discussed below). Diets devoid of any EAAs remarkably trigger this signaling within minutes after diet introduction (Hao et. Al., science 2005). Signaling through SREBP-1c has been shown in vivo to have dramatic effects on mobilizing lipid stores by repressing genes related to lipogenesis. SREBP-1c has been shown to specifically act on hepatic lipid synthesis, and an ability to cause a hepatic steatosis phenotype as well as increase in visceral fat mass (Knebel, B. et. Al. Liver-Specific Expression of Transcriptionally Active SREBP-1c Is Associated with Fatty Liver and Increased Visceral Fat Mass. PLoS, 2012). Tryptophan deprivation, through its action on GCN2, has an effect on SREBP-1c and decreased physiologic measures of liver weight (and fatty liver phenotype), adipose tissue weight, cholesterol/triglyceride content, and food intake. Driving decreased fat mass, while maintaining lean mass, provides a therapeutic opportunity in areas such as obesity, diabetes, and cardiovascular health.

[0495] Tyrosine:

[0496] Tyrosine is a nonessential amino acid that is synthesized from phenylalanine. It is used as a precursor for many important neurotransmitters including, epinephrine, norepinephrine, and dopamine. Tyrosine helps produce melanin, and helps the organs that make and regulate hormones, like the adrenal gland, thyroid gland, and pituitary gland. Additionally, tyrosine is involved in the structure of almost every protein in the body.

[0497] Tyrosine hydroxylase converts L-tyrosine into Levodopa using tetrahydropteridine as a cofactor or by tyrosinase. The conversion that is mediated by tyrosinase specifically oxidizes Levodopa to Dopaquinone, and levodopa is further decarboxylated to Dopamine by Dopa decarboxylase. Dopamine is a very important hormone and neurotransmitter, and plays a vital role in both mental and physical health. Dopamine helps to control the brain's reward and pleasure centers, helps to regulate movement and emotional responses, and enables one to see rewards and take action to move towards those rewards. The neurons that contain dopamine are clustered in the midbrain, in an area called the susbtantia nigra. In those afflicted with Parkinson's disease, the neurons that transmit dopamine in this area die resulting in an inability to control bodily movement. In order to relieve the symptoms of Parkinson's disease, L-Dopa, which can be converted to dopamine is given to the patients.

[0498] Tyrosine supplementation can help in the treatment of Parkinson's disease due to its role as a precursor to L-DOPA and dopamine. Additionally, it can be used in the treatment of those with emotional/psychiatric disorder like depression and in the treatment of addiction. Furthermore, it can promote learning by increasing the reward/pleasure response during learning difficult or complex concepts or movements.

[0499] Dopamine, which is a monoamine catecholamine neurotransmitter, plays a regulatory role in the immune system. Neurotransmitters and neuropeptides that interact with specific receptors present in particular immune effector cells are released by the immune system to influence the functions of these cells in the host against disease and other environmental stress. The immunoregulatory actions of dopamine have been shown to be regulated via five different G protein-coupled receptors that are present in target cells. There are two broad classes of these receptors: G1 and G2, which encompass the varying subtypes. The D1 class of receptors includes D2 and D5 subtypes, and increase intracellular cAMP upon activation. The D2 class of receptors consists of the D2, D3, and D4 subtypes, and has been reported to inhibit intracellular cAMP upon stimulation. Dopamine receptors have been found on normal human leukocytes. Likewise, the lymphoid tissues have dopaminergic innervations through sympathetic nerves, which suggests that dopamine may be able to regulate the immune system effector cells (Basu, Sujit & Sarkar, Chandrani, Dopamine and immune system. SciTopics 2010).

[0500] Dopamine affects T cells by activating the resting T cells and inhibiting the activation of stimulated T cells. In normal resting peripheral human T lymphocytes, dopamine activates the D2 and D3 subclass of receptors, which in turn activates integrins (α4β1 and α5β1). These integrins are heterodimeric transmembrane glycoproteins that attach cells to the extracellular matrix component, fibronectin. Fibronectin is used for the trafficking and extravasation of T cells across the tissue barriers and blood vessels. Furthermore, dopamine acts through the D3 receptors to selectively induce the migration and homing of CD8+ T cells. Moreover, dopamine affects T cells by influencing the secretions of cytokines by the T cells. When dopamine stimulates the D3 and D1/D5 receptors, the secretion of TNF-α (a pleiotropic inflammatory cytokine) is increased. When the D2 receptors are stimulated, IL-10 (an anti-inflammatory cytokine) is induced to secrete. Dopamine, however, can inhibit the activated T cell receptor induced cell proliferation and secretion of a number of cytokines like Il-2, IFN-γ and IL-4 through the down-regulation of the expression of non-receptor tyrosine kinases lck and fyn, which are important tyrosine kinases in the initiation of TCR activation (Basu, Sujit & Sarkar, Chandrani Dopamine and immune system. SciTopics 2010).

[0501] The B cells have a very high expression of dopamine D2, D3, and D5 receptors. Dopamine has the ability to inhibit the proliferation of the resting and the malignant B lymphocytes. Dopamine acts by promoting apoptosis in cycling B cells through oxidative stress. However, this dopaminergic action has not been observed in resting lymphocytes, therefore suggesting a role in the prevention of cancer (Basu, Sujit & Sarkar, Chandrani, Dopamine and immune system. SciTopics 2010).

[0502] Tyrosine, as a precursor for Dopamine, can be used to improve immune responses and improve the overall immune system functionality. It can provide a benefit to the elderly, women who are pregnant, children, and those with compromised immune functions like AIDS patients and cancer patients. It also can be given to teachers, those travelling, and anyone frequently exposed to germs.

[0503] NE is synthesized in the adrenal medulla and postganglionic neurons in the sympathetic nervous system by the β-oxidation of dopamine by β-hydroxylase along with the cofactor ascorbate. It works by being secreted into the synaptic cleft where it stimulates adrenergic receptors, and is then either degraded or up-taken by surrounding cells. As a cathecolamine, it does not cross the blood-brain barrier.

[0504] NE can be used to combat ADHD, depression, and hypotension. In terms of attention disorders, like ADHD, medications prescribed tend to help increase levels of NE and dopamine. Furthermore, depression is typically treated with medications that inhibit the reuptake of serotonin and NE thereby increasing the amount of serotonin and NE that is available in the postsynaptic cells in the brain. Recent evidence has suggested that SNRIs may also increase dopamine transmission because if the norepinephrine transporter ordinarily recycled dopamine as well, then SNRIs will also enhance the dopaminergic transmission. As a result, the effects antidepressants may also be associated with the increased NE levels may partly be due to the simultaneous increase in dopamine (in particular in the prefrontal cortex of the brain).

[0505] NE is used to treat patients with critical hypotension. NE is a vasopressor and acts on both α1 and α2 adrenergic receptors to cause vasoconstriction, thereby increasing the blood pressure.

[0506] As a precursor for NE, Tyrosine can be used to treat attention disorders like ADHD and ADD. Additionally, it can be used to treat those suffering from depression, post-traumatic stress syndrome, and those with acute hypotension.

[0507] Epinephrine, which is popularly known as adrenaline, is a hormone that is secreted by the medulla of the adrenal glands. Epinephrine is released in response to strong emotions such as fear or anger, which causes an increase in heart rate, muscle strength, blood pressure, and sugar metabolism. It is responsible for the flight or fight response that prepares the body for difficult or strenuous activity. Epinephrine is used as a stimulant during cardiac arrest, as a vasoconstrictor during shock to increase blood pressure, and as a bronchodilator and antispasmodic in bronchial asthma. Epinephrine is not found in large quantities in the body, but is nevertheless very important in the maintenance of cardiovascular homeostasis because it has the ability to divert blood to tissues under stress. Epinephrine has this effect by influencing muscle contraction. Contraction of the muscles occurs through the binding calmodulin to calcium ions when the concentration is 10× larger than normal in the cell. The calcium-calmodulin complex then goes on to activate the myosin light chain kinase, which then phosphorylates the LC2 causing the contraction. Epinephrine binds to the epinephrine receptors, which activates adenylyl cyclase, and produces cyclic AMP from ATP. cAMP activates a protein kinase which thus phosphorylates the myosin light chain kinase. This phosphorylated myosin light chain kinase has a lower affinity for the calcium-calmodulin complex, and is thus inactive. As such, the smooth muscle tissue is relaxed. It is this action of epinephrine that makes it very useful in treating asthma, cardiac arrest, and anaphylactic shock. Tyrosine, as a precursor for Epinephrine, can be used for patients who are at risk for cardiac arrest, those suffering from asthma, and those who are at risk for anaphylactic shock.

[0508] Epinephrine is one of two main hormones that breakdown glycogen by binding to a receptor on exterior of a liver cell. This binding causes a conformational change to take place thereby allowing G protein to bind and become active. The activation of the G-protein coupled receptor causes a conformational change on the molecule to occur which causes adenylate cyclase to bind. Once adenylate cyclase binds the complex, adenylate cyclase breaks down ATP into cAMP, which then becomes the second messenger protein in this process and activates protein kinase. The activated protein kinase activates phosphorylase, which is an enzyme that catalyzes breaks down the glycogen to glucose. Tyrosine, as a precursor for Epinephrine, can be used to improve athletic performance by making glucose readily available to fuel exercise.

[0509] Melanin is a metabolite of Tyrosine, and is a powerful antioxidant. Additionally, it is influential in the inhibition of the production of inflammatory cytokines and superoxide. When pro-inflammatory cytokines are overproduced, it mediates the damaging effects of inflammation in pathologic conditions like rheumatoid arthritis, graft vs. host reactions, cachexia, and sepsis syndrome. It has been found that melanin inhibits ongoing cytokine synthesis, which strongly suggests that melanin may be useful as a superimposed therapy for conditions that involve proinflammatory cytokines (Mohagheghpour N., et al., Cell Immunol. 2000 Jan. 10; 199(1):25-36).

[0510] Tyrosine can be used in the treatment of rheumatoid arthritis, cachexia, sepsis syndrome, those with inflammation related to autoimmune disorder, and other inflammatory sequela of pathologic conditions.

[0511] Valine:

[0512] Valine is an EAA, and is also a BCAA. The BCAAs, including valine, serve as fuel sources for skeletal muscle during periods of metabolic stress by promoting protein synthesis, suppressing protein catabolism, and serving as substrates for gluconeogenesis. The BCAAs, including valine, are substrates for glutamine synthesis in animal tissues, and it has been shown that glutamine may play a role in mediating the anabolic effect of BCAAs in animals. Such an effect is likely to be important for the lactating mammary gland because it produces more glutamine than it takes up from arterial blood. Catabolism of BCAAs in the placenta results in glutamine synthesis and its release into the fetal circulation, which is a major source of the glutamine that circulates in the fetus. This suggests that supplementing a diet with Valine as well as the other BCAAs, or a combination thereof, may increase fetal growth in mammals. Additionally, Valine plays a direct role in the synthesis of alanine, and therefore has a regulatory function with regards to alanine.

[0513] BCAAs have been shown to have anabolic effects on protein metabolism by increasing the rate of protein synthesis and decreasing the rate of protein degradation in resting human muscle. Additionally, BCAAs are shown to have anabolic effects in human muscle during post endurance exercise recovery. These effects are mediated through the phosphorylation of mTOR and sequential activation of 70-kD S6 protein kinase (p70-kD S6), and eukaryotic initiation factor 4E-binding protein 1. P70-kD S6 is known for its role in modulating cell-cycle progression, cell size, and cell survival. P70-kD S6 activation in response to mitogen stimulation up-regulates ribosomal biosynthesis and enhances the translational capacity of the cell (W-L An, et al., Am J Pathol. 2003 August; 163(2): 591-607; E. Blomstrand, et al., J. Nutr. January 2006 136: 269S-273S). Eukaryotic initiation factor 4E-binding protein 1 is a limiting component of the multi-subunit complex that recruits 40S ribosomal subunits to the 5′ end of mRNAs. Activation of p70 S6 kinase, and subsequent phosphorylation of the ribosomal protein S6, is associated with enhanced translation of specific mRNAs.

[0514] BCAAs given to subjects during and after one session of quadriceps muscle resistance exercise show an increase in mTOR, p70 S6 kinase, and S6 phosphorylation was found in the recovery period after the exercise. However, there was no such effect of BCAAs on Akt or glycogen synthase kinase 3 (GSK-3). Exercise without BCAA intake leads to a partial phosphorylation of p70 S6 kinase without activating the enzyme, a decrease in Akt phosphorylation, and no change in GSK-3. BCAA infusion also increases p70 S6 kinase phosphorylation in an Akt-independent manner in resting subjects. This mTOR activity regulates cellular protein turnover (autophagy) and integrates insulin-like growth signals to protein synthesis initiation across tissues. This biology has been directly linked to biogenesis of lean tissue mass in skeletal muscle, metabolic shifts in disease states of obesity and insulin resistance, and aging.

[0515] Valine plays a key role in muscle metabolism, tissue repair, and the maintenance of proper nitrogen balance in the body. As one of the three BCAAs, it can be utilized as an energy source by muscle tissue. Valine is a glucogenic AA, and therefore provides glucose. Valine may be useful in the treatment of liver and gallbladder disease. Additionally, valine may be useful in correcting the type of severe AA deficiencies caused by drug addiction. Furthermore, Valine has been found to promote mental vigor, muscle coordination, and calm emotions. It may also be used to prevent muscle loss at high altitudes.

[0516] Valine supplementation can be used to improve athletic performance and muscle formation, aid in drug addiction rehabilitation, to enhance mental vigor in elderly and growing children, prevent muscle loss that accompanies aging, aid those suffering from hepatic disease, support the growing bodies of children, serve as a therapy for gallbladder and liver disease, to increase lactation in mammals, to increase fetal growth in mammals, and improve the nutritive quality of foods given to the starving populations.

[0517] Low Valine

[0518] In states of obesity and diabetes, animals have been shown to exhibit reduced hepatic autophagy, leading to increased insulin resistance. Autophagy is important for maintenance of the ER and cellular homeostasis, which when stressed can lead to impaired insulin sensitivity. High fat diet feeding in animal models stresses the ER, while leading to depressed hepatic autophagy through over-stimulation of mTORC1, which reinforces the progression towards insulin sensitivity impaired beta cell function in diabetes. Reducing the level of systemic Valine provides an opportunity to lower mTORC1 activity and restore healthy levels of autophagy.

[0519] There exists a mechanistic understanding of how uncharged tRNA allosterically activates GCN2, leading to downstream phosphorylation of transcription factors related to lipogenesis and protein synthesis, along with many biosynthetic pathways in eukaryotes (SREBP-1c, eIF2a, and GCN4p discussed below). Diets devoid of any EAAs remarkably trigger this signaling within minutes after diet introduction (Hao et. Al., science 2005). Signaling through SREBP-1c has been shown in vivo to have dramatic effects on mobilizing lipid stores by repressing genes related to lipogenesis. SREBP-1c has been shown to specifically act on hepatic lipid synthesis, and an ability to cause a hepatic steatosis phenotype as well as increase in visceral fat mass (Knebel, B. et. Al. Liver-Specific Expression of Transcriptionally Active SREBP-1c Is Associated with Fatty Liver and Increased Visceral Fat Mass. PLoS, 2012). Valine deprivation, through its action on GCN2, has an effect on SREBP-1c and decreased physiologic measures of liver weight (and fatty liver phenotype), adipose tissue weight, cholesterol/triglyceride content, and food intake. Driving decreased fat mass, while maintaining lean mass, provides a therapeutic opportunity in areas such as obesity, diabetes, and cardiovascular health.

[0520] In vitro analyses of amino acid pharmacology. As provided herein, amino acids behave both as necessary substrates for the synthesis of new proteins and also serve as signaling molecules. Analysis of the pharmacological properties of a given amino acid is dependent on the cell line and model system utilized. For example, the amino acid leucine has been shown to increase phosphorylation of the mammalian target of rapamycin complex I and downstream targets involved in anabolism in skeletal muscle cells (Gran P & D Cameron-Smith. 2011. The actions of exogenous leucine on mTOR signaling and amino acid transporters in human myotubes. BMC Physiol. 11:10). In vitro assays of amino acid pharmacology can also reveal auxotrophies in certain types of cancer. Auxotrophies to methionine have been reported in multiple immortalized cancer cell lines (Cavuoto P & M F Fenech. 2012. A review of methionine dependency and the role of methionine restriction in cancer growth control and life-span extension. Cancer Treat Rev. 38: 726-736).

[0521] An in vitro assay may be designed utilizing amino acids, protein digests, or di- and tri-peptides as the independent or manipulated variable after identifying a relevant cell line. An appropriate cell line is selected based on its relevance as a model of cellular processes. For example, C2C12 (ATCC, CRL-1772) is a murine myoblast cell line that differentiates into myofibers and is used as a model of skeletal muscle fiber differentiation and development. Cells are maintained in a complete medium supplemented with fetal bovine serum up to 10% which supplies necessary growth factors, and penicillin and streptomycin. Adherent cell lines are grown in T75 flasks with phenolic caps for filtered gas exchange and incubated at 37° C. at 5% CO2 in a humidified environment. Table AA lists cell lines that are used to assay amino acid pharmacology. For an in vitro assay, cells are seeded in T75 flasks, 6-, 12-, 24-, 48- or 96-well plates at an appropriate cell density, determined empirically. Following an incubation period the complete growth medium is replaced with medium deficient in the test article. Following a period of medium depletion the test article is added in the appropriate medium. Following the treatment period, the relevant dependent variable is measured.

TABLE AA
List of exemplary cell lines
utilized in vitro assays of amino acid pharmacology.

| Cell Line | Species | Tissue or Cell Type | Systems Modeled |
|---|---|---|---|
| C2C12 | Mus musculus | Skeletal muscle | Skeletal muscle growth and |
| | | | differentiation |
| RSkMC | Rattus | Skeletal muscle | Skeletal muscle growth and |
| | norvegicus | | differentiation |
| 3T3 -L1 | Mus musculus | Embryo | White adipose tissue |
| | | | development |
| CHO-K1 | Cricetulus | Ovary | Heterologous protein |
| | griseus | | expression |
| FHs 74 Int | Homo sapiens | Small intestine | Gastrointestinal and |
| | | | enteroendocrine systems |
| 293T | Homo sapiens | Embryonic kidney | Heterologous protein |
| | | | expression |
| IEC-6 | Rattus | Small | Gastrointestinal and |
| | norvegicus | intestine/epithelium | enteroendocrine systems |
| NCI-H716 | Homo sapiens | Cecum | Gastrointestinal and |
| | | | enteroendocrine systems |
| STC-1 | Mus musculus | Intestine | Gastrointestinal and |
| | | | enteroendocrine systems |
| MCF-7 | Homo sapiens | Lung | Breast cancer |
| | | | adenocarcinoma |
| LNCaP clone | Homo sapiens | Prostate | Prostate cancer carcinoma |
| FGC | | | |
| PC-3 | Homo sapiens | Prostate | Prostate cancer |
| | | | adenocarcinoma |

[0522] See, e.g., Wu, G. Amino acids: Metabolism, functions, and nutrition. Amino Acids 37(1):1-17 (2009); Wu, G. Functional amino acids in nutrition and health. Amino Acids 45(3):407-11 (2013); Schworer, C. Glucagon-induced autophagy and proteolysis in rat liver: Mediation by selective deprivation of intracellular amino acids. PNAS 76(7):3169-73 (1979); Codongo, P. Autophagy: A Potential Link between Obesity and Insulin Resistance. Cell Metabolism 11(6):449-51 (2010); Leong, H et. al. Short-term arginine deprivation results in large-scale modulation of hepatic gene expression in both normal and tumor cells: microarray bioinformatic analysis. Nutrition and metabolism 3:37 (2006); Harbrecht, B. G. Glutathione regulates nitric oxide synthase in cultured hepatocytes. Annals of Surgery 225(1): 76-87 (1997); Watermelon juice: a potential functional drunk for sore muscle relief in athletes. J. Agric. Food Chem. 61(31):7522-8 (2013).

[0523] Secreted Nutritive Polypeptides.

[0524] In another aspect, provided are nutritive polypeptides that contain the amino acid sequences of edible species polypeptides, which are engineered to be secreted from unicellular organisms and purified therefrom. Such nutritive polypeptides can be endogenous to the host cell or exogenous, and can be naturally secreted in either the polypeptide or the host cell, or both, and are engineered for secretion of the nutritive polypeptide.

[0525] Advantageous properties of a nutritive polypeptide include the ability to be expressed and secreted in a host cell, solubility in a wide variety of solvents, and when consumed by an intended subject, nutritional benefit, reduced allergenicity or non-allergenicity, lack of toxicity, and digestibility. Such properties can be weighted based, at least in part, on the intended consumer and the reason(s) for consumption of the nutritive polypeptide (e.g., for general health, muscle anabolism, immune health, or treatment or prevention of a disease, disorder or condition). One or multiple nutritional criteria are satisfied for example, by computing the mass fractions of all relevant amino acid(s) based on primary sequence.

[0526] By way of non-limiting examples, polypeptides of the present invention are provided in Table 1. The Predicted leader column shows the sequence indices of predicted leaders (if a leader exists). The Fragment Indices column shows the sequence indices of fragment sequences. The DBID column lists either the UniProt or GenBank Accession numbers for each sequence as available as of Sep. 24, 2014, each of which is herein incorporated by reference. DBIDs with only numerical characters are from a GenBank database, and those with mixed alphabetical/numerical characters are from a UniProt database.

[0527] Nucleic Acids

[0528] Also provided herein are nucleic acids encoding polypeptides or proteins. In some embodiments the nucleic acid is isolated. In some embodiments the nucleic acid is purified.

[0529] In some embodiments of the nucleic acid, the nucleic acid comprises a nucleic acid sequence that encodes a first polypeptide sequence disclosed herein. In some embodiments of the nucleic acid, the nucleic acid consists of a nucleic acid sequence that encodes a first polypeptide sequence disclosed herein. In some embodiments of the nucleic acid, the nucleic acid comprises a nucleic acid sequence that encodes a protein disclosed herein. In some embodiments of the nucleic acid, the nucleic acid consists of a nucleic acid sequence that encodes a protein disclosed herein. In some embodiments of the nucleic acid the nucleic acid sequence that encodes the first polypeptide sequence is operatively linked to at least one expression control sequence. For example, in some embodiments of the nucleic acid the nucleic acid sequence that encodes the first polypeptide sequence is operatively linked to a promoter such as a promoter described herein.

[0530] Accordingly, in some embodiments the nucleic acid molecule of this disclosure encodes a polypeptide or protein that itself is a polypeptide or protein. Such a nucleic acid molecule can be referred to as a “nucleic acid.” In some embodiments the nucleic acid encodes a polypeptide or protein that itself comprises at least one of: a) a ratio of branched chain amino acid residues to total amino acid residues of at least 24%; b) a ratio of Leu residues to total amino acid residues of at least 11%; and c) a ratio of essential amino acid residues to total amino acid residues of at least 49%. In some embodiments the nucleic acid comprises at least 10 nucleotides, at least 20 nucleotides, at least 30 nucleotides, at least 40 nucleotides, at least 50 nucleotides, at least 60 nucleotides, at least 70 nucleotides, at least 80 nucleotides, at least 90 nucleotides, at least 100 nucleotides, at least 200 nucleotides, at least 300 nucleotides, at least 400 nucleotides, at least 500 nucleotides, at least 600 nucleotides, at least 700 nucleotides, at least 800 nucleotides, at least 900 nucleotides, at least 1,000 nucleotides. In some embodiments the nutritrive nucleic acid comprises from 10 to 100 nucleotides, from 20 to 100 nucleotides, from 10 to 50 nucleotides, or from 20 to 40 nucleotides. In some embodiments the nucleic acid comprises all or part of an open reading frame that encodes an edible species polypeptide or protein. In some embodiments the nucleic acid consists of an open reading frame that encodes a fragment of an edible species protein, wherein the open reading frame does not encode the complete edible species protein.

[0531] In some embodiments the nucleic acid is a cDNA.

[0532] In some embodiments nucleic acid molecules are provided that comprise a sequence that is at least 50%, 60%, 70%, 80%, 85%, 90%, 95%, 96%, 97%, 98%, 99%, or 99.9% identical to an edible species nucleic acid. In some embodiments nucleic acids are provided that hybridize under stringent hybridization conditions with at least one reference nucleic acid.

[0533] The nucleic acids and fragments thereof provided in this disclosure display utility in a variety of systems and methods. For example, the fragments can be used as probes in various hybridization techniques. Depending on the method, the target nucleic acid sequences can be either DNA or RNA. The target nucleic acid sequences can be fractionated (e.g., by gel electrophoresis) prior to the hybridization, or the hybridization can be performed on samples in situ. One of skill in the art will appreciate that nucleic acid probes of known sequence find utility in determining chromosomal structure (e.g., by Southern blotting) and in measuring gene expression (e.g., by Northern blotting). In such experiments, the sequence fragments are preferably detectably labeled, so that their specific hydridization to target sequences can be detected and optionally quantified. One of skill in the art will appreciate that the nucleic acid fragments of this disclosure can be used in a wide variety of blotting techniques not specifically described herein.

[0534] It should also be appreciated that the nucleic acid sequence fragments disclosed herein also find utility as probes when immobilized on microarrays. Methods for creating microarrays by deposition and fixation of nucleic acids onto support substrates are well known in the art. Reviewed in DNA Microarrays: A Practical Approach (Practical Approach Series), Schena (ed.), Oxford University Press (1999) (ISBN: 0199637768); Nature Genet. 21(1)(suppl):1-60 (1999); Microarray Biochip: Tools and Technology, Schena (ed.), Eaton Publishing Company/BioTechniques Books Division (2000) (ISBN: 1881299376), the disclosures of which are incorporated herein by reference in their entireties. Analysis of, for example, gene expression using microarrays comprising nucleic acid sequence fragments, such as the nucleic acid sequence fragments disclosed herein, is a well-established utility for sequence fragments in the field of cell and molecular biology. Other uses for sequence fragments immobilized on microarrays are described in Gerhold et al., Trends Biochem. Sci. 24:168-173 (1999) and Zweiger, Trends Biotechnol. 17:429-436 (1999); DNA Microarrays: A Practical Approach (Practical Approach Series), Schena (ed.), Oxford University Press (1999) (ISBN: 0199637768); Nature Genet. 21(1)(suppl):1-60 (1999); Microarray Biochip: Tools and Technology, Schena (ed.), Eaton Publishing Company/BioTechniques Books Division (2000) (ISBN: 1881299376).

[0535] Expression

[0536] Vectors

[0537] Also provided are one or more vectors, including expression vectors, which comprise at least one of the nucleic acid molecules disclosed herein, as described further herein. In some embodiments, the vectors comprise at least one isolated nucleic acid molecule encoding a protein as disclosed herein. In alternative embodiments, the vectors comprise such a nucleic acid molecule operably linked to one or more expression control sequence. The vectors can thus be used to express at least one recombinant protein in a recombinant microbial host cell. In some aspects, a vector or set of vectors can include a nucleic acid sequence coding for a signal peptide, e.g., to cause secretion of a protein disclosed herein. See below for further discussion of signal peptides and secretion.

[0538] Suitable vectors for expression of nucleic acids in microorganisms are well known to those of skill in the art. Suitable vectors for use in cyanobacteria are described, for example, in Heidorn et al., “Synthetic Biology in Cyanobacteria: Engineering and Analyzing Novel Functions,” Methods in Enzymology, Vol. 497, Ch. 24 (2011). Exemplary replicative vectors that can be used for engineering cyanobacteria as disclosed herein include pPMQAK1, pSL1211, pFC1, pSB2A, pSCR119/202, pSUN119/202, pRL2697, pRL25C, pRL1050, pSG111M, and pPBH201.

[0539] Other vectors such as pJB161 which are capable of receiving nucleic acid sequences disclosed herein may also be used. Vectors such as pJB161 comprise sequences which are homologous with sequences present in plasmids endogenous to certain photosynthetic microorganisms (e.g., plasmids pAQ1, pAQ3, and pAQ4 of certain Synechococcus species). Examples of such vectors and how to use them is known in the art and provided, for example, in Xu et al., “Expression of Genes in Cyanobacteria: Adaptation of Endogenous Plasmids as Platforms for High-Level Gene Expression in Synechococcus sp. PCC 7002,” Chapter 21 in Robert Carpentier (ed.), “Photosynthesis Research Protocols,” Methods in Molecular Biology, Vol. 684, 2011, which is hereby incorporated herein by reference. Recombination between pJB161 and the endogenous plasmids in vivo yield engineered microbes expressing the genes of interest from their endogenous plasmids. Alternatively, vectors can be engineered to recombine with the host cell chromosome, or the vector can be engineered to replicate and express genes of interest independent of the host cell chromosome or any of the host cell's endogenous plasmids.

[0540] A further example of a vector suitable for recombinant protein production is the pET system (Novagen®). This system has been extensively characterized for use in E. coli and other microorganisms. In this system, target genes are cloned in pET plasmids under control of strong bacteriophage T7 transcription and (optionally) translation signals; expression is induced by providing a source of T7 RNA polymerase in the host cell. T7 RNA polymerase is so selective and active that, when fully induced, almost all of the microorganism's resources are converted to target gene expression; the desired product can comprise more than 50% of the total cell protein a few hours after induction. It is also possible to attenuate the expression level simply by lowering the concentration of inducer. Decreasing the expression level may enhance the soluble yield of some target proteins. In some embodiments this system also allows for maintenance of target genes in a transcriptionally silent un-induced state.

[0541] In some embodiments of using this system, target genes are cloned using hosts that do not contain the T7 RNA polymerase gene, thus alleviating potential problems related to plasmid instability due to the production of proteins potentially toxic to the host cell. Once established in a non-expression host, target protein expression can be initiated either by infecting the host with λCE6, a phage that carries the T7 RNA polymerase gene under the control of the λ pL and pI promoters, or by transferring the plasmid into an expression host containing a chromosomal copy of the T7 RNA polymerase gene under lacUV5 control. In the second case, expression is induced by the addition of IPTG or lactose to the bacterial culture or using an autoinduction medium. Other plasmids systems that are controlled by the lac operator, but do not require the T7 RNA polymerase gene and rely upon E. coli's native RNA polymerase include the pTrc plasmid suite (Invitrogen) or pQE plasmid suite (QIAGEN).

[0542] In other embodiments it is possible to clone directly into expression hosts. Two types of T7 promoters and several hosts that differ in their stringency of suppressing basal expression levels are available, providing great flexibility and the ability to optimize the expression of a wide variety of target genes.

[0543] Suitable vectors for expression of nucleic acids in mammalian cells typically comprise control functions provided by viral regulatory elements. For example, commonly used promoters are derived from polyoma virus, Adenovirus 2, cytomegalovirus, or Simian Virus 40.

[0544] Promoters

[0545] Promoters useful for expressing the recombinant genes described herein include both constitutive and inducible/repressible promoters. Examples of inducible/repressible promoters include nickel-inducible promoters (e.g., PnrsA, PnrsB; see, e.g., Lopez-Mauy et al., Cell (2002) v. 43: 247-256) and urea repressible promoters such as PnirA (described in, e.g., Qi et al., Applied and Environmental Microbiology (2005) v. 71: 5678-5684). Additional examples of inducible/repressible promoters include PnirA (promoter that drives expression of the nirA gene, induced by nitrate and repressed by urea) and Psuf (promoter that drives expression of the sufB gene, induced by iron stress). Examples of constitutive promoters include Pcpc (promoter that drives expression of the cpc operon), Prbc (promoter that drives expression of rubisco), PpsbAII (promoter that drives expression of PpsbAII), Pcro (lambda phage promoter that drives expression of cro). In other embodiments, a PaphIl and/or a lacIq-Ptrc promoter can used to control expression. Where multiple recombinant genes are expressed in an engineered microorganism, the different genes can be controlled by different promoters or by identical promoters in separate operons, or the expression of two or more genes can be controlled by a single promoter as part of an operon.

[0546] Further non-limiting examples of inducible promoters may include, but are not limited to, those induced by expression of an exogenous protein (e.g., T7 RNA polymerase, SP6 RNA polymerase), by the presence of a small molecule (e.g., IPTG, galactose, tetracycline, steroid hormone, abscisic acid), by absence of small molecules (e.g., CO₂, iron, nitrogen), by metals or metal ions (e.g., copper, zinc, cadmium, nickel), and by environmental factors (e.g., heat, cold, stress, light, darkness), and by growth phase. In some embodiments, the inducible promoter is tightly regulated such that in the absence of induction, substantially no transcription is initiated through the promoter. In some embodiments, induction of the promoter does not substantially alter transcription through other promoters. Also, generally speaking, the compound or condition that induces an inducible promoter is not naturally present in the organism or environment where expression is sought.

[0547] In some embodiments, the inducible promoter is induced by limitation of CO₂ supply to a cyanobacteria culture. By way of non-limiting example, the inducible promoter can be the promoter sequence of Synechocystis PCC 6803 that are up-regulated under the CO2-limitation conditions, such as the cmp genes, ntp genes, ndh genes, sbt genes, chp genes, and rbc genes, or a variant or fragment thereof.

[0548] In some embodiments, the inducible promoter is induced by iron starvation or by entering the stationary growth phase. In some embodiments, the inducible promoter can be variant sequences of the promoter sequence of cyanobacterial genes that are up-regulated under Fe-starvation conditions such as isiA, or when the culture enters the stationary growth phase, such as isiA, phrA, sigC, sigB, and sigH genes, or a variant or fragment thereof.

[0549] In some embodiments, the inducible promoter is induced by a metal or metal ion. By way of non-limiting example, the inducible promoter can be induced by copper, zinc, cadmium, mercury, nickel, gold, silver, cobalt, and bismuth or ions thereof. In some embodiments, the inducible promoter is induced by nickel or a nickel ion. In some embodiments, the inducible promoter is induced by a nickel ion, such as Ni²⁺. In another exemplary embodiment, the inducible promoter is the nickel inducible promoter from Synechocystis PCC 6803. In another embodiment, the inducible promoter can be induced by copper or a copper ion. In yet another embodiment, the inducible promoter can be induced by zinc or a zinc ion. In still another embodiment, the inducible promoter can be induced by cadmium or a cadmium ion. In yet still another embodiment, the inducible promoter can be induced by mercury or a mercury ion. In an alternative embodiment, the inducible promoter can be induced by gold or a gold ion. In another alternative embodiment, the inducible promoter can be induced by silver or a silver ion. In yet another alternative embodiment, the inducible promoter can be induced by cobalt or a cobalt ion. In still another alternative embodiment, the inducible promoter can be induced by bismuth or a bismuth ion.

[0550] In some embodiments, the promoter is induced by exposing a cell comprising the inducible promoter to a metal or metal ion. The cell can be exposed to the metal or metal ion by adding the metal to the microbial growth media. In certain embodiments, the metal or metal ion added to the microbial growth media can be efficiently recovered from the media. In other embodiments, the metal or metal ion remaining in the media after recovery does not substantially impede downstream processing of the media or of the bacterial gene products.

[0551] Further non-limiting examples of constitutive promoters include constitutive promoters from Gram-negative bacteria or a bacteriophage propagating in a Gram-negative bacterium. For instance, promoters for genes encoding highly expressed Gram-negative gene products can be used, such as the promoter for Lpp, OmpA, rRNA, and ribosomal proteins. Alternatively, regulatable promoters can be used in a strain that lacks the regulatory protein for that promoter. For instance P_{lac}, P_{tac}, and P_{trc}, can be used as constitutive promoters in strains that lack Lad. Similarly, P22 P_{R} and P_{L} can be used in strains that lack the lambda C2 repressor protein, and lambda P_{R} and P_{L} can be used in strains that lack the lambda C1 repressor protein. In one embodiment, the constitutive promoter is from a bacteriophage. In another embodiment, the constitutive promoter is from a Salmonella bacteriophage. In yet another embodiment, the constitutive promoter is from a cyanophage. In some embodiments, the constitutive promoter is a Synechocystis promoter. For instance, the constitutive promoter can be the PpsbAII promoter or its variant sequences, the Prbc promoter or its variant sequences, the P_{cpc} promoter or its variant sequences, and the PrnpB promoter or its variant sequences.

[0552] Hosts

[0553] Also provided are host cells transformed with the nucleic acid molecules or vectors disclosed herein, and descendants thereof. In some embodiments the host cells are microbial cells. In some embodiments, the host cells carry the nucleic acid sequences on vectors, which may but need not be freely replicating vectors. In other embodiments, the nucleic acids have been integrated into the genome of the host cells and/or into an endogenous plasmid of the host cells. The transformed host cells find use, e.g., in the production of recombinant proteins disclosed herein.

[0554] A variety of host microorganisms can be transformed with a nucleic acid sequence disclosed herein and can in some embodiments be used to produce a recombinant protein disclosed herein. Suitable host microorganisms include both autotrophic and heterotrophic microbes. In some applications the autotrophic microorganisms allows for a reduction in the fossil fuel and/or electricity inputs required to make a protein encoded by a recombinant nucleic acid sequence introduced into the host microorganism. This, in turn, in some applications reduces the cost and/or the environmental impact of producing the protein and/or reduces the cost and/or the environmental impact in comparison to the cost and/or environmental impact of manufacturing alternative proteins, such as whey, egg, and soy. For example, the cost and/or environmental impact of making a protein disclosed herein using a host microorganism as disclosed herein is in some embodiments lower that the cost and/or environmental impact of making whey protein in a form suitable for human consumption by processing of cow's milk.

[0555] Non-limiting examples of heterotrophs include Escherichia coli, Salmonella typhimurium, Bacillus subtilis, Bacillus megaterium, Corynebacterium glutamicum, Streptomyces coelicolor, Streptomyces lividans, Streptomyces vanezuelae, Streptomyces roseosporus, Streptomyces fradiae, Streptomyces griseus, Streptomyces calvuligerus, Streptomyces hygroscopicus, Streptomyces platensis, Saccharopolyspora erythraea, Corynebacterium glutamicum, Aspergillus niger, Aspergillus nidulans, Aspergillus oryzae, Aspergillus terreus, Aspergillus sojae, Penicillium chrysogenum, Trichoderma reesei, Clostridium acetobutylicum, Clostridium beijerinckii, Clostridium thermocellum, Fusibacter paucivorans, Saccharomyces cerevisiae, Saccharomyces boulardii, Pichia pastoris, and Pichia stipitis.

[0556] Photoautotrophic microrganisms include eukaryotic algae, as well as prokaryotic cyanobacteria, green-sulfur bacteria, green non-sulfur bacteria, purple sulfur bacteria, and purple non-sulfur bacteria. Extremophiles are also contemplated as suitable organisms. Such organisms are provided, e.g., in Mixotrophic organisms are also suitable organisms. Algae and cyanobacteria are contemplated as suitable organisms. See the organisms disclosed in, e.g., PCT/US2013/032232, filed Mar. 15, 2013, PCT/US2013/032180, filed Mar. 15, 2013, PCT/US2013/032225, filed Mar. 15, 2013, PCT/US2013/032218, filed Mar. 15, 2013, PCT/US2013/032212, filed Mar. 15, 2013, PCT/US2013/032206, filed Mar. 15, 2013, and PCT/US2013/038682, filed Apr. 29, 2013

[0557] Yet other suitable organisms include synthetic cells or cells produced by synthetic genomes as described in Venter et al. US Pat. Pub. No. 2007/0264688, and cell-like systems or synthetic cells as described in Glass et al. US Pat. Pub. No. 2007/0269862.

[0558] Still other suitable organisms include Escherichia coli, Acetobacter aceti, Bacillus subtilis, yeast and fungi such as Clostridium ljungdahlii, Clostridium thermocellum, Penicillium chrysogenum, Pichia pastoris, Saccharomyces cerevisiae, Schizosaccharomyces pombe, Pseudomonas fluorescens, or Zymomonas mobilis. In some embodiments those organisms are engineered to fix carbon dioxide while in other embodiments they are not.

[0559] In some embodiments eukaryotic cells, such as insect cells or mammalian cells, such as human cells are used as host cells. Vectors and expression control sequences including promoters and enhancers are well known for such cells. Examples of useful mammalian host cell lines for this purpose are monkey kidney CV1 line transformed by SV40 (COS-7, ATCC CRL 1651); human embryonic kidney line (293 or 293 cells subcloned for growth in suspension culture, Graham et al., J. Gen Virol. 36:59 (1977)); baby hamster kidney cells (BHK, ATCC CCL 10); Chinese hamster ovary cells/−DHFR (CHO, Urlaub et al., Proc. Natl. Acad. Sci. USA 77:4216 (1980)); mouse sertoli cells (TM4, Mather, Biol. Reprod. 23:243-251 (1980)); monkey kidney cells (CV1 ATCC CCL 70); African green monkey kidney cells (VERO-76, ATCC CRL-1587); human cervical carcinoma cells (HELA, ATCC CCL 2); canine kidney cells (MDCK, ATCC CCL 34); buffalo rat liver cells (BRL 3A, ATCC CRL 1442); human lung cells (W138, ATCC CCL 75); human liver cells (Hep G2, HB 8065); mouse mammary tumor (MMT 060562, ATCC CCL51); TRI cells (Mather et al., Annals N.Y. Acad. Sci. 383:44-68 (1982)); MRC 5 cells; FS4 cells; and a human hepatoma line (Hep G2).

[0560] Transfection

[0561] Proteins can be produced in a host cell using, for example, a combination of recombinant DNA techniques and gene transfection methods as is well known in the art (e.g., Morrison, S. (1985) Science 229:1202). For expression of the protein, the expression vector(s) encoding the protein is transfected into a host cell by standard techniques. The various forms of the term transfection are intended to encompass a wide variety of techniques commonly used for the introduction of exogenous DNA into a prokaryotic or eukaryotic host cell, e.g., electroporation, calcium-phosphate precipitation, DEAE-dextran transfection and the like.

[0562] Production

[0563] Skilled artisans are aware of many suitable methods available for culturing recombinant cells to produce (and optionally secrete) a protein as disclosed herein, as well as for purification and/or isolation of expressed proteins. The methods chosen for protein purification depend on many variables, including the properties of the protein of interest, its location and form within the cell, the vector, host strain background, and the intended application for the expressed protein. Culture conditions can also have an effect on solubility and localization of a given target protein. Many approaches can be used to purify target proteins expressed in recombinant microbial cells as disclosed herein, including without limitation ion exchange and gel filtration.

[0564] In some embodiments a peptide fusion tag is added to the recombinant protein making possible a variety of affinity purification methods that take advantage of the peptide fusion tag. In some embodiments, the use of an affinity method enables the purification of the target protein to near homogeneity in one step. Purification may include cleavage of part or all of the fusion tag with enterokinase, factor Xa, thrombin, or HRV 3C proteases, for example. In some embodiments, before purification or activity measurements of an expressed target protein, preliminary analysis of expression levels, cellular localization, and solubility of the target protein is performed. The target protein can be found in any or all of the following fractions: soluble or insoluble cytoplasmic fractions, periplasm, or medium. Depending on the intended application, preferential localization to inclusion bodies, medium, or the periplasmic space can be advantageous, in some embodiments, for rapid purification by relatively simple procedures.

[0565] While Escherichia coli is widely regarded as a robust host for heterologous protein expression, it is also widely known that over-expression of many proteins in this host is prone to aggregation in the form of insoluble inclusion bodies. One of the most commonly used methods for either rescuing inclusion body formation, or to improve the titer of the protein itself, is to include an amino-terminal maltose-binding protein (MBP) (Austin B P, Nallamsetty S, Waugh D S. Hexahistidine-tagged maltose-binding protein (“Hexahistidine” disclosed as SEQ ID NO: 4129) as a fusion partner for the production of soluble recombinant proteins in Escherichia coli. Methods Mol Biol. 2009; 498:157-72), or small ubiquitin-related modifier (SUMO) (Saitoh H, Uwada J, Azusa K. Strategies for the expression of SUMO-modified target proteins in Escherichia coli. Methods Mol Biol. 2009; 497:211-21; Malakhov M P, Mattern M R, Malakhova O A, Drinker M, Weeks S D, Butt T R. SUMO fusions and SUMO-specific protease for efficient expression and purification of proteins. J Struct Funct Genomics. 2004; 5(1-2):75-86; Panavas T, Sanders C, Butt T R. SUMO fusion technology for enhanced protein production in prokaryotic and eukaryotic expression systems. Methods Mol Biol. 2009; 497:303-17) fusion to the protein of interest. These two proteins are expressed extremely well, and in the soluble form, in Escherichia coli such that the protein of interest is also effectively produced in the soluble form. The protein of interest can be cleaved by designing a site specific protease recognition sequence (such as the tobacco etch virus (TEV) protease) in-between the protein of interest and the fusion protein. In some embodiments, a protein of interest can be present in an inclusion body; in some aspects the inclusion body can be formulated for delivery to a subject. Formulation is discussed in further detail below.

[0566] In some embodiments the protein is initially not folded correctly or is insoluble. A variety of methods are well known for refolding of insoluble proteins. Most protocols comprise the isolation of insoluble inclusion bodies by centrifugation followed by solubilization under denaturing conditions. The protein is then dialyzed or diluted into a non-denaturing buffer where refolding occurs. Because every protein possesses unique folding properties, the optimal refolding protocol for any given protein can be empirically determined by a skilled artisan. Optimal refolding conditions can, for example, be rapidly determined on a small scale by a matrix approach, in which variables such as protein concentration, reducing agent, redox treatment, divalent cations, etc., are tested. Once the optimal concentrations are found, they can be applied to a larger scale solubilization and refolding of the target protein.

[0567] In some embodiments the protein does not comprise a tertiary structure. In some embodiments less than half of the amino acids in the protein partipate in a tertiary structure. In some embodiments the protein does not comprise a secondary structure. In some embodiments less than half of the amino acids in the protein partipate in a secondary structure. Recombinant proteins can be isolated from a culture of cells expressing them in a state that comprises one or more of these structural features. In some embodiments the tertiary structure of a recombinant protein is reduced or eliminated after the protein is isolated from a culture producing it. In some embodiments the secondary structure of a recombinant protein is reduced or eliminated after the protein is isolated from a culture producing it.

[0568] In some embodiments a CAPS buffer at alkaline pH in combination with N-lauroylsarcosine is used to achieve solubility of the inclusion bodies, followed by dialysis in the presence of DTT to promote refolding. Depending on the target protein, expression conditions, and intended application, proteins solubilized from washed inclusion bodies can be >90% homogeneous and may not require further purification. Purification under fully denaturing conditions (before refolding) is possible using His•Tag® fusion proteins and His•Bind® immobilized metal affinity chromatography (Novogen®). In addition, S•Tag™ T7•Tag®, and Strep•Tag® II fusion proteins solubilized from inclusion bodies using 6 M urea can be purified under partially denaturing conditions by dilution to 2 M urea (S•Tag and T7•Tag) or 1 M urea (Strep•Tag II) prior to chromatography on the appropriate resin. Refolded fusion proteins can be affinity purified under native conditions using His•Tag, S•Tag, Strep•Tag II, and other appropriate affinity tags (e.g., GST•Tag™, and T7•Tag) (Novogen®).

[0569] In some embodiments the protein is an endogenous protein of the host cell used to express it. That is, the cellular genome of the host cell comprises an open reading frame that encodes the recombinant protein. In some embodiments regulatory sequences sufficient to increase expression of the protein are inserted into the host cell genome and operatively linked to the endogenous open reading frame such that the regulatory sequences drive overexpression of the recombinant protein from a recombinant nucleic acid. In some embodiments heterologous nucleic acid sequences are fused to the endogenous open reading frame of the protein and cause the protein to be synthesized comprising a heterologous amino acid sequence that changes the cellular trafficking of the recombinant protein, such as directing it to an organelle or to a secretion pathway. In some embodiments an open reading frame that encodes the endogeneous host cell protein is introduced into the host cell on a plasmid that further comprises regulatory sequences operatively linked to the open reading frame. In some embodiments the recombinant host cell expresses at least 2 times, at least 3 times, at least 4 times, at least 5 times, at least 10 times, or at least 20 times, at least 30 times, at least 40 times, at least 50 times, or at least 100 times more of the recombinant protein than the amount of the protein produced by a similar host cell grown under similar conditions.

[0570] Production of Recombinant Proteins in Plants

[0571] Nutritive polypeptides can be produced recombinantly from plants, including but not limited to those organisms and methods of production disclosed in PCT/US2013/032232, filed Mar. 15, 2013, PCT/US2013/032180, filed Mar. 15, 2013, PCT/US2013/032225, filed Mar. 15, 2013, PCT/US2013/032218, filed Mar. 15, 2013, PCT/US2013/032212, filed Mar. 15, 2013, PCT/US2013/032206, filed Mar. 15, 2013, and PCT/US2013/038682, filed Apr. 29, 2013 and any phylogenetically related organisms, and other methods of production known in the art.

[0572] Purification

[0573] Secreted

[0574] It is generally recognized that nearly all secreted bacterial proteins, and those proteins from other unicellular hosts, are synthesized as pre-proteins that contain N-terminal sequences known as signal peptides. These signal peptides influence the final destination of the protein and the mechanisms by which they are transported. Most signal peptides can be placed into one of four groups based on their translocation mechanism (e.g., Sec- or Tat-mediated) and the type of signal peptidase used to cleave the signal peptide from the preprotein. Also provided are N-terminal signal peptides containing a lipoprotein signal peptide. Although proteins carrying this type of signal are transported via the Sec translocase, their peptide signals tend to be shorter than normal Sec-signals and they contain a distinct sequence motif in the C-domain known as the lipo box (L(AS)(GA)C) at the −3 to +1 position. The cysteine at the +1 position is lipid modified following translocation whereupon the signal sequence is cleaved by a type II signal peptidase. Also provided are type IV or prepilin signal peptides, wherein type IV peptidase cleavage domains are localized between the N- and H-domain rather than in the C-domain common in other signal peptides.

[0575] As provided herein, the signal peptides can be attached to a heterologous polypeptide sequence (i.e., different than the protein the signal peptide is derived or obtained from) containing a nutritive polypeptide, in order to generate a recombinant nutritive polypeptide sequence. Alternatively, if a nutritive polypeptide is naturally secreted in the host organism, it can be sufficient to use the native signal sequence or a variety of signal sequences that directs secretion. In some embodiments of the nutritive polypeptides, the heterologous nutritive polypeptide sequence attached to the carboxyl terminus of the signal peptide is an edible species eukaryotic protein, a mutein or derivative thereof, or a polypeptide nutritional domain. In other embodiments of the polypeptide, the heterologous nutritive polypeptide sequence attached to the carboxyl terminus of the signal peptide is an edible species intracellular protein, a mutein or derivative thereof, or a polypeptide nutritional domain.

[0576] Purification of Nutritive Polypeptides.

[0577] Also provided are methods for recovering the secreted nutritive polypeptide from the culture medium. In some embodiments the secreted nutritive polypeptide is recovered from the culture medium during the exponential growth phase or after the exponential growth phase (e.g., in pre-stationary phase or stationary phase). In some embodiments the secreted nutritive polypeptide is recovered from the culture medium during the stationary phase. In some embodiments the secreted nutritive polypeptide is recovered from the culture medium at a first time point, the culture is continued under conditions sufficient for production and secretion of the recombinant nutritive polypeptide by the microorganism, and the recombinant nutritive polypeptide is recovered from the culture medium at a second time point. In some embodiments the secreted nutritive polypeptide is recovered from the culture medium by a continuous process. In some embodiments the secreted nutritive polypeptide is recovered from the culture medium by a batch process. In some embodiments the secreted nutritive polypeptide is recovered from the culture medium by a semi-continuous process. In some embodiments the secreted nutritive polypeptide is recovered from the culture medium by a fed-batch process. Those skilled in the art are aware of many suitable methods available for culturing recombinant cells to produce (and optionally secrete) a recombinant nutritive polypeptide as disclosed herein, as well as for purification and/or isolation of expressed recombinant polypeptides. The methods chosen for polypeptide purification depend on many variables, including the properties of the polypeptide of interest. Various methods of purification are known in the art including diafilitration, precipitation, and chromatography.

[0578] Non-Secreted

[0579] In some aspects, proteins can be isolated in the absence of secretion. For example, a cell having the protein (e.g., on the cell surface or intracellularly) can be lysed and the protein can be purified using standard methods such as chromatography or antibody-based isolation of the protein from the lysate. In some aspects, a cell surface expressed protein can be enzymatically cleaved from the surface.

[0580] Isolation of Nutritive Polypeptides from Biological Materials from Edible Species

[0581] In some embodiments a nutritive polypeptide having a desired amino acid or plurality of amino acids, which are optionally present in a desired amino acid sequence, is isolated or purified from a food source, or from a biological material from an edible species. For example, a biological material of a plant includes nuts, seeds, leaves, and roots; a biological material of a mammal includes milk, muscle, sera, and liver. Isolation methods include solubilization, chromatography, and precipitation.

[0582] Nutritive polypeptides are isolated from biological materials by specific solubilization of the targeted nutritive polypeptide. The biological material is suspended and homogenized in a solubilization solution. The solubilization solution is selected based on the nutritive polypeptides physiochemical properties. Composition of the solubilization solution is a mixture of water, detergent, salt, pH, chaotrope, cosmotrope, and/or organic solvent. As an example, proteins high in proline are known to be soluble in ethanol solutions (Dickey, L. C., et al. Industrial Crops and Products 10.2 (1999): 137-143.). A nutritive polypeptide with high proline content is selected and isolated by suspending the biological material in ethanol at a ratio (w/w) of liquid to biological material of 1:1, 2:1, 3:1, 4:1 or other ratio recognized in the art. The suspension is blended and insoluble material is removed by centrifugation. The ethanol soluble nutritive polypeptide is purified solubly in the ethanol fraction.

[0583] Nutritive polypeptides are isolated from biological materials by precipitation of the targeted nutritive polypeptide or precipitation of other proteins. Precipitating agents include salt, pH, heat, flocculants, chaotropes, cosmotropes, and organic solvents. The mode of precipitation is selected for a given nutritive polypeptide based on the proteins physiochemical properties. As an example, a nutritive polypeptide is selected to be thermal stable at pH 7 by low solvation score and low aggregation score as described herein. To purify this protein the biological material is suspended in a neutral pH aqueous solution and homogenized. Insoluble material is removed from solution by centrifugation. To purify the nutritive polypeptide from other proteins, the supernatant is heated to 90 degrees C. for 10 minutes. Insoluble material is removed by centrifugation. Small molecules are removed from the supernatant by dialyzing using a 3 kDa membrane, resulting in pure nutritive polypeptide.

[0584] Nutritive polypeptides are isolated from biological materials by various chromatographic methods. The mode of chromatography selected for use depends on the physicochemical properties of the target nutritive polypeptide. Charged nutritive polypeptides bind to ion exchange chromatography resin through electrostatic interactions. Hydrophobic nutritive polypeptides bind to hydrophobic interaction chromatography resin through hydrophobic association. Mixed-mode chromatography can be used for a variety of nutritive polypeptides, and can act through a variety of interactions. Metal affinity chromatography can be used for nutritive polypeptides that bind to metal ions. As an example, a nutritive polypeptide is selected to have a high charge per amino acid at pH 4 so that it binds tightly to a cation-exchange resin. The biological material is added to a low ionic strength pH 4 aqueous solution and homogenized. Insoluble material is removed by centrifugation. The soluble material is added to a cation exchange resin, such as POROS® XS Strong Cation Exchange Resin from Life Technologies, and washed with a low ionic strength pH4 solution. The nutritive polypeptide is eluted from the resin by adding high ionic strength (eg. 500 mM NaCl) pH 4 solution, resulting in purified nutritive polypeptide.

[0585] Synthetic Nutritive Polypeptide Amino Acid Compositions

[0586] In some embodiments compositions of this disclosure contain a plurality of free amino acids that represents the molar ratio of the plurality of amino acids present in a selected nutritive polypeptide, herein termed a “nutritive polypeptide blend”. The compositions in certain embodiments include both free amino acids and nutritive polypeptides. As used herein in these embodiments, disclosure of a nutritive polypeptide and compositions and formulations containing the nutritive polypeptide includes disclosure of a nutritive polypeptide blend and compositions and formulations containing the nutritive polypeptide blend, as well as a composition in which a first amount of amino acids are present in the form of a nutritive polypeptide and a second amount of amino acids are present in free amino acid form.

[0587] Synthetic Methods of Production

[0588] In some embodiments proteins of this disclosure are synthesized chemically without the use of a recombinant production system. Protein synthesis can be carried out in a liquid-phase system or in a solid-phase system using techniques known in the art (see, e.g., Atherton, E., Sheppard, R. C. (1989). Solid Phase peptide synthesis: a practical approach. Oxford, England: IRL Press; Stewart, J. M., Young, J. D. (1984). Solid phase peptide synthesis (2nd ed.). Rockford: Pierce Chemical Company.

[0589] Peptide chemistry and synthetic methods are well known in the art and a protein of this disclosure can be made using any method known in the art. A non-limiting example of such a method is the synthesis of a resin-bound peptide (including methods for deprotection of amino acids, methods for cleaving the peptide from the resin, and for its purification).

[0590] For example, Fmoc-protected amino acid derivatives that can be used to synthesize the peptides are the standard recommended: Fmoc-Ala-OH, Fmoc-Arg(Pbf)-OH, Fmoc-Asn(Trt)-OH, Fmoc-Asp(OtBu)—OH, Fmoc-Cys(Trt)-OH, Fmoc-Gln(Trt)-OH, Fmoc-Glu(OtBu)—OH, Fmoc-Gly-OH, Fmoc-His(Trt)-OH, Fmoc-Ile-OH, Fmoc-Leu-OH, Fmoc-Lys(BOC)—OH, Fmoc-Met-OH, Fmoc-Phe-OH, Fmoc-Pro-OH, Fmoc-Ser(tBu)—OH, Fmoc-Thr(tBu)—OH, Fmoc-Trp(BOC)—OH, Fmoc-Tyr(tBu)—OH and Fmoc-Val-OH (supplied from, e.g., Anaspec, Bachem, Iris Biotech, or NovabioChem). Resin bound peptide synthesis is performed, for example, using Fmoc based chemistry on a Prelude Solid Phase Peptide Synthesizer from Protein Technologies (Tucson, Ariz. 85714 U.S.A.). A suitable resin for the preparation of C-terminal carboxylic acids is a pre-loaded, low-load Wang resin available from NovabioChem (e.g. low load fmoc-Thr(tBu)-Wang resin, LL, 0.27 mmol/g). A suitable resin for the synthesis of peptides with a C-terminal amide is PAL-ChemMatrix resin available from Matrix-Innovation. The N-terminal alpha amino group is protected with Boc.

[0591] Fmoc-deprotection can be achieved with 20% piperidine in NMP for 2×3 min. The coupling chemistry is DIC/HOAt/collidine in NMP. Amino acid/HOAt solutions (0.3 M/0.3 M in NMP at a molar excess of 3-10 fold) are added to the resin followed by the same molar equivalent of DIC (3 M in NMP) followed by collidine (3 M in NMP). For example, the following amounts of 0.3 M amino acid/HOAt solution are used per coupling for the following scale reactions: Scale/ml, 0.05 mmol/1.5 mL, 0.10 mmol/3.0 mL, 0.25 mmol/7.5 mL. Coupling time is either 2×30 min or 1×240 min. After synthesis the resin is washed with DCM, and the peptide is cleaved from the resin by a 2-3 hour treatment with TFA/TIS/water (95/2.5/2.5) followed by precipitation with diethylether. The precipitate is washed with diethylether. The crude peptide is dissolved in a suitable mixture of water and MeCN such as water/MeCN (4:1) and purified by reversed-phase preparative HPLC (Waters Deltaprep 4000 or Gilson) on a column containing C18-silica gel. Elution is performed with an increasing gradient of MeCN in water containing 0.1% TFA. Relevant fractions are checked by analytical HPLC or UPLC. Fractions containing the pure target peptide are mixed and concentrated under reduced pressure. The resulting solution is analyzed (HPLC, LCMS) and the product is quantified using a chemiluminescent nitrogen specific HPLC detector (Antek 8060 HPLC-CLND) or by measuring UV-absorption at 280 nm. The product is dispensed into glass vials. The vials are capped with Millipore glassfibre prefilters. Freeze-drying affords the peptide trifluoroacetate as a white solid. The resulting peptides can be detected and characterized using LCMS and/or UPLC, for example, using standard methods known in the art. LCMS can be performed on a setup consisting of Waters Acquity UPLC system and LCT Premier XE mass spectrometer from Micromass. The UPLC pump is connected to two eluent reservoirs containing: A) 0.1% Formic acid in water; and B) 0.1% Formic acid in acetonitrile. The analysis is performed at RT by injecting an appropriate volume of the sample (preferably 2-10 μl) onto the column which is eluted with a gradient of A and B. The UPLC conditions, detector settings and mass spectrometer settings are: Column: Waters Acquity UPLC BEH, C-18, 1.7 μm, 2.1 mm×50 mm. Gradient: Linear 5%-95% acetonitrile during 4.0 min (alternatively 8.0 min) at 0.4 ml/min. Detection: 214 nm (analogue output from TUV (Tunable UV detector)). MS ionisation mode: API-ES Scan: 100-2000 amu (alternatively 500-2000 amu), step 0.1 amu. UPLC methods are well known. Non-limiting examples of methods that can be used are described at pages 16-17 of US 2013/0053310 A1, published Feb. 28, 2013, for example.

[0592] Inactivating Enzyme Activity

[0593] In some aspects, a protein is an enzyme or has enzymatic activity. In some aspects, it can be desirable to inactivate or reduce the enzymatic activity of the enzyme. Various methods are known in the art for enzyme inactivation including application of heat, application of one or more detergents, application of one or more metal chelators, reduction, oxidation, application of one or more chaotropes, covalent modification, alternating post translational modifications, e.g., via enzymatic or chemical alteration, altering pH (acidic and basic), or altering the salt concentration. For example, heat inactivation is typically performed at a certain temperature for a certain amount of time, e.g., most endonucleases are inactivated by incubation at 65° C. for 20 minutes. In some aspects, enzymes can be mutated to eliminate or reduce enzymatic activity, e.g., by causing the enzyme to misfold. In addition, high pressure carbon dioxide (HPCD) has been demonstrated to an effective non-thermal processing technique for inactivating enzymes. See Hu et al., Enzyme Inactivation in Food Processing using High Pressure Carbon Dioxide Technology; Critical Review in Food Science and Nutrition; Volume 52, Issue 2, 2013. Various other forms of enzyme inactivation are known in the art, the parameters of which can be adjusted as needed to alter enzyme activity accordingly. Various methods for enzyme inactivation and excipients such as oxidation, e.g., bleach, H₂O₂, and ethylene oxide; to reduce disulphides, e.g., DTT, BME, and TCEP; high pH using Na₂CO₃, Tris Base, or Na₂HPO₄; low pH using Citric Acid, Boric Acid, Acetic Acid, or Tris HCl; Heat using temperatures 30° C.-100° C. over a period of time; protein unfolding with chaotropes such as Thiocyanate, Urea, Guanidine HCl, or CaCl₂); protein unfold with surfactants (e.g., detergents) such as MPD, Triton (non-ionic), CHAPS (zwitterionic), or TWEEN® detergent (non-ionic), or to chelate metals with EDTA or Citrate.

[0594] Cell Proliferation Assays

[0595] Cell proliferation assays can be used to measure the relative importance of a protein or portion thereof to the proliferative process. In some aspects, cell proliferation can be measured under starvation conditions in the presence or absence of a protein or interest. For example, cells can be starved over a period of time (e.g., 48 hours) with a medium having or lacking each, respective protein of interest in a tissue culture incubator. After the incubation, a detection agent such as AlamarBlue can be added and fluorescence measured as an output for proliferation. In some aspects, cell proliferation can be measured as part of a dose response to a protein of interest. For example, cells can be starved in medium having or lacking each, respective protein of interest in a tissue culture incubator. After starvation, the cells can then be treated with varying concentrations of the protein (e.g., 0, 20, 100, or 1000 μM) that was lacking in the initial culture in the same, source medium lacking the respective protein. The cells can then be incubated again in a for tissue culture incubator. After the incubation a detection agent such as AlamarBlue can be added and fluorescence read.

[0596] Allergenicity Assays

[0597] For some embodiments it is preferred that the protein not exhibit inappropriately high allergenicity. Accordingly, in some embodiments the potential allergenicy of the protein is assessed. This can be done by any suitable method known in the art. In some embodiments an allergenicity score is calculated. The allergenicity score is a primary sequence based metric based on WHO recommendations (<fao.org/ag/agn/food/pdf/allergygm.pdf>) for assessing how similar a protein is to any known allergen, the primary prediction being that high percent identity between a target and a known allergen is likely indicative of cross reactivity. For a given protein, the likelihood of eliciting an allergic response can be assessed via one or both of a complimentary pair of sequence homology based tests. The first test determines the protein's percent identity across the entire sequence via a global-global sequence alignment to a database of known allergens using the FASTA algorithm with the BLOSUM50 substitution matrix, a gap open penalty of 10, and a gap extension penalty of 2. It has been suggested that proteins with less than 50% global homology are unlikely to be allergenic (Goodman R. E. et al. Allergenicity assessment of genetically modified crops—what makes sense? Nat. Biotech. 26, 73-81 (2008); Aalberse R. C. Structural biology of allergens. J. Allergy Clin. Immunol. 106, 228-238 (2000)).

[0598] In some embodiments of a protein, the protein has less than 50% global homology to any known allergen in the database used for the analysis. In some embodiments a cutoff of less than 40% homology is used. In some embodiments a cutoff of less than 30% homology is used. In some embodiments a cutoff of less than 20% homology is used. In some embodiments a cutoff of less than 10% homology is used. In some embodiments a cutoff of from 40% to 50% is used. In some embodiments a cutoff of from 30% to 50% is used. In some embodiments a cutoff of from 20% to 50% is used. In some embodiments a cutoff of from 10% to 50% is used. In some embodiments a cutoff of from 5% to 50% is used. In some embodiments a cutoff of from 0% to 50% is used. In some embodiments a cutoff of greater than 50% global homology to any known allergen in the database used for the analysis is used. In some embodiments a cutoff of from 50% to 60% is used. In some embodiments a cutoff of from 50% to 70% is used. In some embodiments a cutoff of from 50% to 80% is used. In some embodiments a cutoff of from 50% to 90% is used. In some embodiments a cutoff of from 55% to 60% is used. In some embodiments a cutoff of from 65% to 70% is used. In some embodiments a cutoff of from 70% to 75% is used. In some embodiments a cutoff of from 75% to 80% is used.

[0599] The second test assesses the local allergenicity along the protein sequence by determining the local allergenicity of all possible contiguous 80 amino acid fragments via a global-local sequence alignment of each fragment to a database of known allergens using the FASTA algorithm with the BLOSUM50 substitution matrix, a gap open penalty of 10, and a gap extension penalty of 2. The highest percent identity of any 80 amino acid window with any allergen is taken as the final score for the protein of interest. The WHO guidelines suggest using a 35% identity cutoff with this fragment test. In some embodiments of a protein, all possible fragments of the protein have less than 35% local homology to any known allergen in the database used for the analysis using this test. In some embodiments a cutoff of less than 30% homology is used. In some embodiments a cutoff of from 30% to 35% homology is used. In some embodiments a cutoff of from 25% to 30% homology is used. In some embodiments a cutoff of from 20% to 25% homology is used. In some embodiments a cutoff of from 15% to 20% homology is used. In some embodiments a cutoff of from 10% to 15% homology is used. In some embodiments a cutoff of from 5% to 10% homology is used. In some embodiments a cutoff of from 0% to 5% homology is used. In some embodiments a cutoff of greater than 35% homology is used. In some embodiments a cutoff of from 35% to 40% homology is used. In some embodiments a cutoff of from 40% to 45% homology is used. In some embodiments a cutoff of from 45% to 50% homology is used. In some embodiments a cutoff of from 50% to 55% homology is used. In some embodiments a cutoff of from 55% to 60% homology is used. In some embodiments a cutoff of from 65% to 70% homology is used. In some embodiments a cutoff of from 70% to 75% homology is used. In some embodiments a cutoff of from 75% to 80% homology is used.

[0600] Skilled artisans are able to identify and use a suitable database of known allergens for this purpose. In some embodiments the database is custom made by selecting proteins from more than one database source. In some embodiments the custom database comprises pooled allergen lists collected by the Food Allergy Research and Resource Program (<allergenonline.org/>), UNIPROT annotations (<uniprot.org/docs/allergen>), and the Structural Database of Allergenic Proteins (SDAP, <fermi.utmb.edu/SDAP/sdap_lnk.html>). This database includes all currently recognized allergens by the International Union of Immunological Socieities (IUIS, allergen.org/) as well as a large number of additional allergens not yet officially named. In some embodiments the database comprises a subset of known allergen proteins available in known databases; that is, the database is a custom selected subset of known allergen proteins. In some embodiments the database of known allergens comprises at least 10 proteins, at least 20 proteins, at least 30 proteins, at least 40 proteins, at least 50 proteins, at least 100, proteins, at least 200 proteins, at least 300 proteins, at least 400 proteins, at least 500 proteins, at least 600 proteins, at least 700 proteins, at least 800 proteins, at least 900 proteins, at least 1,000 proteins, at least 1,100 proteins, at least 1,200 proteins, at least 1,300 proteins, at least 1,400 proteins, at least 1,500 proteins, at least 1,600 proteins, at least 1,700 proteins, at least 1,800 proteins, at least 1,900 proteins, or at least 2,000 proteins. In some embodiments the database of known allergens comprises from 100 to 500 proteins, from 200 to 1,000 proteins, from 500 to 1,000 proteins, from 500 to 1,000 proteins, or from 1,000 to 2,000 proteins.

[0601] In some embodiments all (or a selected subset) of contiguous amino acid windows of different lengths (e.g., 70, 60, 50, 40, 30, 20, 10, 8 or 6 amino acid windows) of a protein are tested against the allergen database and peptide sequences that have 100% identity, 95% or higher identity, 90% or higher identity, 85% or higher identity, 80% or higher identity, 75% or higher identity, 70% or higher identity, 65% or higher identity, 60% or higher identity, 55% or higher identity, or 50% or higher identity matches are identified for further examination of potential allergenicity.

[0602] Another method of predicting the allergenicity of a protein is to assess the homology of the protein to a protein of human origin. The human immune system is exposed to a multitude of possible allergenic proteins on a regular basis and has the intrinsic ability to differentiate between the host body's proteins and exogenous proteins. The exact nature of this ability is not always clear, and there are many diseases that arise as a result of the failure of the body to differentiate self from non-self (e.g., arthritis). Nonetheless, the fundamental analysis is that proteins that share a degree of sequence homology to human proteins are less likely to elicit an immune response. In particular, it has been shown that for some protein families with known allergenic members (tropomyosins, parvalbumins, caseins), those proteins that bear more sequence homology to their human counterparts relative to known allergenic proteins, are not thought to be allergenic (Jenkins J. A. et al. Evolutionary distance from human homologs reflects allergenicity of animal food proteins. J. Allergy Clin Immunol. 120 (2007): 1399-1405). For a given protein, a human homology score is measured by determining the maximum percent identity of the protein to a database of human proteins (e.g., the UNIPROT database) from a global-local alignment using the FASTA algorithm with the BLOSUM50 substitution matrix, a gap open penalty of 10, and a gap extension penalty of 2. According to Jenkins et al. (Jenkins J. A. et al. Evolutionary distance from human homologs reflects allergenicity of animal food proteins. J. Allergy Clin Immunol. 120 (2007): 1399-1405) proteins with a sequence identity to a human protein above about 62% are less likely to be allergenic. Skilled artisans are able to identify and use a suitable database of known human proteins for this purpose, for example, by searching the UNIPROT database (<uniprot.org>). In some embodiments the database is custom made by selecting proteins from more than one database source. Of course the database may but need not be comprehensive. In some embodiments the database comprises a subset of human proteins; that is, the database is a custom selected subset of human proteins. In some embodiments the database of human proteins comprises at least 10 proteins, at least 20 proteins, at least 30 proteins, at least 40 proteins, at least 50 proteins, at least 100, proteins, at least 200 proteins, at least 300 proteins, at least 400 proteins, at least 500 proteins, at least 600 proteins, at least 700 proteins, at least 800 proteins, at least 900 proteins, at least 1,000 proteins, at least 2,000 proteins, at least 3,000 proteins, at least 4,000 proteins, at least 5,000 proteins, at least 6,000 proteins, at least 7,000 proteins, at least 8,000 proteins, at least 9,000 proteins, or at least 10,000 proteins. In some embodiments the database comprises from 100 to 500 proteins, from 200 to 1,000 proteins, from 500 to 1,000 proteins, from 500 to 1,000 proteins, from 1,000 to 2,000 proteins, from 1,000 to 5,000 proteins, or from 5,000 to 10,000 proteins. In some embodiments the database comprises at least 90%, at least 95%, or at least 99% of all known human proteins.

[0603] In some embodiments of a protein, the protein is at least 20% homologous to a human protein. In some embodiments a cutoff of at least 30% homology is used. In some embodiments a cutoff of at least 40% homology is used. In some embodiments a cutoff of at least 50% homology is used. In some embodiments a cutoff of at least 60% homology is used. In some embodiments a cutoff of at least 70% homology is used. In some embodiments a cutoff of at least 80% homology is used. In some embodiments a cutoff of at least 62% homology is used. In some embodiments a cutoff of from at least 20% homology to at least 30% homology is used. In some embodiments a cutoff of from at least 30% homology to at least 40% homology is used. In some embodiments a cutoff of from at least 50% homology to at least 60% homology is used. In some embodiments a cutoff of from at least 60% homology to at least 70% homology is used. In some embodiments a cutoff of from at least 70% homology to at least 80% homology is used.

[0604] Theromostability Assays

[0605] As used herein, a “stable” protein is one that resists changes (e.g., unfolding, oxidation, aggregation, hydrolysis, etc.) that alter the biophysical (e.g., solubility), biological (e.g., digestibility), or compositional (e.g. proportion of Leucine amino acids) traits of the protein of interest.

[0606] Protein stability can be measured using various assays known in the art and proteins disclosed herein and having stability above a threshold can be selected. In some embodiments a protein is selected that displays thermal stability that is comparable to or better than that of whey protein. Thermal stability is a property that can help predict the shelf life of a protein. In some embodiments of the assay stability of protein samples is determined by monitoring aggregation formation using size exclusion chromatography (SEC) after exposure to extreme temperatures. Aqueous samples of the protein to be tested are placed in a heating block at 90° C. and samples are taken after 0, 1, 5, 10, 30 and 60 min for SEC analysis. Protein is detected by monitoring absorbance at 214 nm, and aggregates are characterized as peaks eluting faster than the protein of interest. No overall change in peak area indicates no precipitation of protein during the heat treatment. Whey protein has been shown to rapidly form ˜80% aggregates when exposed to 90° C. in such an assay.

[0607] In some embodiments the thermal stability of a protein is determined by heating a sample slowly from 25° C. to 95° C. in presence of a hydrophobic dye (e.g., ProteoStat® Thermal shift stability assay kit, Enzo Life Sciences) that binds to aggregated proteins that are formed as the protein denatures with increasing temperature (Niesen, F. H., Berglund, H. & Vadadi, M., 2007. The use of differential scanning fluorimetry to detect ligand interactions that promote protein stability. Nature Protocols, Volume 2, pp. 2212-2221). Upon binding, the dye's fluorescence increases significantly, which is recorded by an rtPCR instrument and represented as the protein's melting curve (Lavinder, J. J., Hari, S. B., Suillivan, B. J. & Magilery, T. J., 2009. High-Throughput Thermal Scanning: A General, Rapid Dye-Binding Thermal Shift Screen for Protein Engineering. Journal of the American Chemical Society, pp. 3794-3795). After the thermal shift is complete, samples are examined for insoluble precipitates and further analyzed by analytical size exclusion chromatography (SEC).

[0608] Solubility Assays

[0609] In some embodiments of the proteins disclosed herein the protein is soluble. Solubility can be measured by any method known in the art. In some embodiments solubility is examined by centrifuge concentration followed by protein concentration assays. Samples of proteins in 20 mM HEPES pH 7.5 are tested for protein concentration according to protocols using two methods, Coomassie® Plus (Bradford) Protein Assay (Thermo Scientific) and Bicinchoninic Acid (BCA) Protein Assay (SigmadAldrich). Based on these measurements 10 mg of protein is added to an Amicon Ultra 3 kDa centrifugal filter (Millipore). Samples are concentrated by centrifugation at 10,000×g for 30 minutes. The final, now concentrated, samples are examined for precipitated protein and then tested for protein concentration as above using two methods, Bradford and BCA.

[0610] In some embodiments the proteins have a final solubility limit of at least 5 g/L, 10 g/L, 20 g/L, 30 g/L, 40 g/L, 50 g/L, or 100 g/L at physiological pH. In some embodiments the proteins are greater than 50%, greater than 60%, greater than 70%, greater than 80%, greater than 90%, greater than 95%, greater than 96%, greater than 97%, greater than 98%, greater than 99%, or greater than 99.5% soluble with no precipitated protein observed at a concentration of greater than 5 g/L, or 10 g/L, or 20 g/L, or 30 g/L, or 40 g/L, or 50 g/L, or 100 g/L at physiological pH. In some embodiments, the solubility of the protein is higher than those typically reported in studies examining the solubility limits of whey (12.5 g/L; Pelegrine et al., Lebensm.-Wiss. U.-Technol. 38 (2005) 77-80) and soy (10 g/L; Lee et al., JAOCS 80(1) (2003) 85-90).

[0611] Eukaryotic proteins are often glycosylated, and the carbohydrate chains that are attached to proteins serve various functions. N-linked and O-linked glycosylation are the two most common forms of glycosylation occurring in proteins. N-linked glycosylation is the attachment of a sugar molecule to a nitrogen atom in an amino acid residue in a protein. N-linked glycosylation occurs at Asparagine and Arginine residues. O-linked glycosylation is the attachment of a sugar molecule to an oxygen atom in an amino acid residue in a protein. O-linked glycosylation occurs at Threonine and Serine residues.

[0612] Glycosylated proteins are often more soluble than their un-glycosylated forms. In terms of protein drugs, proper glycosylation usually confers high activity, proper antigen binding, better stability in the blood, etc. However, glycosylation necessarily means that a protein “carries with it” sugar moieties. Such sugar moieties may reduce the usefulness of the proteins of this disclosure including recombinant proteins. For example, as demonstrated in the examples, a comparison of digestion of glycosylated and non-glycosylated forms of the same proteins shows that the non-glycosylated forms are digested more quickly than the glycosylated forms. For these reasons, in some embodiments the nutrive proteins according to the disclosure comprise low or no glycosylation. For example, in some embodiments the proteins comprise a ratio of non-glycosilated to total amino acid residues of at least 80%, at least 85%, at least 90%, at least 95%, at least 96%, at least 97%, at least 98%, or at least 99%. In some embodiments the proteins to not comprise any glycosylation.

[0613] In some embodiments, the protein according to the disclosure is de-glycosylated after it is produced or after it is isolated. Proteins of low or no glycosylation can be made by any method known in the art. For example, enzymatic and/or chemical methods can be used (Biochem. J. (2003) 376, p339-350.). Enzymes are produced commercially at research scales for the removal of N-linked and O-linked oligosaccharides. Chemical methods include use of trifluoromethanesulfonic acid to selectively break N-linked and O-linked peptide-saccharide bonds. This method often results in a more complete deglycosylation than does the use of enzymatic methods.

[0614] In other embodiments, the protein according to the disclosure is produced with low or no glycosylation by a host organism. Most bacteria and other prokaryotes have very limited capabilities to glycosylate proteins, especially heterologous proteins. Accordingly, in some embodiments of this disclosure a protein is made recombinantly in a microorganism such that the level of glycosylation of the recombinant protein is low or no glycosylation. In some embodiments the level of glycosylation of the recombinant protein is lower than the level of glycosylation of the protein as it occurs in the organism from which it is derived. Glycosylation of a protein can vary based on the host organism, in other words some hosts will produce more glycosylation relative to one or more other hosts; while other hosts will produce less g glycosylation relative to one or more other hosts. Differences in the amount of glycosylation can be measured based upon, e.g., the mass of glycosylation present and/or the total number of glycosylation sites present.

[0615] Toxicity and Anti-Nutricity Assays

[0616] For most embodiments it is preferred that the protein not exhibit inappropriately high toxicity. Accordingly, in some embodiments the potential toxicity of the protein is assessed. This can be done by any suitable method known in the art. In some embodiments a toxicity score is calculated by determining the protein's percent identity to databases of known toxic proteins (e.g., toxic proteins identified from the UNIPROT database). A global-global alignment of the protein of interest against the database of known toxins is performed using the FASTA algorithm with the BLOSUM50 substitution matrix, a gap open penalty of 10, and a gap extension penalty of 2. In some embodiments of a protein, the protein is less than 35% homologous to a known toxin. In some embodiments a cutoff of less than 35% homology is used. In some embodiments a cutoff of from 30% to 35% homology is used. In some embodiments a cutoff of from 25% to 35% homology is used. In some embodiments a cutoff of from 20% to 35% homology is used. In some embodiments a cutoff of from 15% to 35% homology is used. In some embodiments a cutoff of from 10% to 35% homology is used. In some embodiments a cutoff of from 5% to 35% homology is used. In some embodiments a cutoff of from 0% to 35% homology is used. In some embodiments a cutoff of greater than 35% homology is used. In some embodiments a cutoff of from 35% to 40% homology is used. In some embodiments a cutoff of from 35% to 45% homology is used. In some embodiments a cutoff of from 35% to 50% homology is used. In some embodiments a cutoff of from 35% to 55% homology is used. In some embodiments a cutoff of from 35% to 60% homology is used. In some embodiments a cutoff of from 35% to 70% homology is used. In some embodiments a cutoff of from 35% to 75% homology is used. In some embodiments a cutoff of from 35% to 80% homology is used. Skilled artisans are able to identify and use a suitable database of known toxins for this purpose, for example, by searching the UNIPROT database (<uniprot.org>). In some embodiments the database is custom made by selecting proteins identified as toxins from more than one database source. In some embodiments the database comprises a subset of known toxic proteins; that is, the database is a custom selected subset of known toxic proteins. In some embodiments the database of toxic proteins comprises at least 10 proteins, at least 20 proteins, at least 30 proteins, at least 40 proteins, at least 50 proteins, at least 100, proteins, at least 200 proteins, at least 300 proteins, at least 400 proteins, at least 500 proteins, at least 600 proteins, at least 700 proteins, at least 800 proteins, at least 900 proteins, at least 1,000 proteins, at least 2,000 proteins, at least 3,000 proteins, at least 4,000 proteins, at least 5,000 proteins, at least 6,000 proteins, at least 7,000 proteins, at least 8,000 proteins, at least 9,000 proteins, or at least 10,000 proteins. In some embodiments the database comprises from 100 to 500 proteins, from 200 to 1,000 proteins, from 500 to 1,000 proteins, from 500 to 1,000 proteins, from 1,000 to 2,000 proteins, from 1,000 to 5,000 proteins, or from 5,000 to 10,000 proteins.

[0617] Anti-Nutricity and Anti-Nutrients

[0618] For some embodiments it is preferred that the protein not exhibit anti-nutritional activity (“anti-nutricity”), i.e., proteins that have the potential to prevent the absorption of nutrients from food. Examples of anti-nutritive sequences causing such anti-nutricity include protease inhibitors, which inhibit the actions of trypsin, pepsin and other proteases in the gut, preventing the digestion and subsequent absorption of protein.

[0619] Disclosed herein are formulations containing isolated nutritive polypeptides that are substantially free of anti-nutritive sequences. In some embodiments the nutritive polypeptide has an anti-nutritive similarity score below about 1, below about 0.5, or below about 0.1. The nutritive polypeptide is present in the formulation in an amount greater than about 10 g, and the formulation is substantially free of anti-nutritive factors. The formulation is present as a liquid, semi-liquid or gel in a volume not greater than about 500 ml or as a solid or semi-solid in a mass not greater than about 200 g. The nutritive polypeptide may have low homology with a protease inhibitor, such as a member of the serpin family of polypeptides, e.g., it is less than 90% identical, or is less than 85%, 80%, 75%, 70%, 65%, 60%, 55%, 50%, 45%, 40%, 35%, 30%, 25%, 20%, 15%, 10%, 5%, or less than 5% identical.

[0620] Accordingly, in some embodiments the potential anti-nutricity of the protein is assessed. This can be done by any suitable method known in the art. In some embodiments an anti-nutricity score is calculated by determining the protein's percent identity to databases of known protease inhibitors (e.g., protease inhibitors identified from the UNIPROT database). A global-global alignment of the protein of interest against the database of known protease inhibitors is performed using the FASTA algorithm with the BLOSUM50 substitution matrix, a gap open penalty of 10, and a gap extension penalty of 2, to identify whether the protein is homologous to a known anti-protein. In some embodiments of a protein, the protein has less than 35% global homology to any known anti-protein (e.g., any known protease inhibitor) in the database used for the analysis. In some embodiments a cutoff of less than 35% identify is used. In some embodiments a cutoff of from 30% to 35% is used. In some embodiments a cutoff of from 25% to 35% is used. In some embodiments a cutoff of from 20% to 35% is used. In some embodiments a cutoff of from 15% to 35% is used. In some embodiments a cutoff of from 10% to 35% is used. In some embodiments a cutoff of from 5% to 35% is used. In some embodiments a cutoff of from 0% to 35% is used. In some embodiments a cutoff of greater than 35% identify is used. In some embodiments a cutoff of from 35% to 40% is used. In some embodiments a cutoff of from 35% to 45% is used. In some embodiments a cutoff of from 35% to 50% is used. In some embodiments a cutoff of from 35% to 55% is used. In some embodiments a cutoff of from 35% to 60% is used. In some embodiments a cutoff of from 35% to 70% is used. In some embodiments a cutoff of from 35% to 75% is used. In some embodiments a cutoff of from 35% to 80% is used. Skilled artisans are able to identify and use a suitable database of known protease inhibitors for this purpose, for example, by searching the UNIPROT database (uniprot.org). In some embodiments the database is custom made by selecting proteins identified protease-inhibitors as from more than one database source. In some embodiments the database comprises a subset of known protease inhibitors available in databases; that is, the database is a custom selected subset of known protease inhibitor proteins. In some embodiments the database of known protease inhibitor proteins comprises at least 10 proteins, at least 20 proteins, at least 30 proteins, at least 40 proteins, at least 50 proteins, at least 100, proteins, at least 200 proteins, at least 300 proteins, at least 400 proteins, at least 500 proteins, at least 600 proteins, at least 700 proteins, at least 800 proteins, at least 900 proteins, at least 1,000 proteins, at least 1,100 proteins, at least 1,200 proteins, at least 1,300 proteins, at least 1,400 proteins, at least 1,500 proteins, at least 1,600 proteins, at least 1,700 proteins, at least 1,800 proteins, at least 1,900 proteins, or at least 2,000 proteins. In some embodiments the database of known protease inhibitor proteins comprises from 100 to 500 proteins, from 200 to 1,000 proteins, from 500 to 1,000 proteins, from 500 to 1,000 proteins, or from 1,000 to 2,000 proteins, or from 2,000 to 3,000 proteins.

[0621] In other embodiments a protein that does exhibit some degree of protease inhibitor activity is used. For example, in some embodiments such a protein can be useful because it delays protease digestion when the nutritive protein is consumed such that the protein traverse a greater distance within the GI tract before it is digested, thus delaying absorption. For example, in some embodiments the protein inhibits gastric digestion but not intestinal digestion. Delaney B. et al. (Evaluation of protein safety in the context of agricultural biotechnology. Food. Chem. Toxicol. 46 (2008: S71-S97)) suggests that one should avoid both known toxic and anti-proteins when assessing the safety of a possible food protein. In some embodiments of a protein, the protein has a favorably low level of global homology to a database of known toxic proteins and/or a favorably low level of global homology to a database of known anti-nutricity proteins (e.g., protease inhibitors), as defined herein.

[0622] Antinutrients. Provided are nutritional compositions that lack anti-nutrients (or antinutrients). Antinutrients are compounds, usually other than proteins, which are typically found in plant foods and have been found to have both adverse effects and, in some situations, certain health benefits. For instance, phytic acid, lectins, phenolic compounds, saponins, and enzyme inhibitors have been shown to reduce the availability of nutrients and to cause the inhibition of growth, and phytoestrogens and lignans have been linked with infertility problems. On the other hand, phytic acid, lectins, phenolic compounds, amylase inhibitors, and saponins have been shown to reduce the blood glucose and insulin response to starch foods and/or the plasma cholesterol and triglycerides. Furthermore, phytic acid, phenolics, saponins, protease inhibitors, phytoestrogens, and lignans have been linked to reduced cancer risks.

[0623] Provided are methods for reducing the amount of anti-nutritional factors in a food product, by treating the food product with a thermal treatment comprising steam or hot air having a temperature greater than about 90 degrees C. for at least 1 minute, combining with the treated food product with a composition containing an isolated nutritive polypeptide. Optionally, the step of thermal treatment degrades at least one anti-nutritional factor such as a saponin, a lectin, and a prolamin, a protease inhibitor, or phytic acid.

[0624] Anti-nutritional factors are detected in a protein composition as follows. Phytic acid: The procedure of Wheeler and Ferrel (Wheeler, E. L., Ferrel, R. E., Cereal Chem. 1971, 48, 312) is used for the determination of phytic acid extracted in 3% trichloroacetic acid. Raffinose family oligosaccharides: Protein samples are extracted with 70% ethanol using Soxhlet apparatus for 6-8 h and thin-layer chromatography is used for the quantitative determination of raffinose and stachyose in the extract according to the procedure of Tanaka et al. (Tanaka, M., Thananunkul, D., Lee, T. C., Chichester, C. O., J. Food Sci. 1975, 40, 1087-1088). Trypsin inhibitor: The method of Kakade et al. (Kakade, M. L., Rackis, J. J., McGhee, J. E., Puski, G., Cereal Chem. 1974, 51, 376-82) is used for determining the trypsin inhibitor activity in raw and treated samples. One trypsin inhibitor unit (TIU) is defined as a decrease in absorbance at 410 nm by 0.01 in 10 min and data were expressed as TIU*mg-1. Amylase inhibitor: The inhibitor is extracted in 0.15 m NaCl according to the procedure of Baker et al. (Baker, J. E., Woo, S. M., Throne, J. E., Finny, P. L., Environm. Entomol. 1991, 20, 53±60) and assayed by the method of Huesing et al. (Huesing, J. E., Shade, R. E., Chrispeels, M. J., Murdok, L. L., Plant Physiol. 1991, 96, 993±996). One amylase inhibitor unit (AIU) is defined as the amount that gives 50% inhibition of a portion of the amylase that produced one mg maltose monohydrate per min. Lectins: The procedure of Paredes-Lopez et al. (Paredes-Lopez, O., Schevenin, M. L., Guevara-Lara, F., Food Chem. 1989, 31, 129-137) is applied to the extraction of lectins using phosphate-buffered saline (PBS). The hemagglutinin activity (HA) of lectins in the sample extract is determined according to Kortt (Kortt, A. A. (Ed.), Eur. J. Biochem. 1984, 138, 519). Trypsinized human red blood cell (A, B and O) suspensions are prepared according to Lis and Sharon (Lis, H., Sharon, N., Methods Enzymol. 1972, 28, 360±368). HA is expressed as the reciprocal of the highest dilution giving positive agglutination. Tannins: The tannin contents are determined as tannic acid by Folin-Denis reagent according to the procedure of the AOAC (Helrich, K. (Ed.), AOAC, Official Methods of Analysis, Association of Official Analytical Chemists, Arlington, Va. 1990)

[0625] Charge Assays and Solvation Scoring

[0626] One feature that can enhance the utility of a protein is its charge (or per amino acid charge). Proteins with higher charge can in some embodiments exhibit desirable characteristics such as increased solubility, increased stability, resistance to aggregation, and desirable taste profiles. For example, a charged protein that exhibits enhanced solubility can be formulated into a beverage or liquid formulation that includes a high concentration of protein in a relatively low volume of solution, thus delivering a large dose of protein nutrition per unit volume. A charged protein that exhibits enhanced solubility can be useful, for example, in sports drinks or recovery drinks wherein a user (e.g., an athlete) wants to ingest protein before, during or after physical activity. A charged protein that exhibits enhanced solubility can also be particularly useful in a clinical setting wherein a subject (e.g., a patient or an elderly person) is in need of protein nutrition but is unable to ingest solid foods or large volumes of liquids.

[0627] For example, the net charge (ChargeP) of a polypeptide at pH 7 can be calculated using the following formula:

ChargeP=−0.002−(C)(0.045)−(D)(0.999)−(E)(0.998)+(H)(0.091)+(K)(1.0)+(R)(1.0)−(Y)(−0.001)

[0628] where C is the number of cysteine residues, D is the number of aspartic acid residues, E is the number of glutamic acid residues, H is the number of histidine residues, K is the number of lysine residues, R is the number of arginine residues and Y is the number of tyrosine residues in the polypeptide. The per amino acid charge (ChargeA) of the polypeptide can be calculated by dividing the net charge (ChargeP) by the number of amino acid residues (N), i.e., ChargeA=ChargeP/N. (See Bassi S (2007), “A Primer on Python for Life Science Researchers.” PLoS Comput Biol 3(11): e199. doi:10.1371/journal.pcbi.0030199).

[0629] One metric for assessing the hydrophilicity and potential solubility of a given protein is the solvation score. Solvation score is defined as the total free energy of solvation (i.e. the free energy change associated with transfer from gas phase to a dilute solution) for all amino acid side chains if each residue were solvated independently, normalized by the total number of residues in the sequence. The side chain solvation free energies are found computationally by calculating the electrostatic energy difference between a vacuum dielectric of 1 and a water dielectric of 80 (by solving the Poisson-Boltzmann equation) as well as the non-polar, Van der Waals energy using a linear solvent accessible surface area model (D. Sitkoff, K. A. Sharp, B. Honig. “Accurate Calculation of Hydration Free Energies Using Macroscopic Solvent Models”. J. Phys. Chem. 98, 1994). For amino acids with ionizable sidechains (Arg, Asp, Cys, Glu, His, Lys and Tyr), an average solvation free energy is used based on the relative probabilities for each ionization state at the specified pH. Solvation scores start at 0 and continue into negative values, and the more negative the solvation score, the more hydrophilic and potentially soluble the protein is predicted to be. In some embodiments of a protein, the protein has a solvation score of −10 or less at pH 7. In some embodiments of a protein, the protein has a solvation score of −15 or less at pH 7. In some embodiments of a protein, the protein has a solvation score of −20 or less at pH 7. In some embodiments of a protein, the protein has a solvation score of −25 or less at pH 7. In some embodiments of a protein, the protein has a solvation score of −30 or less at pH 7. In some embodiments of a protein, the protein has a solvation score of −35 or less at pH 7. In some embodiments of a protein, the protein has a solvation score of −40 or less at pH 7.

[0630] The solvation score is a function of pH by virtue of the pH dependence of the molar ratio of undissociated weak acid ([HA]) to conjugate base ([A-]) as defined by the Henderson-Hasselbalch equation:

[0631] All weak acids have different solvation free energies compared to their conjugate bases, and the solvation free energy used for a given residue when calculating the solvation score at a given pH is the weighted average of those two values.

[0632] Accordingly, in some embodiments of a protein, the protein has a solvation score of −10 or less at an acidic pH. In some embodiments of a protein, the protein has a solvation score of −15 or less at an acidic pH. In some embodiments of a protein, the protein has a solvation score of −20 or less at an acidic pH. In some embodiments of a protein, the protein has a solvation score of −25 or less at an acidic pH. In some embodiments of a protein, the protein has a solvation score of −30 or less at an acidic pH. In some embodiments of a protein, the protein has a solvation score of −35 or less at an acidic pH. In some embodiments of a protein, the protein has a solvation score of −40 or less at acidic pH.

[0633] Accordingly, in some embodiments of a protein, the protein has a solvation score of −10 or less at a basic pH. In some embodiments of a protein, the protein has a solvation score of −15 or less at a basic pH. In some embodiments of a protein, the protein has a solvation score of −20 or less at a basic pH. In some embodiments of a protein, the protein has a solvation score of −25 or less at a basic pH. In some embodiments of a protein, the protein has a solvation score of −30 or less at a basic pH. In some embodiments of a protein, the protein has a solvation score of −35 or less at a basic pH. In some embodiments of a protein, the protein has a solvation score of −40 or less at basic pH.

[0634] Accordingly, in some embodiments of a protein, the protein has a solvation score of −10 or less at a pH range selected from 2-3, 3-4, 4-5, 5-6, 6-7, 7-8, 8-9, 9-10, 10-11, and 11-12. In some embodiments of a protein, the protein has a solvation score of −15 or less at a pH range selected from 2-3, 3-4, 4-5, 5-6, 6-7, 7-8, 8-9, 9-10, 10-11, and 11-12. In some embodiments of a protein, the protein has a solvation score of −20 or less at a pH range selected from 2-3, 3-4, 4-5, 5-6, 6-7, 7-8, 8-9, 9-10, 10-11, and 11-12. In some embodiments of a protein, the protein has a solvation score of −25 or less at a pH range selected from 2-3, 3-4, 4-5, 5-6, 6-7, 7-8, 8-9, 9-10, 10-11, and 11-12. In some embodiments of a protein, the protein has a solvation score of −30 or less at a pH range selected from 2-3, 3-4, 4-5, 5-6, 6-7, 7-8, 8-9, 9-10, 10-11, and 11-12. In some embodiments of a protein, the protein has a solvation score of −35 or less at a pH range selected from 2-3, 3-4, 4-5, 5-6, 6-7, 7-8, 8-9, 9-10, 10-11, and 11-12. In some embodiments of a protein, the protein has a solvation score of −40 or less at a pH range selected from 2-3, 3-4, 4-5, 5-6, 6-7, 7-8, 8-9, 9-10, 10-11, and 11-12.

[0635] Aggregation Assays and Aggregation Scoring

[0636] In some embodiments a protein of this disclosure shows resistance to aggregation, exhibiting, for example, less than 80% aggregation, 10% aggregation, or no detectable aggregation at elevated temperatures (e.g., 50° C., 60° C., 70° C., 80° C., 85° C., 90° C., or 95° C.).

[0637] One benefit of stable proteins as disclosed herein is that they can be able to be stored for an extended period of time before use, in some instances without the need for refrigeration or cooling. In some embodiments, proteins are processed into a dry form (e.g., by lyophilization). In some embodiments, proteins are stable upon lyophilization. In some embodiments, such lyophilized proteins maintain their stability upon reconstitution (e.g., liquid formulation).

[0638] The aggregation score is a primary sequence based metric for assessing the hydrophobicity and likelihood of aggregation of a given protein. Using the Kyte and Doolittle hydrophobity scale (Kyte J, Doolittle R F (May 1982) “A simple method for displaying the hydropathic character of a protein”. J. Mol. Biol. 157 (1): 105-32), which gives hydrophobic residues positive values and hydrophilic residues negative values, the average hydrophobicity of a protein sequence is calculated using a moving average of five residues. The aggregation score is drawn from the resulting plot by determining the area under the curve for values greater than zero and normalizing by the total length of the protein. The underlying view is that aggregation is the result of two or more hydrophobic patches coming together to exclude water and reduce surface exposure, and the likelihood that a protein will aggregate is a function of how densely packed its hydrophobic (i.e., aggregation prone) residues are. Aggregation scores start at 0 and continue into positive values, and the smaller the aggregation score, the less hydrophobic and potentially less prone to aggregation the protein is predicted to be. In some embodiments of a protein, the protein has an aggregation score of 2 or less. In some embodiments of a protein, the protein has an aggregation score of 1.5 or less. In some embodiments of a protein, the protein has an aggregation score of 1 or less. In some embodiments of a protein, the protein has an aggregation score of 0.9 or less. In some embodiments of a protein, the protein has an aggregation score of 0.8 or less. In some embodiments of a protein, the protein has an aggregation score of 0.7 or less. In some embodiments of a protein, the protein has an aggregation score of 0.6 or less. In some embodiments of a protein, the protein has an aggregation score of 0.5 or less. In some embodiments of a protein, the protein has an aggregation score of 0.4 or less. In some embodiments of a protein, the protein has an aggregation score of 0.3 or less. In some embodiments of a protein, the protein has an aggregation score of 0.2 or less. In some embodiments of a protein, the protein has an aggregation score of 0.1 or less.

[0639] In some cases, soluble expression is desirable because it can increase the amount and/or yield of the protein and facilitate one or more of the isolation and purification of the protein. In some embodiments, the proteins of this disclosure are solubly expressed in the host organism. Solvation score and aggregation score can be used to predict soluble expression of recombinant proteins in a host organism. As shown in Example 8, this disclosure provides evidence suggesting that proteins with solvation scores of ≤−20 and aggregation scores of ≤0.75 are more likely to be recombinantly expressed in a particular E. coli expression system. Moreover, the data also suggests that proteins with solvation scores of ≤−20 and aggregation scores of ≤0.5 are more likely to be solubly expressed in this system. Therefore, in some embodiments the protein of this disclosure has a solvation score of −20 or less. In some embodiments the nutritive protein has an aggregation score of 0.75 or less. In some embodiments the nutritive protein has an aggregation score of 0.5 or less. In some embodiments the protein has a solvation score of −20 or less and an aggregation score of 0.75 or less. In some embodiments the protein has a solvation score of −20 or less and an aggregation score of 0.5 or less.

[0640] Taste and Mouth Characteristics

[0641] Certain free amino acids and mixtures of free amino acids are known to have a bitter or otherwise unpleasant taste. In addition, hydrolysates of common proteins (e.g., whey and soy) often have a bitter or unpleasant taste. In some embodiments, proteins disclosed and described herein do not have a bitter or otherwise unpleasant taste. In some embodiments, proteins disclosed and described herein have a more acceptable taste as compared to at least one of free amino acids, mixtures of free amino acids, and/or protein hydrolysates. In some embodiments, proteins disclosed and described herein have a taste that is equal to or exceeds at least one of whey protein.

[0642] Proteins are known to have tastes covering the five established taste modalities: sweet, sour, bitter, salty, and umami. Fat can be considered a sixth taste. The taste of a particular protein (or its lack thereof) can be attributed to several factors, including the primary structure, the presence of charged side chains, and the electronic and conformational features of the protein. In some embodiments, proteins disclosed and described herein are designed to have a desired taste (e.g., sweet, salty, umami) and/or not to have an undesired taste (e.g., bitter, sour). In this context “design” includes, for example, selecting edible species proteins embodying features that achieve the desired taste property, as well as creating muteins of edible species polypeptides that have desired taste properties. For example, proteins can be designed to interact with specific taste receptors, such as sweet receptors (T1R2-T1R3 heterodimer) or umami receptors (T1R1-T1R3 heterodimer, mGluR4, and/or mGluR1). Further, proteins can be designed not to interact, or to have diminished interaction, with other taste receptors, such as bitter receptors (T2R receptors).

[0643] Proteins disclosed and described herein can also elicit different physical sensations in the mouth when ingested, sometimes referred to as “mouth feel.” The mouth feel of the proteins can be due to one or more factors including primary structure, the presence of charged side chains, and the electronic and conformational features of the protein. In some embodiments, proteins elicit a buttery or fat-like mouth feel when ingested.

[0644] Nutritive Compositions and Formulations

[0645] At least one protein disclosed herein can be combined with at least one second component to form a composition. In some embodiments the only source of amino acid in the composition is the at least one protein disclosed herein. In such embodiments the amino acid composition of the composition will be the same as the amino acid composition of the at least one protein disclosed herein. In some embodiments the composition comprises at least one protein disclosed herein and at least one second protein. In some embodiments the at least one second protein is a second protein disclosed herein, while in other embodiments the at least one second protein is not a protein disclosed herein. In some embodiments the composition comprises 1, 2, 3, 4, 5, 6, 7, 8, 9, 10, 11, 12, 13, 14, 15, 16, 17, 18, 19, 20 or more proteins disclosed herein. In some embodiments the composition comprises 0, 1, 2, 3, 4, 5, 6, 7, 8, 9, 10, 11, 12, 13, 14, 15, 16, 17, 18, 19, 20 or more proteins that are not proteins disclosed herein. In some embodiments the composition comprises 1, 2, 3, 4, 5, 6, 7, 8, 9, 10, 11, 12, 13, 14, 15, 16, 17, 18, 19, 20 or more proteins and the composition comprises 0, 1, 2, 3, 4, 5, 6, 7, 8, 9, 10, 11, 12, 13, 14, 15, 16, 17, 18, 19, 20 or more proteins that are not proteins disclosed herein.

[0646] Also provided are formulations containing the nutritive polypeptides described herein. In one aspect, provided is a formulation containing a unicellular organism secreted polypeptide nutritional domain. For example, the polypeptide nutritional domain contains an amino acid sequence having an N-terminal amino acid that does not correspond to the N-terminal amino acid of an amino acid sequence comprising a unicellular organism secreted polypeptide that contains the polypeptide nutritional domain. In some embodiments the amino acid sequence comprising the unicellular organism secreted polypeptide is an edible species polypeptide sequence, and the N-terminal amino acid is a common edible species amino acid. In addition or in the alternative, the polypeptide nutritional domain contains an amino acid sequence having a C-terminal amino acid that does not correspond to the C-terminal amino acid of an amino acid sequence comprising a unicellular organism secreted polypeptide that contains the polypeptide nutritional domain. In some embodiments the amino acid sequence comprising the unicellular organism secreted polypeptide is an edible species polypeptide sequence, and the C-terminal amino acid is a common edible species amino acid. Thus, in some embodiments the secreted polypeptide nutritional domain is at least one amino acid shorter than a homologous edible species polypeptide. The nutritional domain can be about 99%, 98%, 97%, 96%, 95%, 90%, 85%, 80%, 75%, 70%, 65%, 60%, 55%, 50%, 45%, 40%, 35%, 30%, 25%, 20%, 15%, 10%, 5% or less than 5% the length of a homologous edible species peptide. In other embodiments, the polypeptide nutritional domain consists of from about 1% to about 99% of the unicellular organism secreted polypeptide that contains the polypeptide nutritional domain. As described herein, the polypeptide nutritional domain is generally preferred to the larger polypeptide containing the polypeptide nutritional domain. A polypeptide nutritional domain may contain, on a mass basis, more nutrition than the larger including polypeptide. In some embodiments, a polypeptide nutritional domain may provide desirable features when compared to the larger including polypeptide, such as increased solubility and better shelf-life stability.

[0647] In some embodiments the composition as described in the preceding paragraph, further comprises at least one of at least one polypeptide, at least one peptide, and at least one free amino acid. In some embodiments the composition comprises at least one polypeptide and at least one peptide. In some embodiments the composition comprises at least one polypeptide and at least one free amino acid. In some embodiments the composition comprises at least one peptide and at least one free amino acid. In some embodiments the at least one polypeptide, at least one peptide, and/or at least one free amino acid comprises amino acids selected from 1) branched chain amino acids, 2) leucine, and 3) essential amino acids. In some embodiments the at least one polypeptide, at least one peptide, and/or at least one free amino acid consists of amino acids selected from 1) branched chain amino acids, 2) leucine, and 3) essential amino acids. In some embodiments, the composition comprises at least one modified amino acid or a non-standard amino acid. Modified amino acids include amino acids that have modifications to one or more of the carboxy terminus, amino terminus, and/or side chain. Non-standard amino acids can be selected from those that are formed by post-translational modification of proteins, for example, carboxylated glutamate, hydroxyproline, or hypusine. Other non-standard amino acids are not found in proteins. Examples include lanthionine, 2-aminoisobutyric acid, dehydroalanine, gamma-aminobutyric acid, ornithine and citrulline. In some embodiments, the composition comprises one or more D-amino acids. In some embodiments, the composition comprises one or more L-amino acids. In some embodiments, the composition comprises a mixture of one or more D-amino acids and one or more L-amino acids.

[0648] By adding at least one of a polypeptide, a peptide, and a free amino acid to a composition the proportion of at least one of branched chain amino acids, leucine, and essential amino acids, to total amino acid, present in the composition can be increased.

[0649] In some embodiments the composition comprises at least one carbohydrate. A “carbohydrate” refers to a sugar or polymer of sugars. The terms “saccharide,” “polysaccharide,” “carbohydrate,” and “oligosaccharide” can be used interchangeably. Most carbohydrates are aldehydes or ketones with many hydroxyl groups, usually one on each carbon atom of the molecule. Carbohydrates generally have the molecular formula CnH2nOn. A carbohydrate can be a monosaccharide, a disaccharide, trisaccharide, oligosaccharide, or polysaccharide. The most basic carbohydrate is a monosaccharide, such as glucose, sucrose, galactose, mannose, ribose, arabinose, xylose, and fructose. Disaccharides are two joined monosaccharides. Exemplary disaccharides include sucrose, maltose, cellobiose, and lactose. Typically, an oligosaccharide includes between three and six monosaccharide units (e.g., raffinose, stachyose), and polysaccharides include six or more monosaccharide units. Exemplary polysaccharides include starch, glycogen, and cellulose. Carbohydrates may contain modified saccharide units such as 2′-deoxyribose wherein a hydroxyl group is removed, 2′-fluororibose wherein a hydroxyl group is replace with a fluorine, or N-acetylglucosamine, a nitrogen-containing form of glucose (e.g., 2′-fluororibose, deoxyribose, and hexose). Carbohydrates may exist in many different forms, for example, conformers, cyclic forms, acyclic forms, stereoisomers, tautomers, anomers, and isomers.

[0650] In some embodiments the composition comprises at least one lipid. As used herein a “lipid” includes fats, oils, triglycerides, cholesterol, phospholipids, fatty acids in any form including free fatty acids. Fats, oils and fatty acids can be saturated, unsaturated (cis or trans) or partially unsaturated (cis or trans). In some embodiments the lipid comprises at least one fatty acid selected from lauric acid (12:0), myristic acid (14:0), palmitic acid (16:0), palmitoleic acid (16:1), margaric acid (17:0), heptadecenoic acid (17:1), stearic acid (18:0), oleic acid (18:1), linoleic acid (18:2), linolenic acid (18:3), octadecatetraenoic acid (18:4), arachidic acid (20:0), eicosenoic acid (20:1), eicosadienoic acid (20:2), eicosatetraenoic acid (20:4), eicosapentaenoic acid (20:5) (EPA), docosanoic acid (22:0), docosenoic acid (22:1), docosapentaenoic acid (22:5), docosahexaenoic acid (22:6) (DHA), and tetracosanoic acid (24:0). In some embodiments the composition comprises at least one modified lipid, for example a lipid that has been modified by cooking.

[0651] In some embodiments the composition comprises at least one supplemental mineral or mineral source. Examples of minerals include, without limitation: chloride, sodium, calcium, iron, chromium, copper, iodine, zinc, magnesium, manganese, molybdenum, phosphorus, potassium, and selenium. Suitable forms of any of the foregoing minerals include soluble mineral salts, slightly soluble mineral salts, insoluble mineral salts, chelated minerals, mineral complexes, non-reactive minerals such as carbonyl minerals, and reduced minerals, and combinations thereof.

[0652] In some embodiments the composition comprises at least one supplemental vitamin. The at least one vitamin can be fat-soluble or water soluble vitamins. Suitable vitamins include but are not limited to vitamin C, vitamin A, vitamin E, vitamin B12, vitamin K, riboflavin, niacin, vitamin D, vitamin B6, folic acid, pyridoxine, thiamine, pantothenic acid, and biotin. Suitable forms of any of the foregoing are salts of the vitamin, derivatives of the vitamin, compounds having the same or similar activity of the vitamin, and metabolites of the vitamin.

[0653] In some embodiments the composition comprises at least one organism. Suitable examples are well known in the art and include probiotics (e.g., species of Lactobacillus or Bifidobacterium), spirulina, chlorella, and porphyra.

[0654] In some embodiments the composition comprises at least one dietary supplement. Suitable examples are well known in the art and include herbs, botanicals, and certain hormones. Non limiting examples include ginko, gensing, and melatonin.

[0655] In some embodiments the composition comprises an excipient. Non-limiting examples of suitable excipients include a tastant, a flavorant, a buffering agent, a preservative, a stabilizer, a binder, a compaction agent, a lubricant, a dispersion enhancer, a disintegration agent, a flavoring agent, a sweetener, a coloring agent.

[0656] In some embodiments the excipient is a buffering agent. Non-limiting examples of suitable buffering agents include sodium citrate, magnesium carbonate, magnesium bicarbonate, calcium carbonate, and calcium bicarbonate.

[0657] In some embodiments the excipient comprises a preservative. Non-limiting examples of suitable preservatives include antioxidants, such as alpha-tocopherol and ascorbate, and antimicrobials, such as parabens, chlorobutanol, and phenol.

[0658] In some embodiments the composition comprises a binder as an excipient. Non-limiting examples of suitable binders include starches, pregelatinized starches, gelatin, polyvinylpyrolidone, cellulose, methylcellulose, sodium carboxymethylcellulose, ethylcellulose, polyacrylamides, polyvinyloxoazolidone, polyvinylalcohols, C12-C18 fatty acid alcohol, polyethylene glycol, polyols, saccharides, oligosaccharides, and combinations thereof.

[0659] In some embodiments the composition comprises a lubricant as an excipient. Non-limiting examples of suitable lubricants include magnesium stearate, calcium stearate, zinc stearate, hydrogenated vegetable oils, sterotex, polyoxyethylene monostearate, talc, polyethyleneglycol, sodium benzoate, sodium lauryl sulfate, magnesium lauryl sulfate, and light mineral oil.

[0660] In some embodiments the composition comprises a dispersion enhancer as an excipient. Non-limiting examples of suitable dispersants include starch, alginic acid, polyvinylpyrrolidones, guar gum, kaolin, bentonite, purified wood cellulose, sodium starch glycolate, isomorphous silicate, and microcrystalline cellulose as high HLB emulsifier surfactants.

[0661] In some embodiments the composition comprises a disintegrant as an excipient. In some embodiments the disintegrant is a non-effervescent disintegrant. Non-limiting examples of suitable non-effervescent disintegrants include starches such as corn starch, potato starch, pregelatinized and modified starches thereof, sweeteners, clays, such as bentonite, micro-crystalline cellulose, alginates, sodium starch glycolate, gums such as agar, guar, locust bean, karaya, pecitin, and tragacanth. In some embodiments the disintegrant is an effervescent disintegrant. Non-limiting examples of suitable effervescent disintegrants include sodium bicarbonate in combination with citric acid, and sodium bicarbonate in combination with tartaric acid.

[0662] In some embodiments the excipient comprises a flavoring agent. Flavoring agents incorporated into the outer layer can be chosen from synthetic flavor oils and flavoring aromatics; natural oils; extracts from plants, leaves, flowers, and fruits; and combinations thereof. In some embodiments the flavoring agent is selected from cinnamon oils; oil of wintergreen; peppermint oils; clover oil; hay oil; anise oil; eucalyptus; vanilla; citrus oil such as lemon oil, orange oil, grape and grapefruit oil; and fruit essences including apple, peach, pear, strawberry, raspberry, cherry, plum, pineapple, and apricot.

[0663] In some embodiments the excipient comprises a sweetener. Non-limiting examples of suitable sweeteners include glucose (corn syrup), dextrose, invert sugar, fructose, and mixtures thereof (when not used as a carrier); saccharin and its various salts such as the sodium salt; dipeptide sweeteners such as aspartame; dihydrochalcone compounds, glycyrrhizin; Stevia Rebaudiana (Stevioside); chloro derivatives of sucrose such as sucralose; and sugar alcohols such as sorbitol, mannitol, sylitol, and the like. Also contemplated are hydrogenated starch hydrolysates and the synthetic sweetener 3,6-dihydro-6-methyl-1,2,3-oxathiazin-4-one-2,2-dioxide, particularly the potassium salt (acesulfame-K), and sodium and calcium salts thereof.

[0664] In some embodiments the composition comprises a coloring agent. Non-limiting examples of suitable color agents include food, drug and cosmetic colors (FD&C), drug and cosmetic colors (D&C), and external drug and cosmetic colors (Ext. D&C). The coloring agents can be used as dyes or their corresponding lakes.

[0665] The weight fraction of the excipient or combination of excipients in the formulation is usually about 50% or less, about 45% or less, about 40% or less, about 35% or less, about 30% or less, about 25% or less, about 20% or less, about 15% or less, about 10% or less, about 5% or less, about 2% or less, or about 1% or less of the total weight of the amino acids in the composition.

[0666] The proteins and compositions disclosed herein can be formulated into a variety of forms and administered by a number of different means. The compositions can be administered orally, rectally, or parenterally, in formulations containing conventionally acceptable carriers, adjuvants, and vehicles as desired. The term “parenteral” as used herein includes subcutaneous, intravenous, intramuscular, or intrasternal injection and infusion techniques. In an exemplary embodiment, the protein or composition is administered orally.

[0667] Solid dosage forms for oral administration include capsules, tablets, caplets, pills, troches, lozenges, powders, and granules. A capsule typically comprises a core material comprising a protein or composition and a shell wall that encapsulates the core material. In some embodiments the core material comprises at least one of a solid, a liquid, and an emulsion. In some embodiments the shell wall material comprises at least one of a soft gelatin, a hard gelatin, and a polymer. Suitable polymers include, but are not limited to: cellulosic polymers such as hydroxypropyl cellulose, hydroxyethyl cellulose, hydroxypropyl methyl cellulose (HPMC), methyl cellulose, ethyl cellulose, cellulose acetate, cellulose acetate phthalate, cellulose acetate trimellitate, hydroxypropylmethyl cellulose phthalate, hydroxypropylmethyl cellulose succinate and carboxymethylcellulose sodium; acrylic acid polymers and copolymers, such as those formed from acrylic acid, methacrylic acid, methyl acrylate, ammonio methylacrylate, ethyl acrylate, methyl methacrylate and/or ethyl methacrylate (e.g., those copolymers sold under the trade name “Eudragit”); vinyl polymers and copolymers such as polyvinyl pyrrolidone, polyvinyl acetate, polyvinylacetate phthalate, vinylacetate crotonic acid copolymer, and ethylene-vinyl acetate copolymers; and shellac (purified lac). In some embodiments at least one polymer functions as taste-masking agents.

[0668] Tablets, pills, and the like can be compressed, multiply compressed, multiply layered, and/or coated. The coating can be single or multiple. In one embodiment, the coating material comprises at least one of a saccharide, a polysaccharide, and glycoproteins extracted from at least one of a plant, a fungus, and a microbe. Non-limiting examples include corn starch, wheat starch, potato starch, tapioca starch, cellulose, hemicellulose, dextrans, maltodextrin, cyclodextrins, inulins, pectin, mannans, gum arabic, locust bean gum, mesquite gum, guar gum, gum karaya, gum ghatti, tragacanth gum, funori, carrageenans, agar, alginates, chitosans, or gellan gum. In some embodiments the coating material comprises a protein. In some embodiments the coating material comprises at least one of a fat and oil. In some embodiments the at least one of a fat and an oil is high temperature melting. In some embodiments the at least one of a fat and an oil is hydrogenated or partially hydrogenated. In some embodiments the at least one of a fat and an oil is derived from a plant. In some embodiments the at least one of a fat and an oil comprises at least one of glycerides, free fatty acids, and fatty acid esters. In some embodiments the coating material comprises at least one edible wax. The edible wax can be derived from animals, insects, or plants. Non-limiting examples include beeswax, lanolin, bayberry wax, carnauba wax, and rice bran wax. Tablets and pills can additionally be prepared with enteric coatings.

[0669] Alternatively, powders or granules embodying the proteins and compositions disclosed herein can be incorporated into a food product. In some embodiments the food product is be a drink for oral administration. Non-limiting examples of a suitable drink include fruit juice, a fruit drink, an artificially flavored drink, an artificially sweetened drink, a carbonated beverage, a sports drink, a liquid diary product, a shake, an alcoholic beverage, a caffeinated beverage, infant formula and so forth. Other suitable means for oral administration include aqueous and nonaqueous solutions, creams, pastes, emulsions, suspensions and slurries, each of which may optionally also containing at least one of suitable solvents, preservatives, emulsifying agents, suspending agents, diluents, sweeteners, coloring agents, a tastant, a flavorant, and flavoring agents.

[0670] In some embodiments the food product is a solid foodstuff. Suitable examples of a solid foodstuff include without limitation a food bar, a snack bar, a cookie, a brownie, a muffin, a cracker, a biscuit, a cream or paste, an ice cream bar, a frozen yogurt bar, and the like.

[0671] In some embodiments, the proteins and compositions disclosed herein are incorporated into a therapeutic food. In some embodiments, the therapeutic food is a ready-to-use food that optionally contains some or all essential macronutrients and micronutrients. In some embodiments, the proteins and compositions disclosed herein are incorporated into a supplementary food that is designed to be blended into an existing meal. In some embodiments, the supplemental food contains some or all essential macronutrients and micronutrients. In some embodiments, the proteins and compositions disclosed herein are blended with or added to an existing food to fortify the food's protein nutrition. Examples include food staples (grain, salt, sugar, cooking oil, margarine), beverages (coffee, tea, soda, beer, liquor, sports drinks), snacks, sweets and other foods.

[0672] The compositions disclosed herein can be utilized in methods to increase at least one of muscle mass, strength and physical function, thermogenesis, metabolic expenditure, satiety, mitochondrial biogenesis, weight or fat loss, and lean body composition for example.

[0673] A formulation can contain a nutritive polypeptide up to about 25 g per 100 kilocalories (25 g/100 kcal) in the formulation, meaning that all or essentially all of the energy present in the formulation is in the form of the nutritive polypeptide. More typically, about 99%, 98%, 97%, 96%, 95%, 90%, 85%, 80%, 75%, 70%, 65%, 60%, 55%, 50%, 45%, 40%, 35%, 30%, 25%, 20%, 15%, 10%, 5% or less than 5% of the energy present in the formulation is in the form of the nutritive polypeptide. In other formulations, the nutritive polypeptide is present in an amount sufficient to provide a nutritional benefit equivalent to or greater than at least about 0.1% of a reference daily intake value of polypeptide. Suitable reference daily intake values for protein are well known in the art. See, e.g., Dietary Reference Intakes for Energy, Carbohydrate, Fiber, Fat, Fatty Acids, Cholesterol, Protein and Amino Acids, Institute of Medicine of the National Academies, 2005, National Academies Press, Washington D.C. A reference daily intake value for protein is a range wherein 10-35% of daily calories are provided by protein and isolated amino acids. Another reference daily intake value based on age is provided as grams of protein per day: children ages 1-3: 13 g, children ages 4-8: 19 g, children ages 9-13: 34 g, girls ages 14-18: 46, boys ages 14-18: 52, women ages 19-70+: 46, and men ages 19-70+: 56. In other formulations, the nutritive polypeptide is present in an amount sufficient to provide a nutritional benefit to a human subject suffering from protein malnutrition or a disease, disorder or condition characterized by protein malnutrition. Protein malnutrition is commonly a prenatal or childhood condition. Protein malnutrition with adequate energy intake is termed kwashiorkor or hypoalbuminemic malnutrition, while inadequate energy intake in all forms, including inadequate protein intake, is termed marasmus. Adequately nourished individuals can develop sarcopenia from consumption of too little protein or consumption of proteins deficient in nutritive amino acids. Prenatal protein malnutrition can be prevented, treated or reduced by administration of the nutritive polypeptides described herein to pregnant mothers, and neonatal protein malnutrition can be prevented, treated or reduced by administration of the nutritive polypeptides described herein to the lactation mother. In adults, protein malnutrition is commonly a secondary occurrence to cancer, chronic renal disease, and in the elderly. Additionally, protein malnutrition can be chronic or acute. Examples of acute protein malnutrition occur during an acute illness or disease such as sepsis, or during recovery from a traumatic injury, such as surgery, thermal injury such as a burn, or similar events resulting in substantial tissue remodeling. Other acute illnesses treatable by the methods and compositions described herein include sarcopenia, cachexia, diabetes, insulin resistance, and obesity.

[0674] A formulation can contain a nutritive polypeptide in an amount sufficient to provide a feeling of satiety when consumed by a human subject, meaning the subject feels a reduced sense or absence of hunger, or desire to eat. Such a formulation generally has a higher satiety index than carbohydrate-rich foods on an equivalent calorie basis.

[0675] A formulation can contain a nutritive polypeptide in an amount based on the concentration of the nutritive polypeptide (e.g., on a weight-to-weight basis), such that the nutritive polypeptide accounts for up to 100% of the weight of the formulation, meaning that all or essentially all of the matter present in the formulation is in the form of the nutritive polypeptide. More typically, about 99%, 98%, 97%, 96%, 95%, 90%, 85%, 80%, 75%, 70%, 65%, 60%, 55%, 50%, 45%, 40%, 35%, 30%, 25%, 20%, 15%, 10%, 5% or less than 5% of the weight present in the formulation is in the form of the nutritive polypeptide. In some embodiments, the formulation contains 10 mg, 100 mg, 500 mg, 750 mg, 1 g, 2 g, 3 g, 4 g, 5 g, 6 g, 7 g, 8 g, 9, 10 g, 15 g, 20 g, 25 g, 30 g, 35 g, 40 g, 45 g, 50 g, 60 g, 70 g, 80 g, 90 g, 100 g or over 100 g of nutritive polypeptide.

[0676] Preferably, the formulations provided herein are substantially free of non-comestible products. Non-comestible products are often found in preparations of recombinant proteins of the prior art, produced from yeast, bacteria, algae, insect, mammalian or other expression systems. Exemplary non-comestible products include surfactant, a polyvinyl alcohol, a propylene glycol, a polyvinyl acetate, a polyvinylpyrrolidone, a non-comestible polyacid or polyol, a fatty alcohol, an alkylbenzyl sulfonate, an alkyl glucoside, or a methyl paraben.

[0677] In aspects, the provided formulations contain other materials, such as a tastant, a nutritional carbohydrate and/or a nutritional lipid. In addition, formulations may include bulking agents, texturizers, and fillers.

[0678] In preferred embodiments, the nutritive polypeptides provided herein are isolated and/or substantially purified. The nutritive polypeptides and the compositions and formulations provided herein, are substantially free of non-protein components. Such non-protein components are generally present in protein preparations such as whey, casein, egg and soy preparations, which contain substantial amounts of carbohydrates and lipids that complex with the polypeptides and result in delayed and incomplete protein digestion in the gastrointestinal tract. Such non-protein components can also include DNA. Thus, the nutritive polypeptides, compositions and formulations are characterized by improved digestability and decreased allergenicity as compared to food-derived polypeptides and polypeptide mixtures. Furthermore, these formulations and compositions are characterized by more reproducible digestability from a time and/or a digestion product at a given unit time basis. In certain embodiments, a nutritive polypeptide is at least 10% reduced in lipids and/or carbohydrates, and optionally one or more other materials that decreases digestibility and/or increases allergenicity, relative to a reference polypeptide or reference polypeptide mixture, e.g., is reduced by 20%, 30%, 40%, 50%, 60%, 70%, 80%, 90%, 95%, 99% or greater than 99%. In certain embodiments, the nutritive formulations contain a nutritional carbohydrate and/or nutritional lipid, which may be selected for digestibility and/or reduced allergenicity.

[0679] Methods of Use

[0680] In some embodiments the proteins and compositions disclosed herein are administered to a patient or a user (sometimes collectively referred to as a “subject”). As used herein “administer” and “administration” encompasses embodiments in which one person directs another to consume a protein or composition in a certain manner and/or for a certain purpose, and also situations in which a user uses a protein or composition in a certain manner and/or for a certain purpose independently of or in variance to any instructions received from a second person. Non-limiting examples of embodiments in which one person directs another to consume a protein or composition in a certain manner and/or for a certain purpose include when a physician prescribes a course of conduct and/or treatment to a patient, when a trainer advises a user (such as an athlete) to follow a particular course of conduct and/or treatment, and when a manufacturer, distributer, or marketer recommends conditions of use to an end user, for example through advertisements or labeling on packaging or on other materials provided in association with the sale or marketing of a product.

[0681] In some embodiments the proteins or compositions are provided in a dosage form. In some embodiments the dosage form is designed for administration of at least one protein disclosed herein, wherein the total amount of protein administered is selected from 0.1 g to 1 g, 1 g to 5 g, from 2 g to 10 g, from 5 g to 15 g, from 10 g to 20 g, from 15 g to 25 g, from 20 g to 40 g, from 25-50 g, and from 30-60 g. In some embodiments the dosage form is designed for administration of at least one protein disclosed herein, wherein the total amount of protein administered is selected from about 0.1 g, 0.1 g-1 g, 1 g, 2 g, 3 g, 4 g, 5 g, 6 g, 7 g, 8 g, 9 g, 10 g, 15 g, 20 g, 25 g, 30 g, 35 g, 40 g, 45 g, 50 g, 55 g, 60 g, 65 g, 70 g, 75 g, 80 g, 85 g, 90 g, 95 g, and 100 g.

[0682] In some embodiments the dosage form is designed for administration of at least one protein disclosed herein, wherein the total amount of essential amino acids administered is selected from 0.1 g to 1 g, from 1 g to 5 g, from 2 g to 10 g, from 5 g to 15 g, from 10 g to 20 g, and from 1-30 g. In some embodiments the dosage form is designed for administration of at least one protein disclosed herein, wherein the total amount of protein administered is selected from about 0.1 g, 0.1-1 g, 1 g, 2 g, 3 g, 4 g, 5 g, 6 g, 7 g, 8 g, 9 g, 10 g, 15 g, 20 g, 25 g, 30 g, 35 g, 40 g, 45 g, 50 g, 55 g, 60 g, 65 g, 70 g, 75 g, 80 g, 85 g, 90 g, 95 g, and 100 g.

[0683] In some embodiments the protein or composition is consumed at a rate of from 0.1 g to 1 g a day, 1 g to 5 g a day, from 2 g to 10 g a day, from 5 g to 15 g a day, from 10 g to 20 g a day, from 15 g to 30 g a day, from 20 g to 40 g a day, from 25 g to 50 g a day, from 40 g to 80 g a day, from 50 g to 100 g a day, or more.

[0684] In some embodiments, of the total protein intake by the subject, at least 5%, at least 10%, at least 15%, at least 20%, at least 25%, at least 30%, at least 35%, at least 40%, at least 45%, at least 50%, at least 55%, at least 60%, at least 65%, at least 70%, at least 75%, at least 80%, at least 85%, at least 90%, at least 95%, or about 100% of the total protein intake by the subject over a dietary period is made up of at least one protein according to this disclosure. In some embodiments, of the total protein intake by the subject, from 5% to 100% of the total protein intake by the subject, from 5% to 90% of the total protein intake by the subject, from 5% to 80% of the total protein intake by the subject, from 5% to 70% of the total protein intake by the subject, from 5% to 60% of the total protein intake by the subject, from 5% to 50% of the total protein intake by the subject, from 5% to 40% of the total protein intake by the subject, from 5% to 30% of the total protein intake by the subject, from 5% to 20% of the total protein intake by the subject, from 5% to 10% of the total protein intake by the subject, from 10% to 100% of the total protein intake by the subject, from 10% to 100% of the total protein intake by the subject, from 20% to 100% of the total protein intake by the subject, from 30% to 100% of the total protein intake by the subject, from 40% to 100% of the total protein intake by the subject, from 50% to 100% of the total protein intake by the subject, from 60% to 100% of the total protein intake by the subject, from 70% to 100% of the total protein intake by the subject, from 80% to 100% of the total protein intake by the subject, or from 90% to 100% of the total protein intake by the subject, over a dietary period, is made up of at least one protein according to this disclosure. In some embodiments the at least one protein of this disclosure accounts for at least 5%, at least 10%, at least 15%, at least 20%, at least 25%, at least 30%, at least 35%, at least 40%, at least 45%, or at least 50% of the subject's calorie intake over a dietary period.

[0685] In some embodiments the at least one protein according to this disclosure comprises at least 2 proteins of this disclosure, at least 3 proteins of this disclosure, at least 4 proteins of this disclosure, at least 5 proteins of this disclosure, at least 6 proteins of this disclosure, at least 7 proteins of this disclosure, at least 8 proteins of this disclosure, at least 9 proteins of this disclosure, at least 10 proteins of this disclosure, or more.

[0686] In some embodiments the dietary period is 1 meal, 2 meals, 3 meals, at least 1 day, at least 2 days, at least 3 days, at least 4 days, at least 5 days, at least 6 days, at least 1 week, at least 2 weeks, at least 3 weeks, at least 4 weeks, at least 1 month, at least 2 months, at least 3 months, at least 4 months, at least 5 months, at least 6 months, or at least 1 year. In some embodiments the dietary period is from 1 day to 1 week, from 1 week to 4 weeks, from 1 month, to 3 months, from 3 months to 6 months, or from 6 months to 1 year.

[0687] Clinical studies provide evidence that protein prevents muscle loss due to aging or disuse, such as from immobility or prolonged bed rest. In particular, studies have shown that protein supplementation increases muscle fractional synthetic rate (FSR) during prolonged bed rest, maintains leg mass and strength during prolonged bed rest, increases lean body mass, improves functional measures of gait and balance, and may serve as a viable intervention for individuals at risk of sarcopenia due to immobility or prolonged bed rest. See, e.g., Paddon-Jones D, et al. J Clin Endocrinol Metab 2004, 89:4351-4358; Ferrando, A et al. Clinical Nutrition 2009 1-6; Katsanos C et al. Am J Physiol Endocrinol Metab. 2006, 291: 381-387.

[0688] Studies on increasing muscle protein anabolism in athletes have shown that protein provided following exercise promotes muscle hypertrophy to a greater extent than that achieved by exercise alone. It has also been shown that protein provided following exercise supports protein synthesis without any increase in protein breakdown, resulting in a net positive protein balance and muscle mass accretion. While muscle protein synthesis appears to respond in a dose-response fashion to essential amino acid supplementation, not all proteins are equal in building muscle. For example, the amino acid leucine is an important factor in stimulating muscle protein synthesis. See, e.g., Borscheim E et al. Am J Physiol Endocrinol Metab 2002, 283: E648-E657; Borsheim E et al. Clin Nutr. 2008, 27: 189-95; Esmarck B et al J Physiol 2001, 535: 301-311; Moore D et al. Am J Clin Nutr 2009, 89: 161-8).

[0689] In another aspect this disclosure provides methods of maintaining or increasing at least one of muscle mass, muscle strength, and functional performance in a subject. In some embodiments the methods comprise providing to the subject a sufficient amount of a protein of this disclosure, a composition of this disclosure, or a composition made by a method of this disclosure. In some embodiments the subject is at least one of elderly, critically-medically ill, and suffering from protein-energy malnutrition. In some embodiments the sufficient amount of a protein of this disclosure, a composition of this disclosure, or a composition made by a method of this disclosure is consumed by the subject in coordination with performance of exercise. In some embodiments the protein of this disclosure, composition of this disclosure, or composition made by a method of this disclosure is consumed by the subject by an oral, enteral, or parenteral route. In some embodiments the protein of this disclosure, composition of this disclosure, or composition made by a method of this disclosure is consumed by the subject by an oral route. In some embodiments the protein of this disclosure, composition of this disclosure, or composition made by a method of this disclosure is consumed by the subject by an enteral route.

[0690] In another aspect this disclosure provides methods of maintaining or achieving a desirable body mass index in a subject. In some embodiments the methods comprise providing to the subject a sufficient amount of a protein of this disclosure, a composition of this disclosure, or a composition made by a method of this disclosure. In some embodiments the subject is at least one of elderly, critically-medically ill, and suffering from protein-energy malnutrition. In some embodiments the sufficient amount of a protein of this disclosure, a composition of this disclosure, or a composition made by a method of this disclosure is consumed by the subject in coordination with performance of exercise. In some embodiments the protein of this disclosure, composition of this disclosure, or composition made by a method of this disclosure is consumed by the subject by an oral, enteral, or parenteral route.

[0691] In another aspect this disclosure provides methods of providing protein to a subject with protein-energy malnutrition. In some embodiments the methods comprise providing to the subject a sufficient amount of a protein of this disclosure, a composition of this disclosure, or a composition made by a method of this disclosure. In some embodiments the protein of this disclosure, composition of this disclosure, or composition made by a method of this disclosure is consumed by the subject by an oral, enteral, or parenteral route.

[0692] The need for essential amino acid supplementation has been suggested in cancer patients and other patients suffering from muscle wasting and cachexia. Dietary studies in mice have shown survival and functional benefits to cachectic cancer-bearing mice through dietary intervention with essential amino acids. Beyond cancer, essential amino acid supplementation has also shown benefits, such as improved muscle function and muscle gain, in patients suffering from other diseases that have difficulty exercising and therefore suffer from muscular deterioration, such as chronic obstructive pulmonary disease, chronic heart failure, HIV, and other disease states.

[0693] Studies have shown that specific amino acids have advantages in managing cachexia. A relatively high content of BCAAs and Leu in diets are thought to have a positive effect in cachexia by promoting total protein synthesis by signaling an increase in translation, enhancing insulin release, and inhibiting protein degradation. Thus, consuming increased dietary BCAAs in general and/or Leu in particular will contribute positively to reduce or reverse the effects of cachexia. Because nitrogen balance is important in countering the underlying cause of cachexia it is thought that consuming increased dietary glutamine and/or arginine will contribute positively to reduce or reverse the effects of cachexia. See, e.g., Op den Kamp C, Langen R, Haegens A, Schols A. “Muscle atrophy in cachexia: can dietary protein tip the balance?” Current Opinion in Clinical Nutrition and Metabolic Care 2009, 12:611-616; Poon R T-P, Yu W-C, Fan S-T, et al. “Long-term oral branched chain amino acids in patients undergoing chemoembolization for hepatocellular carcinoma: a randomized trial.” Aliment Pharmacol Ther 2004; 19:779-788; Tayek J A, Bistrian B R, Hehir D J, Martin R, Moldawer L L, Blackburn G L. “Improved protein kinetics and albumin synthesis by branched chain amino acid-enriched total parenteral nutrition in cancer cachexia.” Cancer. 1986; 58:147-57; Xi P, Jiang Z, Zheng C, Lin Y, Wu G “Regulation of protein metabolism by glutamine: implications for nutrition and health.” Front Biosci. 2011 Jan. 1; 16:578-97.

[0694] Accordingly, also provided herein are methods of treating cachexia in a subject. In some embodiments a sufficient amount of a protein of this disclosure, a composition of this disclosure, or a composition made by a method of this disclosure for a subject with cachexia is an amount such that the amount of protein of this disclosure ingested by the person meets or exceeds the metabolic needs (which are often elevated). A protein intake of 1.5 g/kg of body weight per day or 15-20% of total caloric intake appears to be an appropriate target for persons with cachexia. In some embodiments all of the protein consumed by the subject is a protein according to this disclosure. In some embodiments protein according to this disclosure is combined with other sources of protein and/or free amino acids to provide the total protein intake of the subject. In some embodiments the subject is at least one of elderly, critically-medically ill, and suffering from protein-energy malnutrition. In some embodiments the subject suffers from a disease that makes exercise difficult and therefore causes muscular deterioration, such as chronic obstructive pulmonary disease, chronic heart failure, HIV, cancer, and other disease states. In some embodiments, the protein according to disclosure, the composition according to disclosure, or the composition made by a method according to disclosure is consumed by the subject in coordination with performance of exercise. In some embodiments, the protein according to this disclosure, the composition according to disclosure, or the composition made by a method according to disclosure is consumed by the subject by an oral, enteral, or parenteral route.

[0695] Sarcopenia is the degenerative loss of skeletal muscle mass (typically 0.5-1% loss per year after the age of 25), quality, and strength associated with aging. Sarcopenia is a component of the frailty syndrome. The European Working Group on Sarcopenia in Older People (EWGSOP) has developed a practical clinical definition and consensus diagnostic criteria for age-related sarcopenia. For the diagnosis of sarcopenia, the working group has proposed using the presence of both low muscle mass and low muscle function (strength or performance). Sarcopenia is characterized first by a muscle atrophy (a decrease in the size of the muscle), along with a reduction in muscle tissue “quality,” caused by such factors as replacement of muscle fibres with fat, an increase in fibrosis, changes in muscle metabolism, oxidative stress, and degeneration of the neuromuscular junction. Combined, these changes lead to progressive loss of muscle function and eventually to frailty. Frailty is a common geriatric syndrome that embodies an elevated risk of catastrophic declines in health and function among older adults. Contributors to frailty can include sarcopenia, osteoporosis, and muscle weakness. Muscle weakness, also known as muscle fatigue, (or “lack of strength”) refers to the inability to exert force with one's skeletal muscles. Weakness often follows muscle atrophy and a decrease in activity, such as after a long bout of bedrest as a result of an illness. There is also a gradual onset of muscle weakness as a result of sarcopenia.

[0696] The proteins of this disclosure are useful for treating sarcopenia or frailty once it develops in a subject or for preventing the onset of sarcopenia or frailty in a subject who is a member of an at risk groups. In some embodiments all of the protein consumed by the subject is a protein according to this disclosure. In some embodiments protein according to this disclosure is combined with other sources of protein and/or free amino acids to provide the total protein intake of the subject. In some embodiments the subject is at least one of elderly, critically-medically ill, and suffering from protein-energy malnutrition. In some embodiments, the protein according to disclosure, the composition according to disclosure, or the composition made by a method according to disclosure is consumed by the subject in coordination with performance of exercise. In some embodiments, the protein according to this disclosure, the composition according to disclosure, or the composition made by a method according to disclosure is consumed by the subject by an oral, enteral, or parenteral route.

[0697] Obesity is a multifactorial disorder associated with a host of comorbidities including hypertension, type 2 diabetes, dyslipidemia, coronary heart disease, stroke, cancer (eg, endometrial, breast, and colon), osteoarthritis, sleep apnea, and respiratory problems. The incidence of obesity, defined as a body mass index >30 kg/m2, has increased dramatically in the United States, from 15% (1976-1980) to 33% (2003-2004), and it continues to grow. Although the mechanisms contributing to obesity are complex and involve the interplay of behavioral components with hormonal, genetic, and metabolic processes, obesity is largely viewed as a lifestyle-dependent condition with 2 primary causes: excessive energy intake and insufficient physical activity. With respect to energy intake, there is evidence that modestly increasing the proportion of protein in the diet, while controlling total energy intake, may improve body composition, facilitate fat loss, and improve body weight maintenance after weight loss. Positive outcomes associated with increased dietary protein are thought to be due primarily to lower energy intake associated with increased satiety, reduced energy efficiency and/or increased thermogenesis, positive effects on body composition (specifically lean muscle mass), and enhanced glycemic control.

[0698] Dietary proteins are more effective in increasing post-prandial energy expenditure than isocaloric intakes of carbohydrates or fat (see, e.g., Dauncey M, Bingham S. “Dependence of 24 h energy expenditure in man on composition of the nutrient intake.” Br J Nutr 1983, 50: 1-13; Karst H et al. “Diet-induced thermogenesis in man: thermic effects of single proteins, carbohydrates and fats depending on their energy amount.” Ann Nutr Metab. 1984, 28: 245-52; Tappy L et al “Thermic effect of infused amino acids in healthy humans and in subjects with insulin resistance.” Am J Clin Nutr 1993, 57 (6): 912-6). This property along with other properties (satiety induction; preservation of lean body mass) make protein an attractive component of diets directed at weight management. The increase in energy expenditure caused by such diets may in part be due to the fact that the energy cost of digesting and metabolizing protein is higher than for other calorie sources. Protein turnover, including protein synthesis, is an energy consuming process. In addition, high protein diets may also up-regulate uncoupling protein in liver and brown adipose, which is positively correlated with increases in energy expenditure. It has been theorized that different proteins may have unique effects on energy expenditure.

[0699] Studies suggest that ingestion of protein, particularly proteins with high EAA and/or BCAA content, leads to distinct effects on thermogenesis and energy expenditure (see, e.g., Mikkelsen P. et al. “Effect of fat-reduced diets on 24 h energy expenditure: comparisons between animal protein, vegetable protein and carbohydrate.” Am J Clin Nutr 2000, 72:1135-41; Acheson K. et al. “Protein choices targeting thermogenesis and metabolism.” Am J Clin Nutr 2011, 93:525-34; Alfenas R. et al. “Effects of protein quality on appetite and energy metabolism in normal weight subjects” Arg Bras Endocrinol Metabol 2010, 54 (1): 45-51; Lorenzen J. et al. “The effect of milk proteins on appetite regulation and diet-induced thermogenesis.” J Clin Nutr 2012 66 (5): 622-7). Additionally, L-tyrosine has been identified as an amino acid that plays a role in thermogenesis (see, e.g., Belza A. et al. “The beta-adrenergic antagonist propranolol partly abolishes thermogenic response to bioactive food ingredients.” Metabolism 2009, 58 (8):1137-44). Further studies suggest that Leucine and Arginine supplementation appear to alter energy metabolism by directing substrate to lean body mass rather than adipose tissue (Dulloo A. “The search for compounds that stimulate thermogenesis in obesity management: from pharmaceuticals to functional food ingredients.” Obes Rev 2011 12: 866-83).

[0700] Collectively the literature suggests that different protein types leads to distinct effects on thermogenesis. Because proteins or peptides rich in EAAs, BCAA, and/or at least one of Tyr, Arg, and Leu are believed to have a stimulatory effect on thermogenesis, and because stimulation of thermogenesis is believed to lead to positive effects on weight management, this disclosure also provides products and methods useful to stimulation thermogenesis and/or to bring about positive effects on weight management in general.

[0701] More particularly, this disclosure provides methods of increasing thermogenesis in a subject. In some embodiments the methods comprise providing to the subject a sufficient amount of a protein of this disclosure, a composition of this disclosure, or a composition made by a method of this disclosure. In some embodiments the subject is obese. In some embodiments, the protein according to disclosure, the composition according to disclosure, or the composition made by a method according to disclosure is consumed by the subject in coordination with performance of exercise. In some embodiments, the protein according to disclosure, the composition according to disclosure, or the composition made by a method according to disclosure is consumed by the subject by an oral, enteral, or parenteral route.

[0702] At the basic level, the reason for the development of an overweight condition is due to an imbalance between energy intake and energy expenditure. Attempts to reduce food at any particular occasion (satiation) and across eating occasions (satiety) have been a major focus of recent research. Reduced caloric intake as a consequence of feeling satisfied during a meal and feeling full after a meal results from a complex interaction of internal and external signals. Various nutritional studies have demonstrated that variation in food properties such as energy density, content, texture and taste influence both satiation and satiety.

[0703] There are three macronutrients that deliver energy: fat, carbohydrates and proteins. A gram of protein or carbohydrate provides 4 calories while a gram of fat 9 calories. Protein generally increases satiety to a greater extent than carbohydrates or fat and therefore may facilitate a reduction in calorie intake. However, there is considerable evidence that indicates the type of protein matters in inducing satiety (see, e.g., W. L. Hall, et al. “Casein and whey exert different effects on plasma amino acid profiles, gastrointestinal hormone secretion and appetite.” Br J Nutr. 2003 February, 89(2):239-48; R. Abou-Samra, et al. “Effect of different protein sources on satiation and short-term satiety when consumed as a starter.” Nutr J. 2011 Dec. 23, 10:139; T. Akhavan, et al. “Effect of premeal consumption of whey protein and its hydrolysate on food intake and postmeal glycemia and insulin responses in young adults.” Am J Clin Nutr. 2010 April, 91(4):966-75, Epub 2010 Feb. 17; M A Veldhorst “Dose-dependent satiating effect of whey relative to casein or soy” Physiol Behav. 2009 Mar. 23, 96(4-5):675-82). Evidence indicates that protein rich in Leucine is particularly effective at inducing satiety (see, e.g., Fromentin G et al “Peripheral and central mechanisms involved in the control of food intake by dietary amino acids and proteins.” Nutr Res Rev 2012 25: 29-39).

[0704] In some embodiments a protein of this disclosure is consumed by a subject concurrently with at least one pharmaceutical or biologic drug product. In some embodiments the beneficial effects of the protein and the at least one pharmaceutical or biologic drug product have an additive effect while in some embodiments the beneficial effects of the protein and the at least one pharmaceutical or biologic drug product have a synergistic effect. Examples of pharmaceutical or biologic drug products that can be administered with the proteins of this disclosure are well known in the art. For example, when a protein of this disclosure is used to maintain or increase at least one of muscle mass, muscle strength, and functional performance in a subject, the protein can be consumed by a subject concurrently with a therapeutic dosage regime of at least one pharmaceutical or biologic drug product indicated to maintain or increase at least one of muscle mass, muscle strength, and functional performance in a subject, such as an anabolic steroid. When a protein of this disclosure is used to maintain or achieve a desirable body mass index in a subject, the protein can be consumed by a subject concurrently with a therapeutic dosage regime of at least one pharmaceutical or biologic drug product indicated to maintain or achieve a desirable body mass index in a subject, such as orlistat, lorcaserin, sibutramine, rimonabant, metformin, exenatide, or pramlintide. When a protein of this disclosure is used to induce at least one of a satiation response and a satiety response in a subject, the protein can be consumed by a subject concurrently with a therapeutic dosage regime of at least one pharmaceutical or biologic drug product indicated to induce at least one of a satiation response and a satiety response in a subject, such as rimonabant, exenatide, or pramlintide. When a protein of this disclosure is used to treat at least one of cachexia, sarcopenia and frailty in a subject, the protein can be consumed by a subject concurrently with a therapeutic dosage regime of at least one pharmaceutical or biologic drug product indicated to treat at least one of cachexia, sarcopenia and frailty, such as omega-3 fatty acids or anabolic steroids. Because of the role of dietary protein in inducing satiation and satiety, the proteins and compositions disclosed herein can be used to induce at least one of a satiation response and a satiety response in a subject. In some embodiments the methods comprise providing to the subject a sufficient amount of a protein of this disclosure, a composition of this disclosure, or a composition made by a method of this disclosure. In some embodiments the subject is obese. In some embodiments, the protein according to disclosure, the composition according to disclosure, or the composition made by a method according to disclosure is consumed by the subject in coordination with performance of exercise. In some embodiments, the protein according to disclosure, the composition according to disclosure, or the composition made by a method according to disclosure is consumed by the subject by an oral, enteral, or parenteral route.

[0705] In some embodiments incorporating a least one protein or composition of this disclosure into the diet of a subject has at least one effect selected from inducing postprandial satiety (including by suppressing hunger), inducing thermogenesis, reducing glycemic response, positively affecting energy expenditure positively affecting lean body mass, reducing the weight gain caused by overeating, and decreasing energy intake. In some embodiments incorporating a least one protein or composition of this disclosure into the diet of a subject has at least one effect selected from increasing loss of body fat, reducing lean tissue loss, improving lipid profile, and improving glucose tolerance and insulin sensitivity in the subject.

[0706] Examples of the techniques and protocols described herein can be found in Remington's Pharmaceutical Sciences, 16th edition, Osol, A. (ed), 1980.

### EXAMPLES

[0707] Below are examples of specific embodiments for carrying out the present invention. The examples are offered for illustrative purposes only, and are not intended to limit the scope of the present invention in any way. Efforts have been made to ensure accuracy with respect to numbers used (e.g., amounts, temperatures, etc.), but some experimental error and deviation should, of course, be allowed for.

[0708] The practice of the present invention will employ, unless otherwise indicated, conventional methods of protein chemistry, biochemistry, recombinant DNA techniques and pharmacology, within the skill of the art. Such techniques are explained fully in the literature. See, e.g., T. E. Creighton, Proteins: Structures and Molecular Properties (W.H. Freeman and Company, 1993); A. L. Lehninger, Biochemistry (Worth Publishers, Inc., current addition); Sambrook, et al., Molecular Cloning: A Laboratory Manual (2nd Edition, 1989); Methods In Enzymology (S. Colowick and N. Kaplan eds., Academic Press, Inc.); Remington's Pharmaceutical Sciences, 18th Edition (Easton, Pa.: Mack Publishing Company, 1990); Carey and Sundberg Advanced Organic Chemistry 3^{rd} Ed. (Plenum Press) Vols A and B (1992).

### Example 1. Identification and Selection of Amino Acid Sequences of Nutritive Polypeptides of Edible Species Using Mass Spectrometric Analyses

[0709] Provided is a process for identifying one or a plurality of nutritive polypeptide amino acid sequences, such as from a polypeptide or nucleic acid library, or from a relevant database of protein sequences. Here, nutritive polypeptide amino acid sequences were identified by mass spectroscopy analysis of proteins extracted and purified from edible species.

[0710] Protein Isolation for Mass Spectroscopy. Proteins were extracted from solid edible sources. Samples from the following species were included in the analysis: Actinidia deliciosa, Agaricus bisporus var. bisporus, Arthrospira platensis, Bos taurus, Brassica oleracea, Cannabis, Chenopodium quinoa, Chlorella regularis, Chlorella variabilis, Cicer arietinum, Cucurbita maxima, Fusarium graminearum, Gadus morhua, Gallus gallus, Glycine Max, Lactobacillus acidophilus, Laminariales, Linum usitatissimum, Meleagris gallopavo, Odocoileus virginianus, Oreochromis niloticus, Oryza sativa, Ovis aries, Palmaria palmata, Persea americana, Prunus mume, Saccharomyces cerevisiae, Salmo salar, Solanum lycopesicum, Solanum tuberosum, Sus scrofa, Thunnus thynnus, Vaccinium corymbosum, Vitis vinifera, and Zea mays. Each sample was first frozen at −80 C and then ground using a mortar and pestle before weighing 50 mg of material into a microcentrifuge tube. The 50 mg sample was then resuspended in 1 mL of extraction buffer (8.3 M urea, 2 M thiourea, 2% w/v CHAPS, 1% w/v DTT) and agitated for 30 minutes. Addition of 500 μL of 100-μm zirconium beads (Ops Diagnostics) was followed by continued agitation for an additional 30 minutes. Samples were run on a TissueLyser II (Qiagen) at 30 Hz for 3 minutes and then centrifuged for 10 minutes at 21,130 g in a benchtop microcentrifuge (Eppendorf). Supernatants were transferred to clean microcentrifuge tubes, aliquoted into 50 μL aliquots, and stored at −80° C. The amount of soluble protein extracted was measured by Coomassie® Plus™ (Bradford) Protein Assay (Thermo Scientific). 20 ug of protein was run on 10% 10-lane BisTris SDS-PAGE gel (Invitrogen) and then excised for analysis by LC/MS/MS.

[0711] Proteins were also isolated from liquid cultures of the following edible organisms: Aspergillus niger, Bacillus subtilis, Bacillus licheniformis, and Bacillus amyloliquefaciens. Aspergillus and bacillus organisms were cultured as described herein. Clarified supernatants were isolated by centrifuging (10,000×g) cultures for 10 minutes, followed by filtering the supernatant using a 0.2 μM filter. The amount of soluble protein in the clarified supernatant was measured by Coomassie® Plus™ (Bradford) Protein Assay (Thermo Scientific). Protein samples (20 μg) were run on a 10% Precast BisTris SDS-PAGE gel (Invitrogen) according to the manufacturer's protocol.

[0712] Mass Spectroscopy. For LC/MS/MS analysis each gel was excised into five equally sized pieces. Trypsin digestion was performed using a robot (ProGest, DigiLab) with the following protocol: washed with 25 mM ammonium bicarbonate followed by acetonitrile, reduced with 10 mM dithiothreitol at 60° C. followed by alkylation with 50 mM iodoacetamide at RT, digested with trypsin (Promega) at 37° C. for 4 h, quenched with formic acid and the supernatant was analyzed directly without further processing. The gel digests for each sample were pooled and analyzed by nano LC/MS/MS with a Waters NanoAcquity® HPLC system interfaced to a ThermoFisher Q Exactive™. Peptides were loaded on a trapping column and eluted over a 75 μm analytical column at 350 nL/min; both columns were packed with Jupiter® Proteo resin (Phenomenex). The mass spectrometer was operated in data-dependent mode, with MS and MS/MS performed in the Orbitrap at 70,000 FWHM and 17,500 FWHM resolution, respectively. The fifteen most abundant ions were selected for MS/MS. Resulting data were searched against a Uniprot and/or NCBI protein database from the corresponding organism using Mascot with the following parameters: Enzyme—Trypsin/P, Fixed modification—Carbamidomethyl (C) Variable modifications—Oxidation (M), Acetyl (Protein N-term), Pyro-Glu (N-term Q), Deamidation (NQ), Mass values Monoisotopic, Peptide Mass Tolerance—10 ppm, Fragment Mass Tolerance—0.015 Da, Max Missed Cleavages 2. Mascot DAT files were parsed into the Scaffold software for validation, filtering and to create a non-redundant list per sample. Data were filtered using a minimum protein value of 90%, a minimum peptide value of 50% (Prophet scores) and requiring at least two unique peptides per protein. Relative abundance of detected proteins was determined by spectral counts, which is the number of spectra acquired for each protein. Spectral counting is a label-free quantification method commonly used by the protein mass spec field (Liu, Hongbin et al. Analytical chemistry 76.14 (2004): 4193-4201). To calculate the relative abundance of each protein in the protein isolate the number of protein spectral counts is divided by the total protein spectral counts. [[SEQID]]SEQ ID NO: 894-3415 were identified using this method.

[0713] Homolog discovery. For the nutritive polypeptide sequences identified, as described, similar sequences are identified from other species, [[SEQID]]SEQ ID NO:−00093, which was identified by this method, was used to search for homologs using the computer program BLAST as described herein. Example nutritive polypeptide homologs from the edible database identified in this way are shown in table E1A. Example nutritive polypeptide homologous from the expressed sequence database identified in this way are shown in table E1B.

TABLE E1A
Edible Sequences identified as
homologs to [[SEQID]]SEQ ID NO:-00093.

| | | Percent ID |
|---|---|---|
| | | to SEQID- |
| SEQID | EAA | 00093 |
| [[SEQID]]SEQ | 0.45 | 98.8 |
| ID NO:-00094 | | |
| [[SEQID]]SEQ | 0.42 | 89.9 |
| ID NO:-00092 | | |
| [[SEQID]]SEQ | 0.46 | 67.9 |
| ID NO:-00075 | | |
| [[SEQID]]SEQ | 0.46 | 67.3 |
| ID NO:-00072 | | |
| [[SEQID]]SEQ | 0.46 | 66.0 |
| ID NO:-03712 | | |
| [[SEQID]]SEQ | 0.44 | 50.3 |
| ID NO:-03763 | | |
| [[SEQID]]SEQ | 0.45 | 51.6 |
| ID NO:-03708 | | |
| [[SEQID]]SEQ | 0.46 | 51.6 |
| ID NO:-03798 | | |
| [[SEQID]]SEQ | 0.45 | 50.9 |
| ID NO:-03860 | | |
| [[SEQID]]SEQ | 0.46 | 50.9 |
| ID NO:-03651 | | |

TABLE E1B
Edible Sequences identified as
homologs to [[SEQID]]SEQ ID NO:-00093.

| | | Percent ID |
|---|---|---|
| | | to SEQID- |
| SEQID | EAA | 00093 |
| [[SEQID]]SEQ | 0.42 | 91.2 |
| ID NO:-00074 | | |
| [[SEQID]]SEQ | 0.42 | 89.9 |
| ID NO:-00092 | | |
| [[SEQID]]SEQ | 0.46 | 66.9 |
| ID NO:-00075 | | |
| [[SEQID]]SEQ | 0.46 | 65 |
| ID NO:-00078 | | |
| [[SEQID]]SEQ | 0.46 | 50.3 |
| ID NO:-00106 | | |
| [[SEQID]]SEQ | 0.45 | 50.3 |
| ID NO:-00104 | | |
| [[SEQID]]SEQ | 0.45 | 50.3 |
| ID NO:-00864 | | |
| [[SEQID]]SEQ | 0.45 | 43.8 |
| ID NO:-00870 | | |
| [[SEQID]]SEQ | 0.47 | 44.5 |
| ID NO:-00867 | | |
| [[SEQID]]SEQ | 0.44 | 41.1 |
| ID NO:-00105 | | |
| [[SEQID]]SEQ | 0.45 | 40.5 |
| ID NO:-00103 | | |
| [[SEQID]]SEQ | 0.40 | 39.8 |
| ID NO:-00866 | | |

### Example 2. Identification and Selection of Amino Acid Sequences of Nutritive Polypeptides of Edible Species Using cDNA Libraries. Here, Nutritive Polypeptide Amino Acid Sequences were Identified by Analysis of Proteins Produced from Nucleic Acid Sequences Extracted and Purified from Edible Species

[0714] Construction of cDNA Library. A library of cDNA from twelve edible species was constructed. The twelve edible species were divided into five categories for RNA extraction. Animal tissues including ground beef, pork, lamb, chicken, turkey, and a portion of tilapia was combined with 50 mg from each edible species. Fruit tissues from grape and tomato including both the skin and the fruit were grounded and combined with 2.5 g from each species. Seeds of rice and soybean were combined with 1 g from each species and grounded into powder. 12 ml of Saccharomyces cerevisiae were grown overnight and spun down to obtain 110 mg of wet cell weight of yeast. 1 g of mushroom mycelium was grounded and processed using fungi RNA extraction protocols. All five categories of samples were snap frozen with liquid nitrogen, thawed and lysed using category-specific RNA extract protocols. The RNA from different food categories was extracted and combined as one pooled sample. The combined pool of RNA was reverse transcribed into cDNA using oligo-dT as primers resulting in cDNA of length between 500 bp to 4 kb. Adaptors were ligated to each end of the cDNA and used as PCR primers for amplification of the cDNA library and also included Sfi I restriction digestion sites for cloning the library into an expression vector. The cDNA library was denatured and re-annealed and the single-stranded DNA was selected using gel electrophoresis. This process removed extra cDNA from highly abundant RNA species to obtain a normalized cDNA library. The normalized cDNA library was precipitated using ethanol precipitation before PCR amplification and cloning into the expression vectors.

TABLE E2A
Primer and adapter sequences flanking the cDNA.

| | [[SEQ | |
|---|---|---|
| | ID]] | |
| | SEQ ID | Sequence |
| Adapter | NO: | (underlined: Sfi I site) |
| 5' adapter | 3910 | CAGTGGTATCAACGCAGAGTGGCCAT |
| | | TACGGCCAAGTTACGGG |
| 3' adapter | 3911 | CAGTGGTATCAACGCAGAGTGGCCGA |
| | | GGCGGCCTTTTTTTTTTTTTTT |

[0715] Cloning of cDNA library into E. coli for protein expression. The cDNA library was cloned into the pET15b backbone vector, which was amplified with primers with overhangs that contain the corresponding SfiI restriction sites (forward primer overhang: TACGTGTATGGCCGCCTCGGCC (SEQ ID NO: 3912); reverse primer overhang: TACGTGTATGGCCGTAATGGCC (SEQ ID NO: 3913)). pET15b contains a pBR322 origin of replication, lac-controlled T7 promoter, and a bla gene conferring resistance to carbenicillin. Both the cDNA library and PCR amplified backbone were cut with SfiI, PCR purified, and ligated. The ligation reaction was transformed into 10-Beta High Efficiency Competent Cells (New England Biolabs), and transformed cells were plated onto four LB agar plates containing 100 mg/L carbenicillin. Plates were incubated at 37° C. overnight. After colonies had grown, 2 mL of liquid LB medium was added to each plate. Cells were scraped into the liquid and mixed together, and the suspension was prepared for plasmid extraction to form the multiplex cDNA plasmid library.

[0716] E coli cDNA Multiplex Expression Methods. Four strains were used to express the cDNA libraries: T7 Express from New England Biolabs; and Rosetta™ 2(DE3), Rosetta™-gami B(DE3), and Rosetta™-gami 2(DE3) from EMD Millipore. T7 Express is an enhanced BL21 derivative which contains the T7 RNA polymerase in the lac operon, while lacking the Lon and OmpT proteases. The genotype of T7 Express is: fhuA2 lacZ::T7 gene1 [lon] ompT gal sulA11 R(mcr-73::miniTn10—Tet^{S})2 [dcm] R(zgb-210::Tn10—Tet^{S}) endA1 Δ(mcrC-mrr)114::IS10. Rosetta 2(DE3) is a BL21 derivative that supplies tRNAs for 7 rare codons (AGA, AGG, AUA, CUA, GGA, CCC, CGG). The strain is a lysogen of λDE3, and carries the T7 RNA polymerase gene under the lacUV5 promoter. The genotype of Rosetta 2(DE3) is: F⁻ ompT hsdSB(r_{B}⁻ m_{B}⁻) gal dcm (DE3) pRARE2 (Cam^{R}). Rosetta-gami B(DE3) has the same properties as Rosetta 2(DE3) but includes characteristics that enhance the formation of protein disulfide bonds in the cytoplasm. The genotype of Rosetta-gami B(DE3) is F⁻ ompT hsdSB (r_{B}⁻ m_{B}⁻) gal dcm lacY1 ahpC (DE3) gor522::Tn10 trxBpRARE (Cam^{R}, Kan^{R}, Tet^{R}). Rosetta™-gami 2(DE3), similarly to Rosetta™-gami B(DE3), alleviates codon bias, enhances disulfide bond formation, and have the T7 RNA polymerase gene under the lacUV5 promoter in the chromosome. The genotype of Rosetta™-gami 2(DE3) is Δ(ara-leu)7697 ΔlacX74 ΔphoA PvuII phoR araD139 ahpC galE galK rpsL(DE3) F′[lac⁺ lacI^{q} pro] gor522::Tn10 trxB pRARE2 (Cam^{R}, Str^{R}, Tet^{R})

[0717] Roughly 200 ng of prepared cDNA libraries were transformed into the four background strains: T7 Express, Rosetta™ 2(DE3), Rosetta™-gami B(DE3), and Rosetta™-gami 2(DE3) competent cells. After transforming, 100 μL of each strain was plated onto four LB (10 g/l NaCl, 10 g/l tryptone, and 5 g/l yeast extract) 1.5% agar plates containing 100 mg/L carbenicillin and incubated at 37° C. for 16 hrs. After incubation, 2 mL of LB media with 100 mg/L carbenicillin was added to the surface of each plate containing several thousand transformants, and the cells were suspended in the surface medium by scraping with a cell spreader and mixing. Suspended cells from the four replicate plates from each background were combined to form the pre-inoculum cultures for the expression experiments.

[0718] The OD₆₀₀ of the pre-inoculum cultures made from re-suspended cells were measured using a plate reader to be between 35 and 40 (T7, Rosetta™ 2(DE3) or 15 and 20 (Rosetta™-gami B(DE3) and 2(DE3)). For the four background strains, 125 mL baffled shake flasks containing 10 mL of LB medium with 100 mg/L carbenicillin were inoculated to OD₆₀₀ 0.2 to form the inoculum cultures, and incubated at 37° C. shaking at 250 rpm for roughly 6 hours. OD₆₀₀ was measured and the inoculum cultures were used to inoculate expression cultures in 2 L baffled shake flasks containing 250 mL of BioSilta Enbase® medium with 100 mg/L carbenicillin, 600 mU/L of glucoamylase and 0.01% Antifoam 204 to an OD₆₀₀ of 0.1. Cultures were shaken at 30° C. and 250 rpm for 18 hours, and were induced with 1 mM IPTG and supplemented with additional EnBase® media components and another 600 mU/L of glucoamylase. Heterologous expression was carried out for 24 hours at 30° C. and 250 rpm, at which point the cultures were terminated. The terminal cell density was measured and the cells were harvested by centrifugation (5000×g, 10 min, RT). Cells were stored at −80° C. before being lysed with BPER™ (Pierce) according to the manufacturer's protocol. After cell lysis, the whole cell lysate is sampled for analysis. In the Rosetta™ (DE3) strain, the whole cell lysate is centrifuged (3000×g, 10 min RT) and the supernatant is collect as the soluble fraction of the lysate. Cell lysates were run on SDS-PAGE gels, separated into ten fractions, and then analyzed using MS-MS.

[0719] Cloning of cDNA library into Bacillus for protein secretion. The cDNA library was cloned into the pHT43 vector for protein secretion assay in Bacillus subtilis. The unmodified pHT43 vector from MoBiTec contains the Pgrac promoter, the SamyQ signal peptide, Amp and Cm resistance genes, a lad region, a repA region, and the ColE1 origin of replication. The SamyQ signal peptide was removed. The pHT43 backbone vector with no signal peptide as well as a modified version with the aprE promoter substituted for the grac promoter and with the lad region removed were amplified with primers with overhangs that contain the corresponding SfiI restriction sites (forward primer overhang: TACGTGTATGGCCGCCTCGGCC (SEQ ID NO: 3912); reverse primer overhang: TACGTGTATGGCCGTAATGGCC (SEQ ID NO: 3913)). Both the cDNA library and the two PCR amplified backbones were cut with SfiI and PCR purified. The cDNA library inserts were ligated into each background. The ligation reactions were transformed into 10-Beta High Efficiency Competent Cells (New England Biolabs), and cells from each ligation were plated onto four LB agar plates containing 100 mg/L carbenicillin. Plates were incubated at 37° C. overnight. After colonies had grown, 2 mL of liquid LB medium was added to each plate. For each ligation, cells were scraped into the liquid and mixed together, and the suspensions were prepped for plasmid extraction to form the multiplex cDNA plasmid libraries (henceforth referred to as the multiplex Grac-cDNA and AprE-cDNA libraries).

[0720] The expression strains used in this expression experiment are based off of the WB800N strain (MoBiTec). The WB800N strain has the following genotype: nprE aprE epr bpr mpr::ble nprB::bsr vpr wprA::hyg cm::neo; NeoR. Strain cDNA-1 contains a mutation that synergizes with the paprE promoter and has these alterations in addition to the WB800N genotype: pXylA-comK::Erm, degU32(Hy), sigF::Str. Strain cDNA-2 has these alterations to WB800N: pXylA-comK::Erm.

[0721] Roughly 1 μg of the multiplex Grac-cDNA library was transformed into both Strain cDNA-1 and Strain cDNA-2, and 1 μg of the multiplex AprE-cDNA library was transformed into Strain cDNA-1. After transforming, 100 μL of each strain was plated onto four LB (10 g/l NaCl, 10 g/l tryptone, and 5 g/l yeast extract) 1.5% agar plates containing 5 mg/L chloramphenicol and incubated at 37° C. for 16 hrs. After incubation, 2 mL of LB media with 5 mg/L chloramphenicol was added to the surface of each plate containing several thousand transformants, and the cells were suspended in the surface medium by scraping with a cell spreader and mixing. Suspended cells from the four replicate plates from each transformation were combined to form the preinoculum cultures for the expression experiments.

[0722] The OD₆₀₀ of the preinoculum cultures made from resuspended cells were measured using a plate reader to be roughly 20-25. For the three strains (strain cDNA-1+multiplex Grac-cDNA, strain cDNA-1+multiplex AprE-cDNA, strain cDNA-2+Grac-cDNA), 500 mL baffled shake flasks containing 50 mL of 2×Mal medium (20 g/L NaCl, 20 g/L Tryptone, 10 g/L yeast extract, 75 g/L D-Maltose) with 5 mg/L chloramphenicol were inoculated to OD₆₀₀≈0.2 to form the inoculum cultures, and incubated at 30° C. shaking at 250 rpm for roughly 6 hours. OD₆₀₀ was measured and the inoculum cultures were used to inoculate expression cultures in 2 L baffled shake flasks containing 2×Mal medium with 5 mg/L chloramphenicol, 1× Teknova Trace Metals, and 0.01% Antifoam 204 to an OD₆₀₀ of 0.1. The strain cDNA-1+multiplex AprE cDNA culture was shaken for 30° C. and 250 rpm for 18 hours, at which point the culture was harvested. The terminal cell density was measured and the cells were harvested by centrifugation (5000×g, 30 min, RT). The strain cDNA-1+multiplex Grac-cDNA and strain cDNA-2+multiplex Grac-cDNA cultures were shaken at 37° C. and 250 rpm for 4 hours, and were induced with 1 mM IPTG. Heterologous expression was carried out for 4 hours at 37° C. and 250 rpm, at which point the cultures were harvested. Again, the terminal cell density was measured and the cells were harvested by centrifugation (5000×g, 30 min, RT). The supernatant was collected and run on SDS-PAGE gels, separated into ten fractions, and then analyzed using LC-MS/MS to identify secreted proteins.

[0723] Mass spectrometry analysis. Whole cell lysate and soluble lysate samples were analyzed for protein expression using LC-MS/MS. To analyze samples, 10 μg of sample was loaded onto a 10% SDS-PAGE gel (Invitrogen) and separated approximately 5 cm. The gel was excised into ten segments and the gel slices were processed by washing with 25 mM ammonium bicarbonate, followed by acetonitrile. Gel slices were then reduced with 10 mM dithiothreitol at 60° C., followed by alkylation with 50 mM iodoacetamide at room temperature. Finally, the samples were digested with trypsin (Promega) at 37° C. for 4 h and the digestions were quenched with the addition of formic acid. The supernatant samples were then analyzed by nano LC/MS/MS with a Waters® NanoAcquity HPLC system interfaced to a ThermoFisher Q Exactive™. Peptides were loaded on a trapping column and eluted over a 75 μm analytical column at 350 nL/min; both columns were packed with Jupiter® Proteo resin (Phenomenex). A 1 h gradient was employed. The mass spectrometer was operated in data-dependent mode, with MS and MS/MS performed in the Orbitrap at 70,000 FWHM resolution and 17,500 FWHM resolution, respectively. The fifteen most abundant ions were selected for MS/MS. Data were searched against a database using Mascot to identify peptides. The database was constructed by combining the complete proteome sequences from all twelve species including Bos taurus, Gallus gallus, Vitis vinifera, Ovis aries, Sus scrofa, Oryza sativa, Glycine max, Oreochromis niloticus, Solanum lycopesicum, Agaricus bisporus var. bisporus, Saccharomyces cerevisiae, and Meleagris gallopavo. Mascot DAT files were parsed into the Scaffold software for validation, filtering and to create a nonredundant list per sample. Data were filtered at 1% protein and peptide false discovery rate (FDR) and requiring at least two unique peptides per protein.

[0724] Expressed proteins identified. Mass spectrometry analysis identified a total of 125 proteins across expression strains. Spectrum counts, which are related to the protein abundance, are reported to confirm protein expression or secretion. Fifty three proteins were identified in whole cell lysate of the Rosetta (DE3) strain, 46 in the soluble fraction of the Rosetta™ (DE3) strain, 36 in Rosetta™-Gami B (DE3), 10 in Rosetta™-Gami 2 (DE3), and 15 in the secreted supernatant of Bacillus subtilis.

[0725] The nutritive polypeptides detected in the secreted supernatant of Bacillus subtilis are [[SEQID]]SEQ ID NO:−00718, [[SEQID]]SEQ ID NO:−00762, [[SEQID]]SEQ ID NO:−00763, [[SEQID]]SEQ ID NO:−00764, [[SEQID]]SEQ ID NO:−00765, [[SEQID]]SEQ ID NO:−00766, [[SEQID]]SEQ ID NO:−00767, [[SEQID]]SEQ ID NO:−00768, [[SEQID]]SEQ ID NO:−00769, [[SEQID]]SEQ ID NO:−00770, [[SEQID]]SEQ ID NO:−00771, [[SEQID]]SEQ ID NO:−00772, [[SEQID]]SEQ ID NO:−00773, [[SEQID]]SEQ ID NO:−00774, [[SEQID]]SEQ ID NO:−00775.

[0726] The nutritive polypeptides detected in the whole cell lysate of the E. coli Rosetta (DE3) strain are [[SEQID]]SEQ ID NO:−00716, [[SEQID]]SEQ ID NO:−00718, [[SEQID]]SEQ ID NO:−00720, [[SEQID]]SEQ ID NO:−00723, [[SEQID]]SEQ ID NO:−00724, [[SEQID]]SEQ ID NO:−00725, [[SEQID]]SEQ ID NO:−00729, [[SEQID]]SEQ ID NO:−00732, [[SEQID]]SEQ ID NO:−00737, [[SEQID]]SEQ ID NO:−00751, [[SEQID]]SEQ ID NO:−00776, [[SEQID]]SEQ ID NO:−00790, [[SEQID]]SEQ ID NO:−00797, [[SEQID]]SEQ ID NO:−00798, [[SEQID]]SEQ ID NO:−00799, [[SEQID]]SEQ ID NO:−00800, [[SEQID]]SEQ ID NO:−00801, [[SEQID]]SEQ ID NO:−00802, [[SEQID]]SEQ ID NO:−00803, [[SEQID]]SEQ ID NO:−00804, [[SEQID]]SEQ ID NO:−00805, [[SEQID]]SEQ ID NO:−00806, [[SEQID]]SEQ ID NO:−00807, [[SEQID]]SEQ ID NO:−00808, [[SEQID]]SEQ ID NO:−00809, [[SEQID]]SEQ ID NO:−00810, [[SEQID]]SEQ ID NO:−00811, [[SEQID]]SEQ ID NO:−00812, [[SEQID]]SEQ ID NO:−00813, [[SEQID]]SEQ ID NO:−00814, [[SEQID]]SEQ ID NO:−00815, [[SEQID]]SEQ ID NO:−00816, [[SEQID]]SEQ ID NO:−00817, [[SEQID]]SEQ ID NO:−00818, [[SEQID]]SEQ ID NO:−00819, [[SEQID]]SEQ ID NO:−00820, [[SEQID]]SEQ ID NO:−00821, [[SEQID]]SEQ ID NO:−00822, [[SEQID]]SEQ ID NO:−00823, [[SEQID]]SEQ ID NO:−00824, [[SEQID]]SEQ ID NO:−00825, [[SEQID]]SEQ ID NO:−00826, [[SEQID]]SEQ ID NO:−00827, [[SEQID]]SEQ ID NO:−00828, [[SEQID]]SEQ ID NO:−00829, [[SEQID]]SEQ ID NO:−00830, [[SEQID]]SEQ ID NO:−00831, [[SEQID]]SEQ ID NO:−00832, [[SEQID]]SEQ ID NO:−00833, [[SEQID]]SEQ ID NO:−00834, [[SEQID]]SEQ ID NO:−00835, [[SEQID]]SEQ ID NO:−00836, [[SEQID]]SEQ ID NO:−00837.

[0727] The nutritive polypeptides detected in the soluble lysate of the E. coli Rosetta (DE3) strain are [[SEQID]]SEQ ID NO:−00716, [[SEQID]]SEQ ID NO:−00717, [[SEQID]]SEQ ID NO:−00718, [[SEQID]]SEQ ID NO:−00719, [[SEQID]]SEQ ID NO:−00720, [[SEQID]]SEQ ID NO:−00721, [[SEQID]]SEQ ID NO:−00722, [[SEQID]]SEQ ID NO:−00724, [[SEQID]]SEQ ID NO:−00725, [[SEQID]]SEQ ID NO:−00726, [[SEQID]]SEQ ID NO:−00727, [[SEQID]]SEQ ID NO:−00728, [[SEQID]]SEQ ID NO:−00729, [[SEQID]]SEQ ID NO:−00730, [[SEQID]]SEQ ID NO:−00731, [[SEQID]]SEQ ID NO:−00732, [[SEQID]]SEQ ID NO:−00733, [[SEQID]]SEQ ID NO:−00734, [[SEQID]]SEQ ID NO:−00735, [[SEQID]]SEQ ID NO:−00736, [[SEQID]]SEQ ID NO:−00737, [[SEQID]]SEQ ID NO:−00738, [[SEQID]]SEQ ID NO:−00739, [[SEQID]]SEQ ID NO:−00740, [[SEQID]]SEQ ID NO:−00741, [[SEQID]]SEQ ID NO:−00742, [[SEQID]]SEQ ID NO:−00743, [[SEQID]]SEQ ID NO:−00744, [[SEQID]]SEQ ID NO:−00745, [[SEQID]]SEQ ID NO:−00746, [[SEQID]]SEQ ID NO:−00747, [[SEQID]]SEQ ID NO:−00748, [[SEQID]]SEQ ID NO:−00749, [[SEQID]]SEQ ID NO:−00750, [[SEQID]]SEQ ID NO:−00751, [[SEQID]]SEQ ID NO:−00752, [[SEQID]]SEQ ID NO:−00753, [[SEQID]]SEQ ID NO:−00754, [[SEQID]]SEQ ID NO:−00755, [[SEQID]]SEQ ID NO:−00756, [[SEQID]]SEQ ID NO:−00757, [[SEQID]]SEQ ID NO:−00758, [[SEQID]]SEQ ID NO:−00759, [[SEQID]]SEQ ID NO:−00760, [[SEQID]]SEQ ID NO:−00761.

[0728] The nutritive polypeptides detected in the E. coli Rosetta-Gami B (DE3) strain are [[SEQID]]SEQ ID NO:−00003, [[SEQID]]SEQ ID NO:−00004, [[SEQID]]SEQ ID NO:−00005, [[SEQID]]SEQ ID NO:−00716, [[SEQID]]SEQ ID NO:−00718, [[SEQID]]SEQ ID NO:−00719, [[SEQID]]SEQ ID NO:−00720, [[SEQID]]SEQ ID NO:−00729, [[SEQID]]SEQ ID NO:−00730, [[SEQID]]SEQ ID NO:−00731, [[SEQID]]SEQ ID NO:−00732, [[SEQID]]SEQ ID NO:−00734, [[SEQID]]SEQ ID NO:−00736, [[SEQID]]SEQ ID NO:−00740, [[SEQID]]SEQ ID NO:−00743, [[SEQID]]SEQ ID NO:−00752, [[SEQID]]SEQ ID NO:−00760, [[SEQID]]SEQ ID NO:−00763, [[SEQID]]SEQ ID NO:−00764, [[SEQID]]SEQ ID NO:−00776, [[SEQID]]SEQ ID NO:−00777, [[SEQID]]SEQ ID NO:−00778, [[SEQID]]SEQ ID NO:−00779, [[SEQID]]SEQ ID NO:−00780, [[SEQID]]SEQ ID NO:−00781, [[SEQID]]SEQ ID NO:−00782, [[SEQID]]SEQ ID NO:−00783, [[SEQID]]SEQ ID NO:−00784, [[SEQID]]SEQ ID NO:−00785, [[SEQID]]SEQ ID NO:−00786, [[SEQID]]SEQ ID NO:−00787, [[SEQID]]SEQ ID NO:−00788, [[SEQID]]SEQ ID NO:−00789, [[SEQID]]SEQ ID NO:−00790, [[SEQID]]SEQ ID NO:−00791, [[SEQID]]SEQ ID NO:−00792.

[0729] The nutritive polypeptides detected in the E. coli Rosetta-Gami 2 (DE3) strain are [[SEQID]]SEQ ID NO:−00716, [[SEQID]]SEQ ID NO:−00737, [[SEQID]]SEQ ID NO:−00747, [[SEQID]]SEQ ID NO:−00763, [[SEQID]]SEQ ID NO:−00789, [[SEQID]]SEQ ID NO:−00790, [[SEQID]]SEQ ID NO:−00793, [[SEQID]]SEQ ID NO:−00794, [[SEQID]]SEQ ID NO:−00795, [[SEQID]]SEQ ID NO:−00796.

### Example 3. Identification and Selection of Amino Acid Sequences of Nutritive Polypeptides of Edible Species Using Annotated Protein Sequence Databases

[0730] Construction of Protein Databases. The UniProtKB/Swiss-Prot (a collaboration between the European Bioinformatics Institute and the Swiss Institute of Bioinformatics) is a manually curated and reviewed protein database, and was used as the starting point for constructing a protein database. To construct a protein database of edible species, a search was performed on the UniProt database for proteins from edible species as disclosed in, e.g., PCT/US2013/032232, filed Mar. 15, 2013, PCT/US2013/032180, filed Mar. 15, 2013, PCT/US2013/032225, filed Mar. 15, 2013, PCT/US2013/032218, filed Mar. 15, 2013, PCT/US2013/032212, filed Mar. 15, 2013, and PCT/US2013/032206, filed Mar. 15, 2013. To identify proteins that are secreted from microorganisms, the UniProt database was searched for species from microorganisms as disclosed herein and proteins that are annotated with keywords or annotations that includes secreted, extracellular, cell wall, and outer membrane. To identify proteins that are abundant in the human diet, the reference proteomes of edible species were assembled from genome databases. As provided herein, mass spectrometry was performed on proteins extracted from each edible species. The peptides identified by mass spectrometry were mapped to the reference proteomes and the spectrum counts of the peptides associated with the reference protein sequences were converted to a measure for the abundance of the corresponding protein in food. All proteins that were detected above a cutoff spectrum count with high confidence were assembled into a database. These databases are used for identifying proteins that are derived from edible species, which are secreted, and/or are abundant in the human diet.

[0731] Processes for selection of amino acid sequences. A process for picking a protein or group of proteins can include identifying a set of constraints that define the class of protein one is interested in finding, the database of proteins from which to search, and performing the actual search.

[0732] The protein class criteria can be defined by nutritional literature (i.e., what has been previously identified as efficacious), desired physiochemical traits (e.g., expressible, soluble, nonallergenic, nontoxic, digestible, etc), and other characteristics. A relevant database of proteins that can be used for searching purposes can be derived from the sequences disclosed herein.

[0733] One example of proteins that can be searched is a highly soluble class of proteins for muscle anabolism/immune health/diabetes treatment. These proteins are generally solubly expressible, highly soluble upon purification/isolation, non-allergenic, non-toxic, fast digesting, and meet some basic nutritional criteria (e.g., [EAA]>0.3, [BCAA]>0.15, [Leucine or Glutamine or Arginine]>0.08, eaa complete).

[0734] A search is conducted for expressible, soluble proteins using a binary classification model based on two parameters related to the hydrophilicity and hydrophobicity of the protein sequence: solvation score and aggregation score (see examples below for various descriptions of these two metrics and measures of efficacy of the model). Alternatively, a search can be conducted for highly charged proteins with high (or low) net charge per amino acid, which is indicative of a net excess of negative or positive charges per amino acid (see example below for additional description).

[0735] The nutritional criteria are satisfied by computing the mass fractions of all relevant amino acids based on primary sequence. For cases in which it is desired to match a known, clinically efficacious amino acid blend a weighted Euclidean distance method can be used (see example below).

[0736] As provided herein, allergenicity/toxicity/nonallergenicity/antinutrticity criteria are searched for using sequence based homology assessments in which each candidate sequence is compared to libraries of known allergens, toxins, nonallergens, or antinutritive (e.g., protease inhibitory) proteins (see examples herein). In general, cutoffs of <50% global or <35% local (over any given 80aa window) homology (percent ID) can be used for the allergenicity screens, and <35% global for the toxicity and antinutricity screens. In all cases, smaller implies less allergenic/toxic/antinutritive. The nonallergenicity screen is less typically used as a cutoff, but >62% as a cutoff can be used (greater implies is more nonallergenic). These screens reduce the list to a smaller subset of proteins enriched in the criteria of interest. This list is then ranked using a variety of aggregate objective functions and selections are made from this rank ordered list.

### Example 4. Selection of Amino Acid Sequences to Demonstrate Amino Acid Pharmacology of Nutritive Polypeptides

[0737] Identification of Proteins Enriched in Leucine and Essential Amino acids for the Treatment of Sarcopenia. As described herein, sarcopenia is the degenerative loss of skeletal muscle mass (typically 0.5-1% loss per year after the age of 25), quality, and strength associated with aging. Sarcopenia is characterized first by a muscle atrophy (a decrease in the size of the muscle), along with a reduction in muscle tissue “quality,” caused by such factors as replacement of muscle fibres with fat, an increase in fibrosis, changes in muscle metabolism, oxidative stress, and degeneration of the neuromuscular junction. Combined, these changes lead to progressive loss of muscle function and eventually to frailty. It has been shown that essential amino acid supplementation in elderly, sarcopenia individuals can have an anabolic and/or sparing effect on muscle mass. Furthermore, this supplementation can also translate to improvements in patient strength and muscle quality. See, e.g., Paddon-Jones D, et al. J Clin Endocrinol Metab 2004, 89:4351-4358; Ferrando, A et al. Clinical Nutrition 2009 1-6; Katsanos C et al. Am J Physiol Endocrinol Metab. 2006, 291: 381-387. It has also been shown that the essential amino acid leucine is a particularly important factor in stimulating muscle protein synthesis. See, e.g., Borscheim E et al. Am J Physiol Endocrinol Metab 2002, 283: E648-E657; Borsheim E et al. Clin Nutr. 2008, 27: 189-95; Esmarck B et al J Physiol 2001, 535: 301-311; Moore D et al. Am J Clin Nutr 2009, 89: 161-8). One can identify beneficial nutritive polypeptides for individuals that suffer from sarcopenia by selecting proteins that are enriched by mass in leucine and the other essential amino acids.

[0738] Using a database of all protein sequences derived from edible species as described herein, candidate sequences that are enriched in leucine (≥15% by mass) and essential amino acids (≥40% by mass) were identified and rank ordered by their total leucine plus essential amino acid mass relative to total amino acid mass. In order to increase the probability that these proteins are solubly expressed, as well as highly soluble at pH 7 with reduced aggregation propensity, solvation score and aggregation score upper bounds of −20 kcal/mol/AA and 0.5 were applied. In order to reduce the likelihood that these proteins would elicit an allergenic response, upper bounds of 50% and 35% were set for the global allergen homology and allergenicity scores, respectively. In order to reduce the likelihood that these proteins would have toxic effects upon ingestion, an upper bound of 35% was set for the toxicity score. In order to reduce the likelihood that these proteins would act as inhibitors of digestive proteases, an upper bound of 35% was set for the anti-nutricity score.

[0739] An exemplary list of the top 10 nutritive polypeptide sequences that are enriched in leucine (≥15% by mass) and essential amino acids (≥40% by mass), and meet the afore mentioned cutoffs in solvation score, aggregation score, global allergen homology, allergenicity score, toxicity score, and anti-nutricity score is shown in Table E4A.

TABLE E4A

| SEQID | EAA | L |
|---|---|---|
| [[SEQID]]SEQ | 0.56 | 0.21 |
| ID NO:-03552 | | |
| [[SEQID]]SEQ | 0.60 | 0.15 |
| ID NO:-03581 | | |
| [[SEQID]]SEQ | 0.58 | 0.16 |
| ID NO:-03532 | | |
| [[SEQID]]SEQ | 0.56 | 0.17 |
| ID NO:-03475 | | |
| [[SEQID]]SEQ | 0.58 | 0.15 |
| ID NO:-03499 | | |
| [[SEQID]]SEQ | 0.54 | 0.18 |
| ID NO:-03494 | | |
| [[SEQID]]SEQ | 0.54 | 0.17 |
| ID NO:-03460 | | |
| [[SEQID]]SEQ | 0.54 | 0.16 |
| ID NO:-03485 | | |
| [[SEQID]]SEQ | 0.54 | 0.15 |
| ID NO:-03513 | | |
| [[SEQID]]SEQ | 0.52 | 0.17 |
| ID NO:-03491 | | |

[0740] An exemplary list of the top 10 nutritive polypeptide sequences from the expressed protein database that are enriched in leucine (≥15% by mass) and essential amino acids (≥40% by mass) is shown in Table E4B.

TABLE E4B

| SEQID | EAA | L |
|---|---|---|
| [[SEQID]]SEQ | 0.64 | 0.34 |
| ID NO:-00162 | | |
| [[SEQID]]SEQ | 0.60 | 0.32 |
| ID NO:-00132 | | |
| [[SEQID]]SEQ | 0.65 | 0.26 |
| ID NO:-00166 | | |
| [[SEQID]]SEQ | 0.60 | 0.25 |
| ID NO:-00169 | | |
| [[SEQID]]SEQ | 0.64 | 0.20 |
| ID NO:-00137 | | |
| [[SEQID]]SEQ | 0.58 | 0.24 |
| ID NO:-00134 | | |
| [[SEQID]]SEQ | 0.63 | 0.19 |
| ID NO:-00175 | | |
| [[SEQID]]SEQ | 0.54 | 0.26 |
| ID NO:-00194 | | |
| [[SEQID]]SEQ | 0.53 | 0.26 |
| ID NO:-00193 | | |
| [[SEQID]]SEQ | 0.52 | 0.26 |
| ID NO:-00195 | | |

### Example 5. Selection of Amino Acid Sequences of Nutritive Polypeptides Enriched in Essential Amino Acids and Enriched or Reduced in Various Individual Amino Acids of Interest

[0741] Using a database of all protein sequences derived from edible species as described herein, candidate sequences enriched in essential amino acids with elevated or reduced amounts of each amino acid were identified. In order to increase the probability that these proteins would be solubly expressed, as well as highly soluble at pH 7 with reduced aggregation propensity, solvation score and aggregation score upper bounds of −20 kcal/mol/AA and 0.5 were applied. In order to reduce the likelihood that these proteins would elicit an allergenic response, upper bounds of 50% and 35% were set for the global allergen homology and allergenicity scores, respectively. In order to reduce the likelihood that these proteins would have toxic effects upon ingestion, an upper bound of 35% was set for the toxicity score. In order to reduce the likelihood that these proteins would act as inhibitors of digestive proteases, an upper bound of 35% was set for the anti-nutricity score. When searching for proteins enriched or reduced in a given amino acid, the cutoffs described above were applied, and proteins were rank ordered by their calculated amino acid mass fraction of the desired amino acid and then by their essential amino acid content.

[0742] An exemplary list of the top 10 nutritive polypeptide sequences enriched in alanine that met the above cutoffs in solvation score, aggregation score, global allergen homology, allergenicity score, toxicity score, and anti-nutricity score is shown in Table E5A. The top 10 nutritive polypeptide sequences reduced in alanine are shown in Table E5B.

TABLE E5A

| SEQID | EAA | A |
|---|---|---|
| [[SEQID]]SEQ | 0.46 | 0.18 |
| ID NO:-03678 | | |
| [[SEQID]]SEQ | 0.44 | 0.18 |
| ID NO:-03682 | | |
| [[SEQID]]SEQ | 0.46 | 0.18 |
| ID NO:-03646 | | |
| [[SEQID]]SEQ | 0.39 | 0.16 |
| ID NO:-03653 | | |
| [[SEQID]]SEQ | 0.38 | 0.16 |
| ID NO:-03717 | | |
| [[SEQID]]SEQ | 0.41 | 0.15 |
| ID NO:-03686 | | |
| [[SEQID]]SEQ | 0.46 | 0.15 |
| ID NO:-03807 | | |
| [[SEQID]]SEQ | 0.44 | 0.15 |
| ID NO:-03864 | | |
| [[SEQID]]SEQ | 0.35 | 0.15 |
| ID NO:-03663 | | |
| [[SEQID]]SEQ | 0.46 | 0.14 |
| ID NO:-03777 | | |

TABLE E5B

| SEQID | EAA | A |
|---|---|---|
| [[SEQID]]SEQ | 0.62 | 0.00 |
| ID NO:-03874 | | |
| [[SEQID]]SEQ | 0.56 | 0.00 |
| ID NO:-03552 | | |
| [[SEQID]]SEQ | 0.52 | 0.00 |
| ID NO:-03880 | | |
| [[SEQID]]SEQ | 0.52 | 0.00 |
| ID NO:-03673 | | |
| [[SEQID]]SEQ | 0.50 | 0.00 |
| ID NO:-03667 | | |
| [[SEQID]]SEQ | 0.50 | 0.00 |
| ID NO:-03657 | | |
| [[SEQID]]SEQ | 0.49 | 0.00 |
| ID NO:-03842 | | |
| [[SEQID]]SEQ | 0.49 | 0.00 |
| ID NO:-03623 | | |
| [[SEQID]]SEQ | 0.48 | 0.00 |
| ID NO:-03817 | | |
| [[SEQID]]SEQ | 0.48 | 0.00 |
| ID NO:-03875 | | |

[0743] An exemplary list of the top 10 nutritive polypeptide sequences enriched in arginine that met the above cutoffs in solvation score, aggregation score, global allergen homology, allergenicity score, toxicity score, and anti-nutricity score is shown in table E5C. The top 10 nutritive polypeptide sequences reduced in arginine are shown in Table E5D.

TABLE E5C

| SEQID | EAA | R |
|---|---|---|
| [[SEQID]]SEQ | 0.06 | 0.72 |
| ID NO:-03473 | | |
| [[SEQID]]SEQ | 0.09 | 0.65 |
| ID NO:-03855 | | |
| [[SEQID]]SEQ | 0.10 | 0.63 |
| ID NO:-03727 | | |
| [[SEQID]]SEQ | 0.17 | 0.62 |
| ID NO:-03767 | | |
| [[SEQID]]SEQ | 0.17 | 0.60 |
| ID NO:-03704 | | |
| [[SEQID]]SEQ | 0.10 | 0.60 |
| ID NO:-03459 | | |
| [[SEQID]]SEQ | 0.16 | 0.48 |
| ID NO:-03731 | | |
| [[SEQID]]SEQ | 0.47 | 0.40 |
| ID NO:-03698 | | |
| [[SEQID]]SEQ | 0.37 | 0.38 |
| ID NO:-03687 | | |
| [[SEQID]]SEQ | 0.19 | 0.38 |
| ID NO:-03732 | | |

[symbol]

[symbol]

TABLE E5F

| SEQID | EAA | N |
|---|---|---|
| [[SEQID]]SEQ | 0.62 | 0.00 |
| ID NO:-03874 | | |
| [[SEQID]]SEQ | 0.59 | 0.00 |
| ID NO:-03793 | | |
| [[SEQID]]SEQ | 0.57 | 0.00 |
| ID NO:-03789 | | |
| [[SEQID]]SEQ | 0.57 | 0.00 |
| ID NO:-03869 | | |
| [[SEQID]]SEQ | 0.57 | 0.00 |
| ID NO:-03809 | | |
| [[SEQID]]SEQ | 0.56 | 0.00 |
| ID NO:-03662 | | |
| [[SEQID]]SEQ | 0.55 | 0.00 |
| ID NO:-03850 | | |
| [[SEQID]]SEQ | 0.55 | 0.00 |
| ID NO:-03783 | | |
| [[SEQID]]SEQ | 0.54 | 0.00 |
| ID NO:-03753 | | |
| [[SEQID]]SEQ | 0.53 | 0.00 |
| ID NO:-03677 | | |

[0746] An exemplary list of the top 10 nutritive polypeptide sequences enriched in aspartic acid that met the above cutoffs in solvation score, aggregation score, global allergen homology, allergenicity score, toxicity score, and anti-nutricity score is shown in table E5G. The top 10 nutritive polypeptide sequences reduced in aspartic acid are shown in table E5H.

TABLE E5G

| SEQID | EAA | D |
|---|---|---|
| [[SEQID]]SEQ | 0.33 | 0.28 |
| ID NO:-03630 | | |
| [[SEQID]]SEQ | 0.34 | 0.26 |
| ID NO:-03425 | | |
| [[SEQID]]SEQ | 0.33 | 0.25 |
| ID NO:-03564 | | |
| [[SEQID]]SEQ | 0.34 | 0.25 |
| ID NO:-03543 | | |
| [[SEQID]]SEQ | 0.32 | 0.24 |
| ID NO:-03607 | | |
| [[SEQID]]SEQ | 0.35 | 0.23 |
| ID NO:-03621 | | |
| [[SEQID]]SEQ | 0.37 | 0.21 |
| ID NO:-03604 | | |
| [[SEQID]]SEQ | 0.42 | 0.20 |
| ID NO:-03827 | | |
| [[SEQID]]SEQ | 0.37 | 0.20 |
| ID NO:-03540 | | |
| [[SEQID]]SEQ | 0.39 | 0.19 |
| ID NO:-03624 | | |

TABLE E5H

| SEQID | EAA | D |
|---|---|---|
| [[SEQID]]SEQ | 0.62 | 0.00 |
| ID NO:-03795 | | |
| [[SEQID]]SEQ | 0.62 | 0.00 |
| ID NO:-03468 | | |
| [[SEQID]]SEQ | 0.62 | 0.00 |
| ID NO:-03672 | | |
| [[SEQID]]SEQ | 0.61 | 0.00 |
| ID NO:-03656 | | |
| [[SEQID]]SEQ | 0.60 | 0.00 |
| ID NO:-03517 | | |
| [[SEQID]]SEQ | 0.60 | 0.00 |
| ID NO:-03493 | | |
| [[SEQID]]SEQ | 0.60 | 0.00 |
| ID NO:-03816 | | |
| [[SEQID]]SEQ | 0.59 | 0.00 |
| ID NO:-03796 | | |
| [[SEQID]]SEQ | 0.59 | 0.00 |
| ID NO:-03868 | | |
| [[SEQID]]SEQ | 0.59 | 0.00 |
| ID NO:-03740 | | |

[0747] An exemplary list of the top 10 nutritive polypeptide sequences enriched in cysteine that met the above cutoffs in solvation score, aggregation score, global allergen homology, allergenicity score, toxicity score, and anti-nutricity score is shown in table E51. The top 10 nutritive polypeptide sequences reduced in cysteine are shown in table E5J.

TABLE E51

| SEQID | EAA | C |
|---|---|---|
| [[SEQID]]SEQ | 0.24 | 0.30 |
| ID NO:-03495 | | |
| [[SEQID]]SEQ | 0.24 | 0.30 |
| ID NO:-03514 | | |
| [[SEQID]]SEQ | 0.24 | 0.28 |
| ID NO:-03571 | | |
| [[SEQID]]SEQ | 0.36 | 0.27 |
| ID NO:-03430 | | |
| [[SEQID]]SEQ | 0.37 | 0.16 |
| ID NO:-03419 | | |
| [[SEQID]]SEQ | 0.29 | 0.16 |
| ID NO:-03478 | | |
| [[SEQID]]SEQ | 0.33 | 0.16 |
| ID NO:-03523 | | |
| [[SEQID]]SEQ | 0.35 | 0.16 |
| ID NO:-03504 | | |
| [[SEQID]]SEQ | 0.28 | 0.16 |
| ID NO:-03477 | | |
| [[SEQID]]SEQ | 0.10 | 0.16 |
| ID NO:-03459 | | |

TABLE E5J

| SEQID | EAA | C |
|---|---|---|
| [[SEQID]]SEQ ID NO:-03636 | 0.65 | 0.00 |
| [[SEQID]]SEQ ID NO:-03492 | 0.63 | 0.00 |
| [[SEQID]]SEQ ID NO:-03484 | 0.62 | 0.00 |
| [[SEQID]]SEQ ID NO:-03442 | 0.61 | 0.00 |
| [[SEQID]]SEQ ID NO:-03417 | 0.61 | 0.00 |
| [[SEQID]]SEQ ID NO:-03563 | 0.61 | 0.00 |
| [[SEQID]]SEQ ID NO:-03512 | 0.61 | 0.00 |
| [[SEQID]]SEQ ID NO:-03517 | 0.60 | 0.00 |
| [[SEQID]]SEQ ID NO:-03606 | 0.60 | 0.00 |
| [[SEQID]]SEQ ID NO:-03493 | 0.60 | 0.00 |

[0748] An exemplary list of the top 10 nutritive polypeptide sequences enriched in glutamine that met the above cutoffs in solvation score, aggregation score, global allergen homology, allergenicity score, toxicity score, and anti-nutricity score is shown in table E5K. The top 10 nutritive polypeptide sequences reduced in glutamine are shown in table E5L.

TABLE E5K

| SEQID | EAA | Q |
|---|---|---|
| [[SEQID]]SEQ ID NO:-03676 | 0.29 | 0.19 |
| [[SEQID]]SEQ ID NO:-03720 | 0.29 | 0.19 |
| [[SEQID]]SEQ ID NO:-03683 | 0.33 | 0.19 |
| [[SEQID]]SEQ ID NO:-03782 | 0.46 | 0.18 |
| [[SEQID]]SEQ ID NO:-03681 | 0.46 | 0.18 |
| [[SEQID]]SEQ ID NO:-03852 | 0.46 | 0.18 |
| [[SEQID]]SEQ ID NO:-03671 | 0.43 | 0.17 |
| [[SEQID]]SEQ ID NO:-00515 | 0.25 | 0.17 |
| [[SEQID]]SEQ ID NO:-03866 | 0.40 | 0.17 |
| [[SEQID]]SEQ ID NO:-03824 | 0.36 | 0.16 |

TABLE E5L

| SEQID | EAA | Q |
|---|---|---|
| [[SEQID]]SEQ ID NO:-03636 | 0.65 | 0.00 |
| [[SEQID]]SEQ ID NO:-03795 | 0.62 | 0.00 |
| [[SEQID]]SEQ ID NO:-03468 | 0.62 | 0.00 |
| [[SEQID]]SEQ ID NO:-03484 | 0.62 | 0.00 |
| [[SEQID]]SEQ ID NO:-03570 | 0.59 | 0.00 |
| [[SEQID]]SEQ ID NO:-03422 | 0.58 | 0.00 |
| [[SEQID]]SEQ ID NO:-03432 | 0.58 | 0.00 |
| [[SEQID]]SEQ ID NO:-03590 | 0.58 | 0.00 |
| [[SEQID]]SEQ ID NO:-03515 | 0.58 | 0.00 |
| [[SEQID]]SEQ ID NO:-03499 | 0.58 | 0.00 |

[0749] An exemplary list of the top 10 nutritive polypeptide sequences enriched in histidine that met the above cutoffs in solvation score, aggregation score, global allergen homology, allergenicity score, toxicity score, and anti-nutricity score is shown in table E5M. The top 10 nutritive polypeptide sequences reduced in histidine are shown in table E5N.

TABLE E5M

| SEQID | EAA | H |
|---|---|---|
| [[SEQID]]SEQ ID NO:-03744 | 0.60 | 0.25 |
| [[SEQID]]SEQ ID NO:-03551 | 0.48 | 0.24 |
| [[SEQID]]SEQ ID NO:-03745 | 0.56 | 0.19 |
| [[SEQID]]SEQ ID NO:-03793 | 0.59 | 0.19 |
| [[SEQID]]SEQ ID NO:-03468 | 0.62 | 0.15 |
| [[SEQID]]SEQ ID NO:-03743 | 0.38 | 0.13 |
| [[SEQID]]SEQ ID NO:-03711 | 0.56 | 0.12 |
| [[SEQID]]SEQ ID NO:-03847 | 0.58 | 0.12 |
| [[SEQID]]SEQ ID NO:-03637 | 0.43 | 0.12 |
| [[SEQID]]SEQ ID NO:-03739 | 0.52 | 0.12 |

TABLE E5N

| SEQID | EAA | H |
|---|---|---|
| [[SEQID]]SEQ ID NO:-03795 | 0.62 | 0.00 |
| [[SEQID]]SEQ ID NO:-03874 | 0.62 | 0.00 |
| [[SEQID]]SEQ ID NO:-03656 | 0.61 | 0.00 |
| [[SEQID]]SEQ ID NO:-03517 | 0.60 | 0.00 |
| [[SEQID]]SEQ ID NO:-03493 | 0.60 | 0.00 |
| [[SEQID]]SEQ ID NO:-03816 | 0.60 | 0.00 |
| [[SEQID]]SEQ ID NO:-03796 | 0.59 | 0.00 |
| [[SEQID]]SEQ ID NO:-03740 | 0.59 | 0.00 |
| [[SEQID]]SEQ ID NO:-03814 | 0.58 | 0.00 |
| [[SEQID]]SEQ ID NO:-03837 | 0.57 | 0.00 |

[0750] An exemplary list of the top 10 nutritive polypeptide sequences enriched in isoleucine that met the above cutoffs in solvation score, aggregation score, global allergen homology, allergenicity score, toxicity score, and anti-nutricity score is shown in table E50. The top 10 nutritive polypeptide sequences reduced in isoleucine are shown in table E5P.

TABLE E5O

| SEQID | EAA | I |
|---|---|---|
| [[SEQID]]SEQ ID NO:-03722 | 0.40 | 0.15 |
| [[SEQID]]SEQ ID NO:-03805 | 0.38 | 0.15 |
| [[SEQID]]SEQ ID NO:-03435 | 0.40 | 0.15 |
| [[SEQID]]SEQ ID NO:-03838 | 0.42 | 0.15 |
| [[SEQID]]SEQ ID NO:-03655 | 0.54 | 0.15 |
| [[SEQID]]SEQ ID NO:-03828 | 0.49 | 0.15 |
| [[SEQID]]SEQ ID NO:-03593 | 0.39 | 0.15 |
| [[SEQID]]SEQ ID NO:-03818 | 0.51 | 0.15 |
| [[SEQID]]SEQ ID NO:-03841 | 0.49 | 0.15 |
| [[SEQID]]SEQ ID NO:-03843 | 0.48 | 0.14 |

TABLE E5P

| SEQID | EAA | I |
|---|---|---|
| [[SEQID]]SEQ ID NO:-03581 | 0.60 | 0.00 |
| [[SEQID]]SEQ ID NO:-03685 | 0.57 | 0.00 |
| [[SEQID]]SEQ ID NO:-03705 | 0.56 | 0.00 |
| [[SEQID]]SEQ ID NO:-03660 | 0.55 | 0.00 |
| [[SEQID]]SEQ ID NO:-03779 | 0.53 | 0.00 |
| [[SEQID]]SEQ ID NO:-03781 | 0.52 | 0.00 |
| [[SEQID]]SEQ ID NO:-03647 | 0.51 | 0.00 |
| [[SEQID]]SEQ ID NO:-03785 | 0.50 | 0.00 |
| [[SEQID]]SEQ ID NO:-03865 | 0.50 | 0.00 |
| [[SEQID]]SEQ ID NO:-03802 | 0.49 | 0.00 |

[0751] An exemplary list of the top 10 nutritive polypeptide sequences enriched in leucine that met the above cutoffs in solvation score, aggregation score, global allergen homology, allergenicity score, toxicity score, and anti-nutricity score is shown in table E5Q. The top 10 nutritive polypeptide sequences reduced in leucine are shown in table E5R.

TABLE E5Q

| SEQID | EAA | L |
|---|---|---|
| [[SEQID]]SEQ ID NO:-03552 | 0.56 | 0.21 |
| [[SEQID]]SEQ ID NO:-03428 | 0.49 | 0.18 |
| [[SEQID]]SEQ ID NO:-03623 | 0.49 | 0.18 |
| [[SEQID]]SEQ ID NO:-03702 | 0.47 | 0.18 |
| [[SEQID]]SEQ ID NO:-03701 | 0.49 | 0.18 |
| [[SEQID]]SEQ ID NO:-03703 | 0.49 | 0.18 |
| [[SEQID]]SEQ ID NO:-03599 | 0.51 | 0.18 |
| [[SEQID]]SEQ ID NO:-03494 | 0.54 | 0.18 |
| [[SEQID]]SEQ ID NO:-03632 | 0.45 | 0.18 |
| [[SEQID]]SEQ ID NO:-03423 | 0.44 | 0.18 |

TABLE E5R

| SEQID | EAA | L |
|---|---|---|
| [[SEQID]]SEQ ID NO:-03661 | 0.53 | 0.00 |
| [[SEQID]]SEQ ID NO:-03849 | 0.52 | 0.00 |
| [[SEQID]]SEQ ID NO:-03644 | 0.42 | 0.00 |
| [[SEQID]]SEQ ID NO:-03878 | 0.39 | 0.00 |
| [[SEQID]]SEQ ID NO:-03652 | 0.38 | 0.00 |
| [[SEQID]]SEQ ID NO:-03419 | 0.37 | 0.00 |
| [[SEQID]]SEQ ID NO:-03654 | 0.36 | 0.00 |
| [[SEQID]]SEQ ID NO:-03804 | 0.36 | 0.00 |
| [[SEQID]]SEQ ID NO:-03504 | 0.35 | 0.00 |
| [[SEQID]]SEQ ID NO:-03477 | 0.28 | 0.00 |

[0752] An exemplary list of the top 10 nutritive polypeptide sequences enriched in lysine that met the above cutoffs in solvation score, aggregation score, global allergen homology, allergenicity score, toxicity score, and anti-nutricity score is shown in table E5S. The top 10 nutritive polypeptide sequences reduced in lysine are shown in table E5T.

TABLE E5S

| SEQID | EAA | K |
|---|---|---|
| [[SEQID]]SEQ ID NO:-03648 | 0.52 | 0.36 |
| [[SEQID]]SEQ ID NO:-03797 | 0.56 | 0.34 |
| [[SEQID]]SEQ ID NO:-03830 | 0.52 | 0.31 |
| [[SEQID]]SEQ ID NO:-03829 | 0.54 | 0.30 |
| [[SEQID]]SEQ ID NO:-03581 | 0.60 | 0.30 |
| [[SEQID]]SEQ ID NO:-03520 | 0.36 | 0.30 |
| [[SEQID]]SEQ ID NO:-03457 | 0.37 | 0.30 |
| [[SEQID]]SEQ ID NO:-03471 | 0.36 | 0.29 |
| [[SEQID]]SEQ ID NO:-03859 | 0.53 | 0.29 |
| [[SEQID]]SEQ ID NO:-03456 | 0.34 | 0.29 |

TABLE E5T

| SEQID | EAA | K |
|---|---|---|
| [[SEQID]]SEQ ID NO:-03583 | 0.42 | 0.00 |
| [[SEQID]]SEQ ID NO:-03684 | 0.40 | 0.00 |
| [[SEQID]]SEQ ID NO:-03813 | 0.36 | 0.00 |
| [[SEQID]]SEQ ID NO:-03771 | 0.28 | 0.00 |
| [[SEQID]]SEQ ID NO:-03873 | 0.26 | 0.00 |
| [[SEQID]]SEQ ID NO:-03585 | 0.25 | 0.00 |
| [[SEQID]]SEQ ID NO:-03704 | 0.17 | 0.00 |
| [[SEQID]]SEQ ID NO:-03767 | 0.17 | 0.00 |
| [[SEQID]]SEQ ID NO:-03731 | 0.16 | 0.00 |
| [[SEQID]]SEQ ID NO:-03459 | 0.10 | 0.00 |

[0753] An exemplary list of the top 10 nutritive polypeptide sequences enriched in methionine that met the above cutoffs in solvation score, aggregation score, global allergen homology, allergenicity score, toxicity score, and anti-nutricity score is shown in table E5U. The top 10 nutritive polypeptide sequences reduced in arginine are shown in table E5V.

TABLE E5U

| SEQID | EAA | M |
|---|---|---|
| [[SEQID]]SEQ ID NO:-00552 | 0.45 | 0.16 |
| [[SEQID]]SEQ ID NO:-03870 | 0.52 | 0.15 |
| [[SEQID]]SEQ ID NO:-03680 | 0.49 | 0.15 |
| [[SEQID]]SEQ ID NO:-03888 | 0.39 | 0.13 |
| [[SEQID]]SEQ ID NO:-03738 | 0.37 | 0.13 |
| [[SEQID]]SEQ ID NO:-03698 | 0.47 | 0.13 |
| [[SEQID]]SEQ ID NO:-03584 | 0.53 | 0.12 |
| [[SEQID]]SEQ ID NO:-03487 | 0.53 | 0.11 |
| [[SEQID]]SEQ ID NO:-03858 | 0.49 | 0.11 |
| [[SEQID]]SEQ ID NO:-03787 | 0.46 | 0.11 |

TABLE E5V

| SEQID | EAA | M |
|---|---|---|
| [[SEQID]]SEQ ID NO:-03701 | 0.49 | 0.00 |
| [[SEQID]]SEQ ID NO:-03861 | 0.49 | 0.00 |
| [[SEQID]]SEQ ID NO:-03703 | 0.49 | 0.00 |
| [[SEQID]]SEQ ID NO:-03702 | 0.47 | 0.00 |
| [[SEQID]]SEQ ID NO:-03773 | 0.46 | 0.00 |
| [[SEQID]]SEQ ID NO:-03707 | 0.45 | 0.00 |
| [[SEQID]]SEQ ID NO:-03726 | 0.41 | 0.00 |
| [[SEQID]]SEQ ID NO:-03725 | 0.39 | 0.00 |
| [[SEQID]]SEQ ID NO:-03734 | 0.39 | 0.00 |
| [[SEQID]]SEQ ID NO:-03700 | 0.37 | 0.00 |

[0754] An exemplary list of the top 10 nutritive polypeptide sequences enriched in phenylalanine that met the above cutoffs in solvation score, aggregation score, global allergen homology, allergenicity score, toxicity score, and anti-nutricity score is shown in table E5W. The top 10 nutritive polypeptide sequences reduced in phenylalanine are shown in table E5X.

TABLE E5W

| SEQID | EAA | F |
|---|---|---|
| [[SEQID]]SEQ ID NO:-03761 | 0.48 | 0.14 |
| [[SEQID]]SEQ ID NO:-03831 | 0.56 | 0.14 |
| [[SEQID]]SEQ ID NO:-03836 | 0.55 | 0.13 |
| [[SEQID]]SEQ ID NO:-03437 | 0.41 | 0.13 |
| [[SEQID]]SEQ ID NO:-03749 | 0.41 | 0.13 |
| [[SEQID]]SEQ ID NO:-03558 | 0.44 | 0.13 |
| [[SEQID]]SEQ ID NO:-03791 | 0.49 | 0.13 |
| [[SEQID]]SEQ ID NO:-03729 | 0.50 | 0.12 |
| [[SEQID]]SEQ ID NO:-03846 | 0.40 | 0.12 |
| [[SEQID]]SEQ ID NO:-03862 | 0.50 | 0.12 |

TABLE E5X

| SEQID | EAA | F |
|---|---|---|
| [[SEQID]]SEQ ID NO:-03581 | 0.60 | 0.00 |
| [[SEQID]]SEQ ID NO:-03441 | 0.57 | 0.00 |
| [[SEQID]]SEQ ID NO:-03685 | 0.57 | 0.00 |
| [[SEQID]]SEQ ID NO:-03573 | 0.55 | 0.00 |
| [[SEQID]]SEQ ID NO:-03661 | 0.53 | 0.00 |
| [[SEQID]]SEQ ID NO:-03859 | 0.53 | 0.00 |
| [[SEQID]]SEQ ID NO:-03688 | 0.53 | 0.00 |
| [[SEQID]]SEQ ID NO:-03675 | 0.53 | 0.00 |
| [[SEQID]]SEQ ID NO:-03609 | 0.53 | 0.00 |
| [[SEQID]]SEQ ID NO:-03584 | 0.53 | 0.00 |

[0755] An exemplary list of the top 10 nutritive polypeptide sequences enriched in proline that met the above cutoffs in solvation score, aggregation score, global allergen homology, allergenicity score, toxicity score, and anti-nutricity score is shown in table E5Y. The top 10 nutritive polypeptide sequences reduced in proline are shown in table E5Z.

TABLE E5Y

| SEQID | EAA | P |
|---|---|---|
| [[SEQID]]SEQ | 0.33 | 0.16 |
| ID NO:-03800 | | |
| [[SEQID]]SEQ | 0.32 | 0.14 |
| ID NO:-03756 | | |
| [[SEQID]]SEQ | 0.35 | 0.14 |
| ID NO:-03839 | | |
| [[SEQID]]SEQ | 0.33 | 0.13 |
| ID NO:-03810 | | |
| [[SEQID]]SEQ | 0.39 | 0.13 |
| ID NO:-03888 | | |
| [[SEQID]]SEQ | 0.41 | 0.13 |
| ID NO:-03845 | | |
| [[SEQID]]SEQ | 0.39 | 0.13 |
| ID NO:-03834 | | |
| [[SEQID]]SEQ | 0.35 | 0.13 |
| ID NO:-03658 | | |
| [[SEQID]]SEQ | 0.44 | 0.12 |
| ID NO:-03856 | | |
| [[SEQID]]SEQ | 0.37 | 0.12 |
| ID NO:-03799 | | |

TABLE E5Z

| SEQID | EAA | P |
|---|---|---|
| [[SEQID]]SEQ | 0.65 | 0.00 |
| ID NO:-03636 | | |
| [[SEQID]]SEQ | 0.62 | 0.00 |
| ID NO:-03468 | | |
| [[SEQID]]SEQ | 0.57 | 0.00 |
| ID NO:-03790 | | |
| [[SEQID]]SEQ | 0.57 | 0.00 |
| ID NO:-03486 | | |
| [[SEQID]]SEQ | 0.56 | 0.00 |
| ID NO:-03665 | | |
| [[SEQID]]SEQ | 0.56 | 0.00 |
| ID NO:-03833 | | |
| [[SEQID]]SEQ | 0.56 | 0.00 |
| ID NO:-03588 | | |
| [[SEQID]]SEQ | 0.56 | 0.00 |
| ID NO:-03808 | | |
| [[SEQID]]SEQ | 0.56 | 0.00 |
| ID NO:-03719 | | |
| [[SEQID]]SEQ | 0.55 | 0.00 |
| ID NO:-03815 | | |

[0756] An exemplary list of the top 10 nutritive polypeptide sequences enriched in serine that met the above cutoffs in solvation score, aggregation score, global allergen homology, allergenicity score, toxicity score, and anti-nutricity score is shown in table E5AA. The top 10 nutritive polypeptide sequences reduced in serine are shown in table E5AB.

TABLE E5AA

| SEQID | EAA | S |
|---|---|---|
| [[SEQID]]SEQ | 0.45 | 0.16 |
| ID NO:-03747 | | |
| [[SEQID]]SEQ | 0.27 | 0.15 |
| ID NO:-03863 | | |
| [[SEQID]]SEQ | 0.32 | 0.15 |
| ID NO:-03737 | | |
| [[SEQID]]SEQ | 0.40 | 0.15 |
| ID NO:-03759 | | |
| [[SEQID]]SEQ | 0.39 | 0.15 |
| ID NO:-03882 | | |
| [[SEQID]]SEQ | 0.41 | 0.14 |
| ID NO:-03748 | | |
| [[SEQID]]SEQ | 0.41 | 0.14 |
| ID NO:-03792 | | |
| [[SEQID]]SEQ | 0.37 | 0.14 |
| ID NO:-03844 | | |
| [[SEQID]]SEQ | 0.47 | 0.14 |
| ID NO:-03751 | | |
| [[SEQID]]SEQ | 0.45 | 0.14 |
| ID NO:-03822 | | |

TABLE E5AB

| SEQID | EAA | S |
|---|---|---|
| [[SEQID]]SEQ | 0.57 | 0.00 |
| ID NO:-03441 | | |
| [[SEQID]]SEQ | 0.55 | 0.00 |
| ID NO:-03867 | | |
| [[SEQID]]SEQ | 0.43 | 0.00 |
| ID NO:-03645 | | |
| [[SEQID]]SEQ | 0.35 | 0.00 |
| ID NO:-03455 | | |
| [[SEQID]]SEQ | 0.30 | 0.00 |
| ID NO:-03775 | | |
| [[SEQID]]SEQ | 0.28 | 0.00 |
| ID NO:-03771 | | |
| [[SEQID]]SEQ | 0.28 | 0.00 |
| ID NO:-03772 | | |
| [[SEQID]]SEQ | 0.26 | 0.00 |
| ID NO:-03716 | | |
| [[SEQID]]SEQ | 0.26 | 0.00 |
| ID NO:-03873 | | |
| [[SEQID]]SEQ | 0.41 | 0.01 |
| ID NO:-03508 | | |

[0757] An exemplary list of the top 10 nutritive polypeptide sequences enriched in threonine that met the above cutoffs in solvation score, aggregation score, global allergen homology, allergenicity score, toxicity score, and anti-nutricity score is shown in table E5AC. The top 10 nutritive polypeptide sequences reduced in threonine are shown in table E5AD.

TABLE E5AC

| SEQID | EAA | T |
|---|---|---|
| [[SEQID]]SEQ | 0.42 | 0.16 |
| ID NO:-03718 | | |
| [[SEQID]]SEQ | 0.46 | 0.14 |
| ID NO:-03777 | | |
| [[SEQID]]SEQ | 0.42 | 0.12 |
| ID NO:-03713 | | |
| [[SEQID]]SEQ | 0.44 | 0.12 |
| ID NO:-03871 | | |
| [[SEQID]]SEQ | 0.55 | 0.12 |
| ID NO:-03867 | | |
| [[SEQID]]SEQ | 0.48 | 0.12 |
| ID NO:-03819 | | |
| [[SEQID]]SEQ | 0.41 | 0.11 |
| ID NO:-03820 | | |
| [[SEQID]]SEQ | 0.39 | 0.11 |
| ID NO:-03653 | | |
| [[SEQID]]SEQ | 0.38 | 0.11 |
| ID NO:-03717 | | |
| [[SEQID]]SEQ | 0.45 | 0.11 |
| ID NO:-03877 | | |

TABLE E5AD

| SEQID | EAA | T |
|---|---|---|
| [[SEQID]]SEQ | 0.60 | 0.00 |
| ID NO:-03744 | | |
| [[SEQID]]SEQ | 0.56 | 0.00 |
| ID NO:-03745 | | |
| [[SEQID]]SEQ | 0.53 | 0.00 |
| ID NO:-03661 | | |
| [[SEQID]]SEQ | 0.52 | 0.00 |
| ID NO:-03830 | | |
| [[SEQID]]SEQ | 0.52 | 0.00 |
| ID NO:-03849 | | |
| [[SEQID]]SEQ | 0.51 | 0.00 |
| ID NO:-03887 | | |
| [[SEQID]]SEQ | 0.50 | 0.00 |
| ID NO:-03886 | | |
| [[SEQID]]SEQ | 0.48 | 0.00 |
| ID NO:-03670 | | |
| [[SEQID]]SEQ | 0.48 | 0.00 |
| ID NO:-03551 | | |
| [[SEQID]]SEQ | 0.47 | 0.00 |
| ID NO:-03780 | | |

[0758] An exemplary list of the top 10 nutritive polypeptide sequences enriched in tryptophan that met the above cutoffs in solvation score, aggregation score, global allergen homology, allergenicity score, toxicity score, and anti-nutricity score is shown in table E5AE. The top 10 nutritive polypeptide sequences reduced in tryptophan are shown in table E5AF.

TABLE E5AE

| SEQID | EAA | W |
|---|---|---|
| [[SEQID]]SEQ | 0.42 | 0.15 |
| ID NO:-03583 | | |
| [[SEQID]]SEQ | 0.40 | 0.13 |
| ID NO:-03635 | | |
| [[SEQID]]SEQ | 0.50 | 0.11 |
| ID NO:-03555 | | |
| [[SEQID]]SEQ | 0.48 | 0.09 |
| ID NO:-03679 | | |
| [[SEQID]]SEQ | 0.44 | 0.09 |
| ID NO:-03440 | | |
| [[SEQID]]SEQ | 0.45 | 0.09 |
| ID NO:-03439 | | |
| [[SEQID]]SEQ | 0.62 | 0.08 |
| ID NO:-03468 | | |
| [[SEQID]]SEQ | 0.51 | 0.08 |
| ID NO:-01546 | | |
| [[SEQID]]SEQ | 0.42 | 0.08 |
| ID NO:-03576 | | |
| [[SEQID]]SEQ | 0.44 | 0.08 |
| ID NO:-03821 | | |

TABLE E5AF

| SEQID | EAA | W |
|---|---|---|
| [[SEQID]]SEQ | 0.62 | 0.00 |
| ID NO:-03672 | | |
| [[SEQID]]SEQ | 0.61 | 0.00 |
| ID NO:-03512 | | |
| [[SEQID]]SEQ | 0.60 | 0.00 |
| ID NO:-03606 | | |
| [[SEQID]]SEQ | 0.60 | 0.00 |
| ID NO:-03744 | | |
| [[SEQID]]SEQ | 0.60 | 0.00 |
| ID NO:-03581 | | |
| [[SEQID]]SEQ | 0.59 | 0.00 |
| ID NO:-03868 | | |
| [[SEQID]]SEQ | 0.59 | 0.00 |
| ID NO:-03762 | | |
| [[SEQID]]SEQ | 0.59 | 0.00 |
| ID NO:-03857 | | |
| [[SEQID]]SEQ | 0.59 | 0.00 |
| ID NO:-03793 | | |
| [[SEQID]]SEQ | 0.59 | 0.00 |
| ID NO:-03769 | | |

[0759] An exemplary list of the top 10 nutritive polypeptide sequences enriched in tyrosine that met the above cutoffs in solvation score, aggregation score, global allergen homology, allergenicity score, toxicity score, and anti-nutricity score is shown in table E5AG. The top 10 nutritive polypeptide sequences reduced in tyrosine are shown in table E5AH.

TABLE E5AG

| SEQID | EAA | Y |
|---|---|---|
| [[SEQID]]SEQ | 0.32 | 0.16 |
| ID NO:-03848 | | |
| [[SEQID]]SEQ | 0.56 | 0.15 |
| ID NO:-03831 | | |
| [[SEQID]]SEQ | 0.26 | 0.15 |
| ID NO:-03876 | | |
| [[SEQID]]SEQ | 0.42 | 0.14 |
| ID NO:-00325 | | |
| [[SEQID]]SEQ | 0.43 | 0.14 |
| ID NO:-03794 | | |
| [[SEQID]]SEQ | 0.38 | 0.14 |
| ID NO:-03826 | | |
| [[SEQID]]SEQ | 0.46 | 0.14 |
| ID NO:-03659 | | |
| [[SEQID]]SEQ | 0.35 | 0.14 |
| ID NO:-03786 | | |
| [[SEQID]]SEQ | 0.38 | 0.14 |
| ID NO:-03784 | | |
| [[SEQID]]SEQ | 0.39 | 0.14 |
| ID NO:-03823 | | |

TABLE E5AH

| SEQID | EAA | Y |
|---|---|---|
| [[SEQID]]SEQ | 0.62 | 0.00 |
| ID NO:-03468 | | |
| [[SEQID]]SEQ | 0.61 | 0.00 |
| ID NO:-03442 | | |
| [[SEQID]]SEQ | 0.61 | 0.00 |
| ID NO:-03417 | | |
| [[SEQID]]SEQ | 0.61 | 0.00 |
| ID NO:-03563 | | |
| [[SEQID]]SEQ | 0.60 | 0.00 |
| ID NO:-03606 | | |
| [[SEQID]]SEQ | 0.60 | 0.00 |
| ID NO:-03469 | | |
| [[SEQID]]SEQ | 0.60 | 0.00 |
| ID NO:-03443 | | |
| [[SEQID]]SEQ | 0.60 | 0.00 |
| ID NO:-03581 | | |
| [[SEQID]]SEQ | 0.59 | 0.00 |
| ID NO:-03796 | | |
| [[SEQID]]SEQ | 0.59 | 0.00 |
| ID NO:-03762 | | |

[0760] An exemplary list of the top 10 nutritive polypeptide sequences enriched in valine that met the above cutoffs in solvation score, aggregation score, global allergen homology, allergenicity score, toxicity score, and anti-nutricity score is shown in table E5AI. The top 10 nutritive polypeptide sequences reduced in valine are shown in table E5AJ.

TABLE E5AI

| SEQID | EAA | V |
|---|---|---|
| [[SEQID]]SEQ | 0.49 | 0.17 |
| ID NO:-03881 | | |
| [[SEQID]]SEQ | 0.57 | 0.17 |
| ID NO:-03790 | | |
| [[SEQID]]SEQ | 0.56 | 0.17 |
| ID NO:-03808 | | |
| [[SEQID]]SEQ | 0.60 | 0.17 |
| ID NO:-03606 | | |
| [[SEQID]]SEQ | 0.53 | 0.16 |
| ID NO:-03688 | | |
| [[SEQID]]SEQ | 0.55 | 0.16 |
| ID NO:-03806 | | |
| [[SEQID]]SEQ | 0.51 | 0.15 |
| ID NO:-03643 | | |
| [[SEQID]]SEQ | 0.58 | 0.14 |
| ID NO:-03788 | | |
| [[SEQID]]SEQ | 0.59 | 0.14 |
| ID NO:-03762 | | |
| [[SEQID]]SEQ | 0.51 | 0.14 |
| ID NO:-03674 | | |

TABLE E5AJ

| SEQID | EAA | V |
|---|---|---|
| [[SEQID]]SEQ | 0.56 | 0.00 |
| ID NO:-03879 | | |
| [[SEQID]]SEQ | 0.56 | 0.00 |
| ID NO:-03552 | | |
| [[SEQID]]SEQ | 0.54 | 0.00 |
| ID NO:-03835 | | |
| [[SEQID]]SEQ | 0.53 | 0.00 |
| ID NO:-03851 | | |
| [[SEQID]]SEQ | 0.53 | 0.00 |
| ID NO:-03757 | | |
| [[SEQID]]SEQ | 0.52 | 0.00 |
| ID NO:-03648 | | |
| [[SEQID]]SEQ | 0.50 | 0.00 |
| ID NO:-03766 | | |
| [[SEQID]]SEQ | 0.46 | 0.00 |
| ID NO:-03710 | | |
| [[SEQID]]SEQ | 0.46 | 0.00 |
| ID NO:-03764 | | |
| [[SEQID]]SEQ | 0.45 | 0.00 |
| ID NO:-00552 | | |

[0761] Selection of Expressed Proteins Enriched in Essential Amino acids and Enriched or Reduced in Various Individual Amino Acids. Using the database of all expressed protein sequences described herein, candidate sequences enriched in essential amino acids with elevated or reduced amounts of each amino acid were identified. When searching for proteins enriched or reduced in a given amino acid, proteins were rank ordered by their calculated amino acid mass fraction of the desired amino acid and then by their essential amino acid content.

[0762] An exemplary list of the top 10 nutritive polypeptide sequences enriched in alanine is shown in table E5AK. The top 10 nutritive polypeptide sequences reduced in alanine are shown in table E5AL.

TABLE E5AK

| SEQID | EAA | A |
|---|---|---|
| [[SEQID]]SEQ ID NO:- | 0.34 | 0.18 |
| 00499 | | |
| [[SEQID]]SEQ ID NO:- | 0.44 | 0.17 |
| 00512 | | |
| [[SEQID]]SEQ ID NO:- | 0.39 | 0.17 |
| 00651 | | |
| [[SEQID]]SEQ ID NO:- | 0.38 | 0.16 |
| 00519 | | |
| [[SEQID]]SEQ ID NO:- | 0.42 | 0.16 |
| 02704 | | |
| [[SEQID]]SEQ ID NO:- | 0.42 | 0.13 |
| 02703 | | |
| [[SEQID]]SEQ ID NO:- | 0.37 | 0.13 |
| 00530 | | |
| [[SEQID]]SEQ ID NO:- | 0.45 | 0.12 |
| 00544 | | |
| [[SEQID]]SEQ ID NO:- | 0.40 | 0.12 |
| 00549 | | |
| [[SEQID]]SEQ ID NO:- | 0.50 | 0.11 |
| 02675 | | |

TABLE E5AL

| SEQID | EAA | A |
|---|---|---|
| [[SEQID]]SEQ | 0.70 | 0.00 |
| ID NO:-00140 | | |
| [[SEQID]]SEQ | 0.41 | 0.00 |
| ID NO:-00057 | | |
| [[SEQID]]SEQ | 0.28 | 0.00 |
| ID NO:-00652 | | |
| [[SEQID]]SEQ | 0.52 | 0.00 |
| ID NO:-00199 | | |
| [[SEQID]]SEQ | 0.53 | 0.00 |
| ID NO:-00198 | | |
| [[SEQID]]SEQ | 0.52 | 0.00 |
| ID NO:-00197 | | |
| [[SEQID]]SEQ | 0.53 | 0.00 |
| ID NO:-00196 | | |
| [[SEQID]]SEQ | 0.53 | 0.01 |
| ID NO:-00722 | | |
| [[SEQID]]SEQ | 0.51 | 0.01 |
| ID NO:-00204 | | |
| [[SEQID]]SEQ | 0.51 | 0.01 |
| ID NO:-00203 | | |

[0763] An exemplary list of the top 10 nutritive polypeptide sequences enriched in arginine is shown in table E5AM. The top 10 nutritive polypeptide sequences reduced in arginine are shown in table E5AN.

TABLE E5AM

| SEQID | EAA | R |
|---|---|---|
| [[SEQID]]SEQ ID NO:- | 0.41 | 0.23 |
| 00540 | | |
| [[SEQID]]SEQ ID NO:- | 0.42 | 0.22 |
| 00567 | | |
| [[SEQID]]SEQ ID NO:- | 0.47 | 0.22 |
| 00636 | | |
| [[SEQID]]SEQ ID NO:- | 0.33 | 0.22 |
| 00556 | | |
| [[SEQID]]SEQ ID NO:- | 0.42 | 0.22 |
| 00637 | | |
| [[SEQID]]SEQ ID NO:- | 0.33 | 0.22 |
| 00575 | | |
| [[SEQID]]SEQ ID NO:- | 0.42 | 0.21 |
| 00492 | | |
| [[SEQID]]SEQ ID NO:- | 0.38 | 0.21 |
| 00631 | | |
| [[SEQID]]SEQ ID NO:- | 0.41 | 0.21 |
| 00551 | | |
| [[SEQID]]SEQ ID NO:- | 0.45 | 0.20 |
| 00328 | | |

TABLE E5AN

| SEQID | EAA | R |
|---|---|---|
| [[SEQID]]SEQ ID NO:-00140 | 0.70 | 0.00 |
| [[SEQID]]SEQ ID NO:-00146 | 0.67 | 0.00 |
| [[SEQID]]SEQ ID NO:-00150 | 0.67 | 0.00 |
| [[SEQID]]SEQ ID NO:-00143 | 0.65 | 0.00 |
| [[SEQID]]SEQ ID NO:-00525 | 0.64 | 0.00 |
| [[SEQID]]SEQ ID NO:-00162 | 0.64 | 0.00 |
| [[SEQID]]SEQ ID NO:-00175 | 0.63 | 0.00 |
| [[SEQID]]SEQ ID NO:-00169 | 0.60 | 0.00 |
| [[SEQID]]SEQ ID NO:-00548 | 0.59 | 0.00 |
| [[SEQID]]SEQ ID NO:-00536 | 0.58 | 0.00 |

[0764] An exemplary list of the top 10 nutritive polypeptide sequences enriched in asparagine is shown in table E5AO. The top 10 nutritive polypeptide sequences reduced in asparagine are shown in table E5AP.

TABLE E5AO

| SEQID | EAA | N |
|---|---|---|
| [[SEQID]]SEQ ID NO:-00195 | 0.52 | 0.14 |
| [[SEQID]]SEQ ID NO:-00194 | 0.54 | 0.14 |
| [[SEQID]]SEQ ID NO:-00193 | 0.53 | 0.12 |
| [[SEQID]]SEQ ID NO:-03872 | 0.47 | 0.12 |
| [[SEQID]]SEQ ID NO:-01388 | 0.36 | 0.12 |
| [[SEQID]]SEQ ID NO:-00552 | 0.45 | 0.12 |
| [[SEQID]]SEQ ID NO:-00169 | 0.60 | 0.11 |
| [[SEQID]]SEQ ID NO:-00196 | 0.53 | 0.10 |
| [[SEQID]]SEQ ID NO:-00197 | 0.52 | 0.10 |
| [[SEQID]]SEQ ID NO:-03693 | 0.34 | 0.10 |

TABLE E5AP

| SEQID | EAA | N |
|---|---|---|
| [[SEQID]]SEQ ID NO:-00536 | 0.58 | 0.00 |
| [[SEQID]]SEQ ID NO:-00284 | 0.54 | 0.00 |
| [[SEQID]]SEQ ID NO:-00212 | 0.51 | 0.00 |
| [[SEQID]]SEQ ID NO:-00101 | 0.51 | 0.00 |
| [[SEQID]]SEQ ID NO:-00219 | 0.50 | 0.00 |
| [[SEQID]]SEQ ID NO:-00634 | 0.50 | 0.00 |
| [[SEQID]]SEQ ID NO:-00624 | 0.49 | 0.00 |
| [[SEQID]]SEQ ID NO:-00639 | 0.46 | 0.00 |
| [[SEQID]]SEQ ID NO:-00597 | 0.45 | 0.00 |
| [[SEQID]]SEQ ID NO:-00527 | 0.40 | 0.00 |

[0765] An exemplary list of the top 10 nutritive polypeptide sequences enriched in aspartic acid is shown in table E5AQ. The top 10 nutritive polypeptide sequences reduced in aspartic acid are shown in table E5AR.

TABLE E5AQ

| SEQID | EAA | D |
|---|---|---|
| [[SEQID]]SEQ ID NO:-00562 | 0.40 | 0.19 |
| [[SEQID]]SEQ ID NO:-03853 | 0.34 | 0.17 |
| [[SEQID]]SEQ ID NO:-00116 | 0.32 | 0.16 |
| [[SEQID]]SEQ ID NO:-00102 | 0.45 | 0.16 |
| [[SEQID]]SEQ ID NO:-00115 | 0.32 | 0.16 |
| [[SEQID]]SEQ ID NO:-00484 | 0.38 | 0.16 |
| [[SEQID]]SEQ ID NO:-00100 | 0.46 | 0.15 |
| [[SEQID]]SEQ ID NO:-00220 | 0.52 | 0.15 |
| [[SEQID]]SEQ ID NO:-00098 | 0.50 | 0.15 |
| [[SEQID]]SEQ ID NO:-00078 | 0.46 | 0.14 |

TABLE E5AR

| SEQID | EAA | D |
|---|---|---|
| [[SEQID]]SEQ ID NO:-00166 | 0.65 | 0.00 |
| [[SEQID]]SEQ ID NO:-00051 | 0.59 | 0.00 |
| [[SEQID]]SEQ ID NO:-00052 | 0.59 | 0.00 |
| [[SEQID]]SEQ ID NO:-00053 | 0.57 | 0.00 |
| [[SEQID]]SEQ ID NO:-00054 | 0.55 | 0.00 |
| [[SEQID]]SEQ ID NO:-00055 | 0.55 | 0.00 |
| [[SEQID]]SEQ ID NO:-00523 | 0.51 | 0.00 |
| [[SEQID]]SEQ ID NO:-00635 | 0.46 | 0.00 |
| [[SEQID]]SEQ ID NO:-00230 | 0.45 | 0.00 |
| [[SEQID]]SEQ ID NO:-00637 | 0.42 | 0.00 |

[0766] An exemplary list of the top 10 nutritive polypeptide sequences enriched in cysteine is shown in table E5AS. The top 10 nutritive polypeptide sequences reduced in cysteine are shown in table E5AT.

TABLE E5AS

| SEQID | EAA | C |
|---|---|---|
| [[SEQID]]SEQ ID NO:-00737 | 0.28 | 0.18 |
| [[SEQID]]SEQ ID NO:-00652 | 0.28 | 0.16 |
| [[SEQID]]SEQ ID NO:-00007 | 0.28 | 0.13 |
| [[SEQID]]SEQ ID NO:-00007 | 0.28 | 0.13 |
| [[SEQID]]SEQ ID NO:-00558 | 0.36 | 0.13 |
| [[SEQID]]SEQ ID NO:-00013 | 0.28 | 0.12 |
| [[SEQID]]SEQ ID NO:-00014 | 0.30 | 0.12 |
| [[SEQID]]SEQ ID NO:-00989 | 0.34 | 0.12 |
| [[SEQID]]SEQ ID NO:-00566 | 0.38 | 0.11 |
| [[SEQID]]SEQ ID NO:-00596 | 0.44 | 0.11 |

TABLE E5AT

| SEQID | EAA | C |
|---|---|---|
| [[SEQID]]SEQ ID NO:-00166 | 0.65 | 0.00 |
| [[SEQID]]SEQ ID NO:-00137 | 0.64 | 0.00 |
| [[SEQID]]SEQ ID NO:-00525 | 0.64 | 0.00 |
| [[SEQID]]SEQ ID NO:-00162 | 0.64 | 0.00 |
| [[SEQID]]SEQ ID NO:-03297 | 0.62 | 0.00 |
| [[SEQID]]SEQ ID NO:-00169 | 0.60 | 0.00 |
| [[SEQID]]SEQ ID NO:-00132 | 0.60 | 0.00 |
| [[SEQID]]SEQ ID NO:-00298 | 0.59 | 0.00 |
| [[SEQID]]SEQ ID NO:-00536 | 0.58 | 0.00 |
| [[SEQID]]SEQ ID NO:-00297 | 0.58 | 0.00 |

[0767] An exemplary list of the top 10 nutritive polypeptide sequences enriched in glutamine is shown in table E5AU. The top 10 nutritive polypeptide sequences reduced in glutamine are shown in table E5AV.

TABLE E5AU

| SEQID | EAA | Q |
|---|---|---|
| [[SEQID]]SEQ ID NO:-00743 | 0.29 | 0.22 |
| [[SEQID]]SEQ ID NO:-00513 | 0.33 | 0.17 |
| [[SEQID]]SEQ ID NO:-03695 | 0.38 | 0.17 |
| [[SEQID]]SEQ ID NO:-00522 | 0.40 | 0.17 |
| [[SEQID]]SEQ ID NO:-00515 | 0.25 | 0.17 |
| [[SEQID]]SEQ ID NO:-03692 | 0.44 | 0.14 |
| [[SEQID]]SEQ ID NO:-03666 | 0.35 | 0.13 |
| [[SEQID]]SEQ ID NO:-00613 | 0.36 | 0.13 |
| [[SEQID]]SEQ ID NO:-00585 | 0.44 | 0.13 |
| [[SEQID]]SEQ ID NO:-00223 | 0.50 | 0.13 |

TABLE E5AV

| SEQID | EAA | Q |
|---|---|---|
| [[SEQID]]SEQ ID NO:-00143 | 0.65 | 0.00 |
| [[SEQID]]SEQ ID NO:-00137 | 0.64 | 0.00 |
| [[SEQID]]SEQ ID NO:-00525 | 0.64 | 0.00 |
| [[SEQID]]SEQ ID NO:-00134 | 0.58 | 0.00 |
| [[SEQID]]SEQ ID NO:-00194 | 0.54 | 0.00 |
| [[SEQID]]SEQ ID NO:-00193 | 0.53 | 0.00 |
| [[SEQID]]SEQ ID NO:-00195 | 0.52 | 0.00 |
| [[SEQID]]SEQ ID NO:-00650 | 0.50 | 0.00 |
| [[SEQID]]SEQ ID NO:-00563 | 0.50 | 0.00 |
| [[SEQID]]SEQ ID NO:-00598 | 0.49 | 0.00 |

[0768] An exemplary list of the top 10 nutritive polypeptide sequences enriched in histidine is shown in table E5AW. The top 10 nutritive polypeptide sequences reduced in histidine are shown in table E5AX.

TABLE E5AW

| SEQID | EAA | H |
|---|---|---|
| [[SEQID]]SEQ ID NO:-00536 | 0.58 | 0.23 |
| [[SEQID]]SEQ ID NO:-00560 | 0.55 | 0.18 |
| [[SEQID]]SEQ ID NO:-01162 | 0.48 | 0.12 |
| [[SEQID]]SEQ ID NO:-00585 | 0.44 | 0.10 |
| [[SEQID]]SEQ ID NO:-00298 | 0.59 | 0.10 |
| [[SEQID]]SEQ ID NO:-00615 | 0.40 | 0.10 |
| [[SEQID]]SEQ ID NO:-00525 | 0.64 | 0.10 |
| [[SEQID]]SEQ ID NO:-00297 | 0.58 | 0.10 |
| [[SEQID]]SEQ ID NO:-00764 | 0.56 | 0.09 |
| [[SEQID]]SEQ ID NO:-00128 | 0.53 | 0.08 |

TABLE E5AX

| SEQID | EAA | H |
|---|---|---|
| [[SEQID]]SEQ ID NO:-00043 | 0.57 | 0.00 |
| [[SEQID]]SEQ ID NO:-00531 | 0.55 | 0.00 |
| [[SEQID]]SEQ ID NO:-00592 | 0.53 | 0.00 |
| [[SEQID]]SEQ ID NO:-00224 | 0.53 | 0.00 |
| [[SEQID]]SEQ ID NO:-00024 | 0.52 | 0.00 |
| [[SEQID]]SEQ ID NO:-00625 | 0.52 | 0.00 |
| [[SEQID]]SEQ ID NO:-00233 | 0.52 | 0.00 |
| [[SEQID]]SEQ ID NO:-00587 | 0.51 | 0.00 |
| [[SEQID]]SEQ ID NO:-00213 | 0.51 | 0.00 |
| [[SEQID]]SEQ ID NO:-00214 | 0.51 | 0.00 |

[0769] An exemplary list of the top 10 nutritive polypeptide sequences enriched in isoleucine is shown in table E5AY. The top 10 nutritive polypeptide sequences reduced in isoleucine are shown in table E5AZ.

TABLE E5AY

| SEQID | EAA | I |
|---|---|---|
| [[SEQID]]SEQ ID NO:-00561 | 0.68 | 0.18 |
| [[SEQID]]SEQ ID NO:-00134 | 0.58 | 0.14 |
| [[SEQID]]SEQ ID NO:-00175 | 0.63 | 0.14 |
| [[SEQID]]SEQ ID NO:-00162 | 0.64 | 0.14 |
| [[SEQID]]SEQ ID NO:-00234 | 0.51 | 0.13 |
| [[SEQID]]SEQ ID NO:-00233 | 0.52 | 0.13 |
| [[SEQID]]SEQ ID NO:-00169 | 0.60 | 0.13 |
| [[SEQID]]SEQ ID NO:-00025 | 0.48 | 0.13 |
| [[SEQID]]SEQ ID NO:-00043 | 0.57 | 0.12 |
| [[SEQID]]SEQ ID NO:-00584 | 0.50 | 0.12 |

TABLE E5AZ

| SEQID | EAA | I |
|---|---|---|
| [[SEQID]]SEQ ID NO:-00762 | 0.56 | 0.00 |
| [[SEQID]]SEQ ID NO:-00764 | 0.56 | 0.00 |
| [[SEQID]]SEQ ID NO:-00571 | 0.54 | 0.00 |
| [[SEQID]]SEQ ID NO:-00212 | 0.51 | 0.00 |
| [[SEQID]]SEQ ID NO:-00237 | 0.48 | 0.00 |
| [[SEQID]]SEQ ID NO:-00236 | 0.45 | 0.00 |
| [[SEQID]]SEQ ID NO:-00551 | 0.41 | 0.00 |
| [[SEQID]]SEQ ID NO:-00515 | 0.25 | 0.01 |
| [[SEQID]]SEQ ID NO:-00128 | 0.53 | 0.01 |
| [[SEQID]]SEQ ID NO:-00651 | 0.39 | 0.01 |

[0770] An exemplary list of the top 10 nutritive polypeptide sequences enriched in leucine is shown in table E5BA. The top 10 nutritive polypeptide sequences reduced in leucine are shown in table E5BB.

TABLE E5BA

| SEQID | EAA | L |
|---|---|---|
| [[SEQID]]SEQ ID NO:-00162 | 0.64 | 0.34 |
| [[SEQID]]SEQ ID NO:-00132 | 0.60 | 0.32 |
| [[SEQID]]SEQ ID NO:-00195 | 0.52 | 0.26 |
| [[SEQID]]SEQ ID NO:-00194 | 0.54 | 0.26 |
| [[SEQID]]SEQ ID NO:-00193 | 0.53 | 0.26 |
| [[SEQID]]SEQ ID NO:-00166 | 0.65 | 0.26 |
| [[SEQID]]SEQ ID NO:-00169 | 0.60 | 0.25 |
| [[SEQID]]SEQ ID NO:-00134 | 0.58 | 0.24 |
| [[SEQID]]SEQ ID NO:-00212 | 0.51 | 0.23 |
| [[SEQID]]SEQ ID NO:-00139 | 0.49 | 0.23 |

TABLE E5BB

| SEQID | EAA | L |
|---|---|---|
| [[SEQID]]SEQ ID NO:-00553 | 0.39 | 0.00 |
| [[SEQID]]SEQ ID NO:-00743 | 0.29 | 0.00 |
| [[SEQID]]SEQ ID NO:-00522 | 0.40 | 0.01 |
| [[SEQID]]SEQ ID NO:-00554 | 0.38 | 0.01 |
| [[SEQID]]SEQ ID NO:-00585 | 0.44 | 0.01 |
| [[SEQID]]SEQ ID NO:-00560 | 0.55 | 0.01 |
| [[SEQID]]SEQ ID NO:-00529 | 0.38 | 0.01 |
| [[SEQID]]SEQ ID NO:-00552 | 0.45 | 0.01 |
| [[SEQID]]SEQ ID NO:-00547 | 0.49 | 0.01 |
| [[SEQID]]SEQ ID NO:-00575 | 0.33 | 0.01 |

[0771] An exemplary list of the top 10 nutritive polypeptide sequences enriched in lysine is shown in table E5BC. The top 10 nutritive polypeptide sequences reduced in lysine are shown in table E5BD.

TABLE E5BC

| SEQID | EAA | K |
|---|---|---|
| [[SEQID]]SEQ ID | 0.55 | 0.26 |
| NO:-00560 | | |
| [[SEQID]]SEQ ID | 0.54 | 0.23 |
| NO:-00573 | | |
| [[SEQID]]SEQ ID | 0.51 | 0.23 |
| NO:-00619 | | |
| [[SEQID]]SEQ ID | 0.39 | 0.23 |
| NO:-00553 | | |
| [[SEQID]]SEQ ID | 0.54 | 0.23 |
| NO:-00572 | | |
| [[SEQID]]SEQ ID | 0.54 | 0.23 |
| NO:-00623 | | |
| [[SEQID]]SEQ ID | 0.52 | 0.23 |
| NO:-03691 | | |
| [[SEQID]]SEQ ID | 0.49 | 0.22 |
| NO:-00503 | | |
| [[SEQID]]SEQ ID | 0.51 | 0.22 |
| NO:-00564 | | |
| [[SEQID]]SEQ ID | 0.49 | 0.22 |
| NO:-00517 | | |

TABLE E5BD

| SEQID | EAA | K |
|---|---|---|
| [[SEQID]]SEQ | 0.65 | 0.00 |
| ID NO:-00166 | | |
| [[SEQID]]SEQ | 0.63 | 0.00 |
| ID NO:-00175 | | |
| [[SEQID]]SEQ | 0.60 | 0.00 |
| ID NO:-00169 | | |
| [[SEQID]]SEQ | 0.58 | 0.00 |
| ID NO:-00134 | | |
| [[SEQID]]SEQ | 0.30 | 0.00 |
| ID NO:-00535 | | |
| [[SEQID]]SEQ | 0.33 | 0.01 |
| ID NO:-00513 | | |
| [[SEQID]]SEQ | 0.50 | 0.01 |
| ID NO:-02675 | | |
| [[SEQID]]SEQ | 0.58 | 0.01 |
| ID NO:-00490 | | |
| [[SEQID]]SEQ | 0.44 | 0.01 |
| ID NO:-00512 | | |
| [[SEQID]]SEQ | 0.40 | 0.01 |
| ID NO:-00500 | | |

[0772] An exemplary list of the top 10 nutritive polypeptide sequences enriched in methionine is shown in table E5BE. The top 10 nutritive polypeptide sequences reduced in arginine are shown in table E5BF.

TABLE E5BE

| SEQID | EAA | M |
|---|---|---|
| [[SEQID]]SEQ ID | 0.45 | 0.16 |
| NO:-00552 | | |
| [[SEQID]]SEQ ID | 0.33 | 0.13 |
| NO:-00513 | | |
| [[SEQID]]SEQ ID | 0.38 | 0.09 |
| NO:-00529 | | |
| [[SEQID]]SEQ ID | 0.41 | 0.09 |
| NO:-00526 | | |
| [[SEQID]]SEQ ID | 0.48 | 0.09 |
| NO:-00868 | | |
| [[SEQID]]SEQ ID | 0.44 | 0.09 |
| NO:-00595 | | |
| [[SEQID]]SEQ ID | 0.50 | 0.09 |
| NO:-00584 | | |
| [[SEQID]]SEQ ID | 0.56 | 0.09 |
| NO:-00486 | | |
| [[SEQID]]SEQ ID | 0.42 | 0.08 |
| NO:-00092 | | |
| [[SEQID]]SEQ ID | 0.42 | 0.08 |
| NO:-00074 | | |

TABLE E5BF

| SEQID | EAA | M |
|---|---|---|
| [[SEQID]]SEQ | 0.60 | 0.00 |
| ID NO:-00132 | | |
| [[SEQID]]SEQ | 0.59 | 0.00 |
| ID NO:-00051 | | |
| [[SEQID]]SEQ | 0.59 | 0.00 |
| ID NO:-00052 | | |
| [[SEQID]]SEQ | 0.57 | 0.00 |
| ID NO:-00043 | | |
| [[SEQID]]SEQ | 0.57 | 0.00 |
| ID NO:-00053 | | |
| [[SEQID]]SEQ | 0.55 | 0.00 |
| ID NO:-00055 | | |
| [[SEQID]]SEQ | 0.55 | 0.00 |
| ID NO:-00054 | | |
| [[SEQID]]SEQ | 0.53 | 0.00 |
| ID NO:-00224 | | |
| [[SEQID]]SEQ | 0.52 | 0.00 |
| ID NO:-00024 | | |
| [[SEQID]]SEQ | 0.52 | 0.00 |
| ID NO:-00220 | | |

[0773] An exemplary list of the top 10 nutritive polypeptide sequences enriched in phenylalanine is shown in table E5BG. The top 10 nutritive polypeptide sequences reduced in phenylalanine are shown in table E5BH.

TABLE E5BG

| SEQID | EAA | F |
|---|---|---|
| [[SEQID]]SEQ ID | 0.67 | 0.13 |
| NO:-00150 | | |
| [[SEQID]]SEQ ID | 0.44 | 0.13 |
| NO:-00595 | | |
| [[SEQID]]SEQ ID | 0.68 | 0.13 |
| NO:-00561 | | |
| [[SEQID]]SEQ ID | 0.51 | 0.12 |
| NO:-00118 | | |
| [[SEQID]]SEQ ID | 0.45 | 0.12 |
| NO:-00597 | | |
| [[SEQID]]SEQ ID | 0.51 | 0.12 |
| NO:-00507 | | |
| [[SEQID]]SEQ ID | 0.44 | 0.12 |
| NO:-00594 | | |
| [[SEQID]]SEQ ID | 0.50 | 0.12 |
| NO:-00501 | | |
| [[SEQID]]SEQ ID | 0.63 | 0.11 |
| NO:-00175 | | |
| [[SEQID]]SEQ ID | 0.46 | 0.11 |
| NO:-00485 | | |

TABLE E5BH

| SEQID | EAA | F |
|---|---|---|
| [[SEQID]]SEQ ID NO:- | 0.64 | 0.00 |
| 00162 | | |
| [[SEQID]]SEQ ID NO:- | 0.55 | 0.00 |
| 00560 | | |
| [[SEQID]]SEQ ID NO:- | 0.53 | 0.00 |
| 00224 | | |
| [[SEQID]]SEQ ID NO:- | 0.52 | 0.00 |
| 00220 | | |
| [[SEQID]]SEQ ID NO:- | 0.52 | 0.00 |
| 00195 | | |
| [[SEQID]]SEQ ID NO:- | 0.52 | 0.00 |
| 00241 | | |
| [[SEQID]]SEQ ID NO:- | 0.51 | 0.00 |
| 00215 | | |
| [[SEQID]]SEQ ID NO:- | 0.51 | 0.00 |
| 00213 | | |
| [[SEQID]]SEQ ID NO:- | 0.51 | 0.00 |
| 00214 | | |
| [[SEQID]]SEQ ID NO:- | 0.51 | 0.00 |
| 00212 | | |

[0774] An exemplary list of the top 10 nutritive polypeptide sequences enriched in proline is shown in table E5BI. The top 10 nutritive polypeptide sequences reduced in proline are shown in table E5BJ.

TABLE E5BI

| SEQID | EAA | P |
|---|---|---|
| [[SEQID]]SEQ ID | 0.29 | 0.28 |
| NO:-00743 | | |
| [[SEQID]]SEQ ID | 0.39 | 0.24 |
| NO:-00553 | | |
| [[SEQID]]SEQ ID | 0.24 | 0.20 |
| NO:-03641 | | |
| [[SEQID]]SEQ ID | 0.23 | 0.16 |
| NO:-03444 | | |
| [[SEQID]]SEQ ID | 0.60 | 0.14 |
| NO:-00169 | | |
| [[SEQID]]SEQ ID | 0.48 | 0.14 |
| NO:-00005 | | |
| [[SEQID]]SEQ ID | 0.50 | 0.13 |
| NO:-00805 | | |
| [[SEQID]]SEQ ID | 0.28 | 0.13 |
| NO:-00737 | | |
| [[SEQID]]SEQ ID | 0.40 | 0.11 |
| NO:-03451 | | |
| [[SEQID]]SEQ ID | 0.30 | 0.10 |
| NO:-03447 | | |

TABLE E5BJ

| SEQID | EAA | P |
|---|---|---|
| [[SEQID]]SEQ | 0.67 | 0.00 |
| ID NO:-00150 | | |
| [[SEQID]]SEQ | 0.64 | 0.00 |
| ID NO:-00137 | | |
| [[SEQID]]SEQ | 0.59 | 0.00 |
| ID NO:-00287 | | |
| [[SEQID]]SEQ | 0.59 | 0.00 |
| ID NO:-00548 | | |
| [[SEQID]]SEQ | 0.56 | 0.00 |
| ID NO:-00142 | | |
| [[SEQID]]SEQ | 0.55 | 0.00 |
| ID NO:-00560 | | |
| [[SEQID]]SEQ | 0.53 | 0.00 |
| ID NO:-00224 | | |
| [[SEQID]]SEQ | 0.52 | 0.00 |
| ID NO:-00220 | | |
| [[SEQID]]SEQ | 0.52 | 0.00 |
| ID NO:-00241 | | |
| [[SEQID]]SEQ | 0.52 | 0.00 |
| ID NO:-00216 | | |

[0775] An exemplary list of the top 10 nutritive polypeptide sequences enriched in serine is shown in table E5BK. The top 10 nutritive polypeptide sequences reduced in serine are shown in table E5BL.

TABLE E5BK

| SEQID | EAA | S |
|---|---|---|
| [[SEQID]]SEQ ID | 0.30 | 0.27 |
| NO:-03447 | | |
| [[SEQID]]SEQ ID | 0.42 | 0.16 |
| NO:-00483 | | |
| [[SEQID]]SEQ ID | 0.30 | 0.16 |
| NO:-00535 | | |
| [[SEQID]]SEQ ID | 0.35 | 0.14 |
| NO:-00630 | | |
| [[SEQID]]SEQ ID | 0.58 | 0.14 |
| NO:-00134 | | |
| [[SEQID]]SEQ ID | 0.47 | 0.13 |
| NO:-00557 | | |
| [[SEQID]]SEQ ID | 0.39 | 0.12 |
| NO:-03760 | | |
| [[SEQID]]SEQ ID | 0.37 | 0.12 |
| NO:-03642 | | |
| [[SEQID]]SEQ ID | 0.28 | 0.12 |
| NO:-00652 | | |
| [[SEQID]]SEQ ID | 0.47 | 0.12 |
| NO:-00577 | | |

TABLE E5BL

| SEQID | EAA | S |
|---|---|---|
| [[SEQID]]SEQ ID | 0.63 | 0.00 |
| NO:-00175 | | |
| [[SEQID]]SEQ ID | 0.59 | 0.00 |
| NO:-00051 | | |
| [[SEQID]]SEQ ID | 0.59 | 0.00 |
| NO:-00052 | | |
| [[SEQID]]SEQ ID | 0.58 | 0.00 |
| NO:-00536 | | |
| [[SEQID]]SEQ ID | 0.57 | 0.00 |
| NO:-00043 | | |
| [[SEQID]]SEQ ID | 0.57 | 0.00 |
| NO:-00053 | | |
| [[SEQID]]SEQ ID | 0.57 | 0.00 |
| NO:-00643 | | |
| [[SEQID]]SEQ ID | 0.55 | 0.00 |
| NO:-00055 | | |
| [[SEQID]]SEQ ID | 0.55 | 0.00 |
| NO:-00054 | | |
| [[SEQID]]SEQ ID | 0.50 | 0.00 |
| NO:-00112 | | |

[0776] An exemplary list of the top 10 nutritive polypeptide sequences enriched in threonine is shown in table E5BM. The top 10 nutritive polypeptide sequences reduced in threonine are shown in table E5BN.

TABLE E5BM

| SEQID | EAA | T |
|---|---|---|
| [[SEQID]]SEQ ID NO:- | 0.49 | 0.14 |
| 00404 | | |
| [[SEQID]]SEQ ID NO:- | 0.49 | 0.13 |
| 00547 | | |
| [[SEQID]]SEQ ID NO:- | 0.40 | 0.13 |
| 00522 | | |
| [[SEQID]]SEQ ID NO:- | 0.56 | 0.13 |
| 00569 | | |
| [[SEQID]]SEQ ID NO:- | 0.53 | 0.11 |
| 00528 | | |
| [[SEQID]]SEQ ID NO:- | 0.47 | 0.11 |
| 00504 | | |
| [[SEQID]]SEQ ID NO:- | 0.42 | 0.11 |
| 03768 | | |
| [[SEQID]]SEQ ID NO:- | 0.51 | 0.11 |
| 00523 | | |
| [[SEQID]]SEQ ID NO:- | 0.49 | 0.11 |
| 03649 | | |
| [[SEQID]]SEQ ID NO:- | 0.32 | 0.11 |
| 00116 | | |

TABLE E5BN

| SEQID | EAA | T |
|---|---|---|
| [[SEQID]]SEQ | 0.55 | 0.00 |
| ID NO:-00560 | | |
| [[SEQID]]SEQ | 0.41 | 0.00 |
| ID NO:-00057 | | |
| [[SEQID]]SEQ | 0.41 | 0.00 |
| ID NO:-00542 | | |
| [[SEQID]]SEQ | 0.41 | 0.00 |
| ID NO:-00059 | | |
| [[SEQID]]SEQ | 0.30 | 0.00 |
| ID NO:-00015 | | |
| [[SEQID]]SEQ | 0.30 | 0.00 |
| ID NO:-00014 | | |
| [[SEQID]]SEQ | 0.28 | 0.00 |
| ID NO:-00013 | | |
| [[SEQID]]SEQ | 0.28 | 0.00 |
| ID NO:-00007 | | |
| [[SEQID]]SEQ | 0.28 | 0.00 |
| ID NO:-00007 | | |
| [[SEQID]]SEQ | 0.39 | 0.01 |
| ID NO:-00621 | | |

[0777] An exemplary list of the top 10 nutritive polypeptide sequences enriched in tryptophan is shown in table E5BM. The top 10 nutritive polypeptide sequences reduced in tryptophan are shown in table E5BN.

TABLE E5BM

| SEQID | EAA | W |
|---|---|---|
| [[SEQID]]SEQ ID NO:- | 0.51 | 0.08 |
| 01546 | | |
| [[SEQID]]SEQ ID NO:- | 0.45 | 0.08 |
| 00642 | | |
| [[SEQID]]SEQ ID NO:- | 0.43 | 0.08 |
| 03690 | | |
| [[SEQID]]SEQ ID NO:- | 0.43 | 0.08 |
| 03776 | | |
| [[SEQID]]SEQ ID NO:- | 0.62 | 0.07 |
| 03297 | | |
| [[SEQID]]SEQ ID NO:- | 0.46 | 0.07 |
| 03244 | | |
| [[SEQID]]SEQ ID NO:- | 0.44 | 0.07 |
| 00512 | | |
| [[SEQID]]SEQ ID NO:- | 0.42 | 0.07 |
| 00814 | | |
| [[SEQID]]SEQ ID NO:- | 0.49 | 0.06 |
| 00110 | | |
| [[SEQID]]SEQ ID NO:- | 0.50 | 0.06 |
| 03137 | | |

TABLE E5BN

| SEQID | EAA | W |
|---|---|---|
| [[SEQID]]SEQ | 0.65 | 0.00 |
| ID NO:-00166 | | |
| [[SEQID]]SEQ | 0.64 | 0.00 |
| ID NO:-00137 | | |
| [[SEQID]]SEQ | 0.64 | 0.00 |
| ID NO:-00525 | | |
| [[SEQID]]SEQ | 0.64 | 0.00 |
| ID NO:-00162 | | |
| [[SEQID]]SEQ | 0.60 | 0.00 |
| ID NO:-00169 | | |
| [[SEQID]]SEQ | 0.59 | 0.00 |
| ID NO:-00051 | | |
| [[SEQID]]SEQ | 0.59 | 0.00 |
| ID NO:-00052 | | |
| [[SEQID]]SEQ | 0.58 | 0.00 |
| ID NO:-00134 | | |
| [[SEQID]]SEQ | 0.58 | 0.00 |
| ID NO:-00536 | | |
| [[SEQID]]SEQ | 0.57 | 0.00 |
| ID NO:-00043 | | |

[0778] An exemplary list of the top 10 nutritive polypeptide sequences enriched in tyrosine is shown in table E5BO. The top 10 nutritive polypeptide sequences reduced in tyrosine are shown in table E5BP.

TABLE E5BO

| SEQID | EAA | Y |
|---|---|---|
| [[SEQID]]SEQ ID | 0.28 | 0.16 |
| NO:-00013 | | |
| [[SEQID]]SEQ ID | 0.28 | 0.15 |
| NO:-00007 | | |
| [[SEQID]]SEQ ID | 0.28 | 0.15 |
| NO:-00007 | | |
| [[SEQID]]SEQ ID | 0.30 | 0.14 |
| NO:-00015 | | |
| [[SEQID]]SEQ ID | 0.42 | 0.14 |
| NO:-00325 | | |
| [[SEQID]]SEQ ID | 0.30 | 0.13 |
| NO:-00014 | | |
| [[SEQID]]SEQ ID | 0.33 | 0.12 |
| NO:-00513 | | |
| [[SEQID]]SEQ ID | 0.41 | 0.11 |
| NO:-03689 | | |
| [[SEQID]]SEQ ID | 0.41 | 0.11 |
| NO:-00521 | | |
| [[SEQID]]SEQ ID | 0.47 | 0.11 |
| NO:-00640 | | |

TABLE E5BP

| SEQID | EAA | Y |
|---|---|---|
| [[SEQID]]SEQ | 0.70 | 0.00 |
| ID NO: -00140 | | |
| [[SEQID]]SEQ | 0.67 | 0.00 |
| ID NO: -00146 | | |
| [[SEQID]]SEQ | 0.59 | 0.00 |
| ID NO: -00051 | | |
| [[SEQID]]SEQ | 0.59 | 0.00 |
| ID NO: -00052 | | |
| [[SEQID]]SEQ | 0.59 | 0.00 |
| ID NO: -00548 | | |
| [[SEQID]]SEQ | 0.58 | 0.00 |
| ID NO: -00134 | | |
| [[SEQID]]SEQ | 0.57 | 0.00 |
| ID NO: -00043 | | |
| [[SEQID]]SEQ | 0.57 | 0.00 |
| ID NO: -00053 | | |
| [[SEQID]]SEQ | 0.55 | 0.00 |
| ID NO: -00054 | | |
| [[SEQID]]SEQ | 0.55 | 0.00 |
| ID NO: -00055 | | |

[0779] An exemplary list of the top 10 nutritive polypeptide sequences enriched in valine is shown in table E5BQ. The top 10 nutritive polypeptide sequences reduced in valine are shown in table E5BR.

TABLE E5BQ

| SEQID | EAA | V |
|---|---|---|
| [[SEQID]]SEQ | 0.49 | 0.18 |
| ID NO: -00550 | | |
| [[SEQID]]SEQ | 0.53 | 0.16 |
| ID NO: -00592 | | |
| [[SEQID]]SEQ | 0.44 | 0.15 |
| ID NO: -00532 | | |
| [[SEQID]]SEQ | 0.50 | 0.15 |
| ID NO: -00620 | | |
| [[SEQID]]SEQ | 0.42 | 0.14 |
| ID NO: -00644 | | |
| [[SEQID]]SEQ | 0.46 | 0.13 |
| ID NO: -00514 | | |
| [[SEQID]]SEQ | 0.52 | 0.13 |
| ID NO: -00518 | | |
| [[SEQID]]SEQ | 0.49 | 0.13 |
| ID NO: -00598 | | |
| [[SEQID]]SEQ | 0.51 | 0.13 |
| ID NO: -00581 | | |
| [[SEQID]]SEQ | 0.51 | 0.13 |
| ID NO: -00145 | | |

TABLE E5BR

| SEQID | EAA | V |
|---|---|---|
| [[SEQID]]SEQ | 0.48 | 0.00 |
| ID NO: -00239 | | |
| [[SEQID]]SEQ | 0.45 | 0.00 |
| ID NO: -00552 | | |
| [[SEQID]]SEQ | 0.45 | 0.00 |
| ID NO: -00240 | | |
| [[SEQID]]SEQ | 0.40 | 0.00 |
| ID NO: -00615 | | |
| [[SEQID]]SEQ | 0.28 | 0.00 |
| ID NO: -00652 | | |
| [[SEQID]]SEQ | 0.25 | 0.01 |
| ID NO: -00515 | | |
| [[SEQID]]SEQ | 0.40 | 0.01 |
| ID NO: -00522 | | |
| [[SEQID]]SEQ | 0.55 | 0.01 |
| ID NO: -00560 | | |
| [[SEQID]]SEQ | 0.56 | 0.01 |
| ID NO: -00645 | | |
| [[SEQID]]SEQ | 0.42 | 0.01 |
| ID NO: -00647 | | |

### Example 6. Selection of Amino Acid Sequences of Nutritive Polypeptides Enriched in Essential Amino Acids to Provide Protein Nutrition and for the Treatment of Protein Malnutrition

[0780] It has been shown that humans cannot endogenously synthesize nine of the twenty naturally occurring amino acids: histidine, leucine, isoleucine, valine, phenylalanine, methionine, threonine, lysine, and tryptophan (Young, V. R. and Tharakan, J. F. Nutritional essentiality of amino acids and amino acid requirements in healthy adults. In Metabolic and Therapeutic Aspects of Amino Acids in Clinical Nutrition. Second Edition. Cynober, L. A. Ed.; CRC Press: New York, 2004; pp 439-470). As such, there is a need to ingest sufficient quantities of these nine essential amino acids to avoid protein malnutrition and the deleterious health effects that result from this state. Nutritive polypeptides are identified that are useful for the fulfillment of these essential amino acid requirements either in healthy or malnourished individuals by selecting those that are enriched in essential amino acids by mass and contain a non-zero amount of each essential amino acid (i.e., the nutritive polypeptide sequence is essential amino acid complete).

[0781] Using a database of all protein sequences derived from edible species as described herein, candidate sequences that are essential amino acid complete and enriched in essential amino acids were identified. In order to increase the probability of these proteins being solubly expressed and highly soluble at pH 7 with reduced aggregation propensity, solvation score and aggregation score upper bounds of −20 kcal/mol/AA and 0.5 were applied. In order to reduce the likelihood that these proteins would elicit an allergenic response, upper bounds of 50% and 35% were set for the global allergen homology and allergenicity scores, respectively. In order to reduce the likelihood that these proteins would have toxic effects upon ingestion, an upper bound of 35% was set for the toxicity score. In order to reduce the likelihood that these proteins would act as inhibitors of digestive proteases, an upper bound of 35% was set for the anti-nutricity score.

[0782] An exemplary list of the top 10 nutritive polypeptide sequences that are essential amino acid complete, enriched in essential amino acids, and meet the aforementioned cutoffs in solvation score, aggregation score, global allergen homology, allergenicity score, toxicity score, and anti-nutricity score is shown in table E6A.

TABLE E6A

| SEQID | EAAc | EAA |
|---|---|---|
| [[SEQID]]SEQ | 1 | 0.65 |
| ID NO: -03636 | | |
| [[SEQID]]SEQ | 1 | 0.63 |
| ID NO: -03492 | | |
| [[SEQID]]SEQ | 1 | 0.62 |
| ID NO: -03468 | | |
| [[SEQID]]SEQ | 1 | 0.62 |
| ID NO: -03544 | | |
| [[SEQID]]SEQ | 1 | 0.62 |
| ID NO: -03484 | | |
| [[SEQID]]SEQ | 1 | 0.61 |
| ID NO: -03442 | | |
| [[SEQID]]SEQ | 1 | 0.61 |
| ID NO: -03417 | | |
| [[SEQID]]SEQ | 1 | 0.61 |
| ID NO: -03563 | | |
| [[SEQID]]SEQ | 1 | 0.60 |
| ID NO: -03469 | | |
| [[SEQID]]SEQ | 1 | 0.60 |
| ID NO: -03443 | | |

[0783] An exemplary list of the top 10 nutritive polypeptide sequences from the expressed protein database that are essential amino acid complete and enriched in essential amino acids is shown in table E6B.

TABLE E6B

| SEQID | EAAc | EAA |
|---|---|---|
| [[SEQID]]SEQ | 1 | 0.70 |
| ID NO: -00140 | | |
| [[SEQID]]SEQ | 1 | 0.68 |
| ID NO: -00561 | | |
| [[SEQID]]SEQ | 1 | 0.67 |
| ID NO: -00146 | | |
| [[SEQID]]SEQ | 1 | 0.67 |
| ID NO: -00150 | | |
| [[SEQID]]SEQ | 1 | 0.65 |
| ID NO: -00143 | | |
| [[SEQID]]SEQ | 1 | 0.62 |
| ID NO: -03297 | | |
| [[SEQID]]SEQ | 1 | 0.61 |
| ID NO: -00487 | | |
| [[SEQID]]SEQ | 1 | 0.59 |
| ID NO: -00287 | | |
| [[SEQID]]SEQ | 1 | 0.59 |
| ID NO: -00298 | | |
| [[SEQID]]SEQ | 1 | 0.59 |
| ID NO: -00548 | | |

### Example 7. Selection of Amino Acid Sequences of Nutritive Polypeptides Enriched in Branched Chain Amino Acids for Muscle Health, and Selection of Amino Acid Sequences of Nutritive Polypeptides Reduced in Branched Chain Amino Acids for Treatment of Diabetes, Cardiovascular Disease, Chronic Kidney Disease and Stroke

[0784] Identification of Proteins Enriched in Branched Chain Amino acids for the Treatment of Hepatic and/or Renal Disease. Using a database of all protein sequences derived from edible species as described herein, candidate sequences that are enriched or reduced in branched chain amino acids were identified. In order to increase the probability that these proteins are solubly expressed, as well as highly soluble at pH 7 with reduced aggregation propensity, solvation score and aggregation score upper bounds of −20 kcal/mol/AA and 0.5 were applied. In order to reduce the likelihood that these proteins would elicit an allergenic response, upper bounds of 50% and 35% were set for the global allergen homology and allergenicity scores, respectively. In order to reduce the likelihood that these proteins would have toxic effects upon ingestion, an upper bound of 35% was set for the toxicity score. In order to reduce the likelihood that these proteins would act as inhibitors of digestive proteases, an upper bound of 35% was set for the anti-nutricity score.

[0785] An exemplary list of the top 10 nutritive polypeptide sequences that are enriched in branched chain amino acids, and meet the afore mentioned cutoffs in solvation score, aggregation score, global allergen homology, allergenicity score, toxicity score, and anti-nutricity score is shown in table E7A.

TABLE E7A

| SEQID | EAA | BCAA |
|---|---|---|
| [[SEQID]]SEQ | 0.58 | 0.31 |
| ID NO: -03532 | | |
| [[SEQID]]SEQ | 0.53 | 0.31 |
| ID NO: -03616 | | |
| [[SEQID]]SEQ | 0.56 | 0.31 |
| ID NO: -03629 | | |
| [[SEQID]]SEQ | 0.52 | 0.29 |
| ID NO: -03619 | | |
| [[SEQID]]SEQ | 0.49 | 0.29 |
| ID NO: -03542 | | |
| [[SEQID]]SEQ | 0.49 | 0.29 |
| ID NO: -03519 | | |
| [[SEQID]]SEQ | 0.53 | 0.29 |
| ID NO: -03603 | | |
| [[SEQID]]SEQ | 0.52 | 0.29 |
| ID NO: -03536 | | |
| [[SEQID]]SEQ | 0.48 | 0.29 |
| ID NO: -03597 | | |
| [[SEQID]]SEQ | 0.49 | 0.29 |
| ID NO: -03623 | | |

[0786] An exemplary list of the top 10 nutritive polypeptide sequences from the expressed protein database that are enriched in branched chain amino acids is shown in table E7B.

TABLE E7B

| SEQID | EAA | BCAA |
|---|---|---|
| [[SEQID]]SEQ | 0.64 | 0.53 |
| ID NO: -00162 | | |
| [[SEQID]]SEQ | 0.65 | 0.46 |
| ID NO: -00166 | | |
| [[SEQID]]SEQ | 0.58 | 0.46 |
| ID NO: -00134 | | |
| [[SEQID]]SEQ | 0.60 | 0.43 |
| ID NO: -00169 | | |
| [[SEQID]]SEQ | 0.57 | 0.41 |
| ID NO: -00043 | | |
| [[SEQID]]SEQ | 0.60 | 0.41 |
| ID NO: -00132 | | |
| [[SEQID]]SEQ | 0.64 | 0.39 |
| ID NO: -00137 | | |
| [[SEQID]]SEQ | 0.63 | 0.38 |
| ID NO: -00175 | | |
| [[SEQID]]SEQ | 0.49 | 0.38 |
| ID NO: -00550 | | |
| [[SEQID]]SEQ | 0.51 | 0.37 |
| ID NO: -00234 | | |

[0787] An exemplary list of the top 10 nutritive polypeptide sequences that are reduced in branched chain amino acids, and meet the afore mentioned cutoffs in solvation score, aggregation score, global allergen homology, allergenicity score, toxicity score, and anti-nutricity score is shown in table E7C.

TABLE E7C

| SEQID | EAA | BCAA |
|---|---|---|
| [[SEQID]]SEQ | 0.36 | 0.01 |
| ID NO: -03471 | | |
| [[SEQID]]SEQ | 0.06 | 0.01 |
| ID NO: -03473 | | |
| [[SEQID]]SEQ | 0.24 | 0.01 |
| ID NO: -03571 | | |
| [[SEQID]]SEQ | 0.24 | 0.01 |
| ID NO: -03495 | | |
| [[SEQID]]SEQ | 0.24 | 0.01 |
| ID NO: -03514 | | |
| [[SEQID]]SEQ | 0.45 | 0.03 |
| ID NO: -00552 | | |
| [[SEQID]]SEQ | 0.37 | 0.03 |
| ID NO: -03611 | | |
| [[SEQID]]SEQ | 0.37 | 0.03 |
| ID NO: -03457 | | |
| [[SEQID]]SEQ | 0.34 | 0.03 |
| ID NO: -03456 | | |
| [[SEQID]]SEQ | 0.36 | 0.03 |
| ID NO: -03520 | | |

[0788] An exemplary list of the top 10 nutritive polypeptide sequences from the expressed protein database that are reduced in branched chain amino acids is shown in table E7D.

TABLE E7D

| SEQID | EAA | BCAA |
|---|---|---|
| [[SEQID]]SEQ | 0.45 | 0.03 |
| ID NO: -00552 | | |
| [[SEQID]]SEQ | 0.40 | 0.03 |
| ID NO: -00522 | | |
| [[SEQID]]SEQ | 0.25 | 0.05 |
| ID NO: -00515 | | |
| [[SEQID]]SEQ | 0.39 | 0.05 |
| ID NO: -00553 | | |
| [[SEQID]]SEQ | 0.44 | 0.06 |
| ID NO: -00585 | | |
| [[SEQID]]SEQ | 0.42 | 0.07 |
| ID NO: -00637 | | |
| [[SEQID]]SEQ | 0.28 | 0.08 |
| ID NO: -00652 | | |
| [[SEQID]]SEQ | 0.40 | 0.08 |
| ID NO: -00615 | | |
| [[SEQID]]SEQ | 0.29 | 0.08 |
| ID NO: -00743 | | |
| [[SEQID]]SEQ | 0.49 | 0.09 |
| ID NO: -00547 | | |

### Example 8. Selection of Amino Acid Sequences of Nutritive Polypeptides Having Low or No Phenylalanine and Enriched in Tyrosine and all Other Essential Amino Acids for Treatment or Prevention of Phenylketonuria

[0789] Individuals who suffer from phenylketonuria (PKU) are unable to process the amino acid phenylalanine and catalyze its conversion to tyrosine often due to a malfunctioning hepatic enzyme phenylalanine hydroxylase (MacLeod E. L. and Ney D. M. Nutritional Management of Phenylketonuria. Annales Nestle. (2010) 68:58-69). In these individuals, when protein containing the amino acid phenylalanine is ingested, phenylalanine accumulates in the blood. Untreated PKU has serious untoward health effects, including impaired school performance, impaired executive functioning, and long term intellectual disability (Matalon, R., Michals-Matalon, K., Bhatia, G., Grechanina, E., Novikov, P., McDonald, J. D., Grady, J., Tyring, S. K., Guttler, F. Large neutral amino acids in the treatment of phenylketonuria. J. Inherit. Metab. Dis. (2006) 29: 732-738). One way phenylalanine blood levels can be kept low to avoid neurological effects is to avoid the ingestion of phenylalanine containing proteins and/or only consume protein sources that are low in phenylalanine. As basic protein nutritional requirements of all other amino acids must also be met, sufficient intake of the other essential amino acids (histidine, leucine, isoleucine, valine, methionine, threonine, lysine, and tryptophan) and tyrosine, which becomes conditionally essential in these individuals, is required. One can identify beneficial nutritive polypeptides for individuals that suffer from phenylketonuria by selecting proteins that contain low or no phenylalanine and are enriched by mass in tyrosine and the other essential amino acids.

[0790] Using a database of all protein sequences derived from edible species as described herein, candidate sequences that contain low or no phenylalanine by mass, are essential amino acid and tyrosine complete (aside from phenylalanine), and enriched in tyrosine and essential amino acids were identified and rank ordered first by their phenylalanine mass fraction and then by their total tyrosine plus essential amino acid mass fraction. In order to increase the probability that these proteins are solubly expressed, as well as highly soluble at pH 7 with reduced aggregation propensity, solvation score and aggregation score upper bounds of −20 kcal/mol/AA and 0.5 were applied. In order to reduce the likelihood that these proteins would elicit an allergenic response, upper bounds of 50% and 35% were set for the global allergen homology and allergenicity scores, respectively. In order to reduce the likelihood that these proteins would have toxic effects upon ingestion, an upper bound of 35% was set for the toxicity score. In order to reduce the likelihood that these proteins would act as inhibitors of digestive proteases, an upper bound of 35% was set for the anti-nutricity score.

[0791] An exemplary list of the top 10 nutritive polypeptide sequences that contain low or no phenylalanine by mass, are essential amino acid and tyrosine complete (aside from phenylalanine), enriched in tyrosine and essential amino acids, and meet the afore mentioned cutoffs in solvation score, aggregation score, global allergen homology, allergenicity score, toxicity score, and anti-nutricity score is shown in table E8A.

TABLE E8A

| SEQID | EAA | F | Y |
|---|---|---|---|
| [[SEQID]]SEQ | 0.53 | 0.00 | 0.09 |
| ID NO: -03584 | | | |
| [[SEQID]]SEQ | 0.52 | 0.00 | 0.04 |
| ID NO: -03479 | | | |
| [[SEQID]]SEQ | 0.55 | 0.00 | 0.01 |
| ID NO: -03573 | | | |
| [[SEQID]]SEQ | 0.50 | 0.00 | 0.05 |
| ID NO: -00634 | | | |
| [[SEQID]]SEQ | 0.49 | 0.00 | 0.05 |
| ID NO: -03466 | | | |
| [[SEQID]]SEQ | 0.53 | 0.00 | 0.01 |
| ID NO: -03609 | | | |
| [[SEQID]]SEQ | 0.45 | 0.00 | 0.06 |
| ID NO: -03498 | | | |
| [[SEQID]]SEQ | 0.40 | 0.00 | 0.08 |
| ID NO: -03465 | | | |
| [[SEQID]]SEQ | 0.46 | 0.00 | 0.01 |
| ID NO: -03587 | | | |
| [[SEQID]]SEQ | 0.41 | 0.00 | 0.05 |
| ID NO: -03463 | | | |

[0792] An exemplary list of the top 10 nutritive polypeptide sequences from the expressed protein database that contain low or no phenylalanine by mass, are essential amino acid and tyrosine complete (aside from phenylalanine), and enriched in tyrosine and essential amino acids is shown in table E8B.

TABLE E8B

| SEQID | EAA | F | Y |
|---|---|---|---|
| [[SEQID]]SEQ | 0.50 | 0.00 | 0.05 |
| ID NO: -00634 | | | |
| [[SEQID]]SEQ | 0.46 | 0.01 | 0.01 |
| ID NO: -00514 | | | |
| [[SEQID]]SEQ | 0.47 | 0.01 | 0.03 |
| ID NO: -00329 | | | |
| [[SEQID]]SEQ | 0.51 | 0.01 | 0.02 |
| ID NO: -00628 | | | |
| [[SEQID]]SEQ | 0.47 | 0.01 | 0.04 |
| ID NO: -00636 | | | |
| [[SEQID]]SEQ | 0.45 | 0.01 | 0.04 |
| ID NO: -03634 | | | |
| [[SEQID]]SEQ | 0.38 | 0.01 | 0.07 |
| ID NO: -00335 | | | |
| [[SEQID]]SEQ | 0.46 | 0.01 | 0.06 |
| ID NO: -00639 | | | |
| [[SEQID]]SEQ | 0.40 | 0.01 | 0.03 |
| ID NO: -03448 | | | |
| [[SEQID]]SEQ | 0.42 | 0.02 | 0.01 |
| ID NO: -03889 | | | |

### Example 9. Selection of Amino Acid Sequences of Nutritive Polypeptides Containing Fragments or Regions of Naturally-Occurring Protein Sequences: Nutritive Polypeptide Fragments Enriched in Leucine and all Essential Amino Acids

[0793] In some cases, full length proteins identified from the databases described herein are not particularly advantageous in view of one or more selection requirements defined by one or more important parameters, or otherwise do not provide enough of one or more specific amino acid(s) by mass relative to the total mass of the nutritive polypeptide. In these cases, one or more fragments (also termed “regions” herein) of nutritive polypeptides identified in the database are able meet the desired search criteria. Databases containing possible fragments of nutritive polypeptides are generated and searched by taking each full length sequences in the database and examining all possible subsequences at least 25 amino acids in length contained therein. For example, it was desired to find a nutritive polypeptide sequence that had leucine mass fractions greater than about 0.2 and highly charged to increase the likelihood of soluble expression. The protein edible species database described herein was searched using a solvation score cutoff of less than −30, and in order to reduce the likelihood that these proteins would elicit an allergenic response, upper bounds of 50% were set for the global allergen homology and allergenicity scores. In order to reduce the likelihood that these proteins would have toxic effects upon ingestion, an upper bound of 35% was set for the toxicity score. In order to reduce the likelihood that these proteins would act as inhibitors of digestive proteases, an upper bound of 35% was set for the anti-nutricity score.

[0794] An exemplary list of the top 10 nutritive polypeptide fragments that are enriched in leucine (≥20% by mass) and meet the afore mentioned cutoffs in solvation score, global allergen homology, allergenicity score, toxicity score, and anti-nutricity score is shown in table E9A.

TABLE E9A

| DBID | EAA | L |
|---|---|---|
| P58797 | 0.47 | 0.26 |
| A7A1V1 | 0.49 | 0.24 |
| P04467 | 0.56 | 0.23 |
| Q9AWA5 | 0.45 | 0.22 |
| Q2NL14 | 0.52 | 0.22 |
| Q60CZ8 | 0.42 | 0.22 |
| Q10MN8 | 0.32 | 0.22 |
| P50275 | 0.47 | 0.22 |
| Q2YDE5 | 0.45 | 0.22 |
| Q0P5B4 | 0.51 | 0.22 |

[0795] An exemplary list of the top 10 nutritive polypeptide fragments from the expressed protein database that are enriched in leucine (≥20% by mass) is shown in Table E9B.

TABLE E9B

| SEQID | EAA | L |
|---|---|---|
| [[SEQID]]SEQ | 0.60 | 0.32 |
| ID NO: -00132 | | |
| [[SEQID]]SEQ | 0.52 | 0.26 |
| ID NO: -00195 | | |
| [[SEQID]]SEQ | 0.54 | 0.26 |
| ID NO: -00194 | | |
| [[SEQID]]SEQ | 0.53 | 0.26 |
| ID NO: -00193 | | |
| [[SEQID]]SEQ | 0.65 | 0.26 |
| ID NO: -00166 | | |
| [[SEQID]]SEQ | 0.58 | 0.24 |
| ID NO: -00134 | | |
| [[SEQID]]SEQ | 0.51 | 0.23 |
| ID NO: -00212 | | |
| [[SEQID]]SEQ | 0.49 | 0.23 |
| ID NO: -00139 | | |
| [[SEQID]]SEQ | 0.51 | 0.21 |
| ID NO: -00213 | | |
| [[SEQID]]SEQ | 0.47 | 0.21 |
| ID NO: -00148 | | |

### Example 10. Purification of Nutritive Polypeptides

[0796] Various methods of purification have been used to isolate nutritive polypeptides from or away other materials such as raw foods, cells, salts, small molecules, host cell proteins, and lipids. These methods include diafiltration, precipitation, flocculation, aqueous two phase extraction, and chromatography.

[0797] Purification by anti-FLAG Affinity Chromatography. Anti-FLAG purification provides a method to purify nutritive polypeptides from low-titer expression systems or from similarly charged host cell proteins. Nutritive polypeptides were engineered to contain either a single FLAG tag (DYKDDDDK (SEQ ID NO: 3914)) or a triple tandem FLAG tag (DYKDDDDKDYKDDDDKDYKDDDDK (SEQ ID NO: 4134)) appended to the C-terminus of the protein. Anti-FLAG affinity purification offers a single-step purification process that offers non-denaturing process conditions and elution purities of >95% (Einhauer et al., 2001 Journal of Biochemical and Biophysical Methods).

[0798] Nutritive polypeptides were purified using Anti-FLAG® M2 Affinity Agarose Gel (Sigma-Aldrich, St. Louis, Mo.). The M2 affinity resin is designed specifically for use with C-terminal FLAG epitopes. For purification of N-terminally appended FLAG epitopes, the M1 Affinity Agarose Gel was used. The M2 Affinity Agarose Gel (resin) has an advertised static binding capacity (SBC) of approximately 0.5 mg nutritive polypeptide per mL of resin.

[0799] Purification of nutritive polypeptides from Aspergillus niger secretion media and Bacillus subtilis secretion media were performed using 20-40 mL of anti-FLAG® resin. Prior to purification, secretion media was adjusted to 150 mM NaCl and pH 7.4. Resin was equilibrated by rinsing the media with an excess of 1× tris-buffered saline (TBS) pH 7.4±0.1 and collecting it through a 0.2 um polyethersulfone (PES) vacuum filter. Equilibrated resin was then mixed with secretion media in batch mode and allowed to mix at room temperature for one hour. Unbound material was removed from the resin by passing the entire mixture through a 0.2 um PES vacuum filter. The resin was physically collected on the surface of the filter and was subsequently washed with 20 resin volumes of TBS pH 7.4±0.1 to further remove unbound material through the 0.2 um PES vacuum filter. Washed resin was transferred to drip columns (10 mL each) and the bound polypeptides were eluted with two column volumes (CV) of 0.1M glycine pH 3.0. The eluted polypeptides were flowed directly from the drip columns into conical tubes that contained 1M Tris pH 8.0; this strategy was used to neutralize the pH of the eluted polypeptide solution as quickly as possible. Resin was regenerated using an additional 3 CV of 0.1M glycine pH 3.0. For short term storage, resin was stored in 1×TBS pH 7.4 at 4° C.; for long term storage, resin was stored in 0.5×TBS pH 7.4, 50% glycerol at −20° C.

[0800] Exemplary anti-FLAG® purification of [[SEQID]]SEQ ID NO:−00105 from B. subtilis yielded 4.0 mg of protein in a 4.3 ml elution. The sample was loaded onto a polyacrylamide gel at three different dilutions for increased sensitivity and [[SEQID]]SEQ ID NO:−00105 was found to be 95% pure. Exemplary anti-FLAG® purification of [[SEQID]]SEQ ID NO:−00298 from A. niger was performed according to the same procedure. The elution fraction was neutralized, as described, and analyzed by SDS-PAGE and Bradford assay as described herein. The main band in the elution was found to be 95% pure. The main band in the elution is compared to the MW ladder on the same gel, and matched the expected molecular weight of [[SEQID]]SEQ ID NO:−00298. Forty mL of anti-FLAG® resin captured 4.0 mg of material, resulting in an estimated resin capacity of 0.10 mg/mL.

[0801] Purification by 5 ml Immobilized Metal Affinity Chromatography (IMAC). E. coli was grown in shake flask fermentation with targeted expression of individual nutritive polypeptides with HIS8 tags (SEQ ID NO: 3919), as described herein. Cells were harvested from each shake-flask by bucket centrifugation. The supernatant was discarded, and the cells were suspended in 30 mM imidazole, 50 mM sodium phosphate, 0.5 M NaCl, pH 7.5 at a wet cell weight (WCW) concentration of 20% w/v ^{w}/ᵥ. The suspended cells were then lysed with two passes through a M110-P Microfluidizer® (Microfluidics, Westwood, Mass.) at 20,000 psi through an 87 um interaction chamber. The lysed cells were centrifuged at 15,000 relative centrifugal force (RCF) for 120 minutes, and then decanted. Cellular debris was discarded, and the supernatants were 0.2 um filtered. These filtered protein solutions were then purified by immobilized metal affinity chromatography (IMAC) on an ÄKTA Explorer 100 FPLC (GE Healthcare, Piscataway, N.J.). Nutritive polypeptides were purified over 5 mL (1.6 cm diameter×2.5 cm height) IMAC Sepharose™ 6 Fast Flow columns (GE Healthcare, Piscataway, N.J.).

[0802] IMAC resin (GE Healthcare, IMAC Sepharose™ 6 Fast Flow) was charged with nickel using 0.2 NiSO4 and washed with 500 mM NaCl, 200 mM imidazole, pH 7.5 followed by equilibration in 30 mM imidazole, 50 mM sodium phosphate, 0.5 M NaCl, pH 7.5. 50 mL of each protein load solution was applied onto a 5 mL IMAC column, and washed with additional equilibration solution to remove unbound impurities. The protein of interest was then eluted with 15 mL of IMAC Elution Solution, 0.25 M imidazole, 0.5 M NaCl, pH 7.5. All column blocks were performed at a linear flow rate of 150 cm/hr. Each IMAC elution fraction was buffer exchanged by dialysis into a neutral pH formulation solution. The purified proteins were analyzed for concentration and purity by capillary electrophoresis and/or SDS-PAGE. Concentration was also tested by Bradford and A280 measurement, as described herein. Table E9A demonstrates a list of nutritive polypeptides that were purified by IMAC at 5 mL scale.

TABLE E9A
Nutritive polypeptides that were
purified by IMAC at 5 mL

| [[SEQID]]SEQ ID | Mass | |
|---|---|---|
| NO: | (mg) | Purity |
| 00533 | 3 | 22% |
| 00522 | 25.5 | 36% |
| 00085 | 34 | 51% |
| 00103 | 4.5 | 56% |
| 00359 | 40.5 | 56% |
| 00346 | 30.7 | 56% |
| 00510 | 112 | 61% |
| 00622 | 70 | 70% |
| 00522 | 47 | 72% |
| 00546 | 235.6 | 75% |
| 00353 | 5.6 | 76% |
| 00601 | 83.8 | 77% |
| 00418 | 14 | 80% |
| 00502 | 93.2 | 84% |
| 00100 | 68 | 87% |
| 00606 | 77.8 | 87% |
| 00104 | 93 | 89% |
| 00076 | 92 | 91% |
| 00341 | 176.6 | 91% |
| 00598 | 60.3 | 91% |
| 00647 | 73.7 | 93% |
| 00105 | 3.8 | 93% |
| 00343 | 35.3 | 95% |
| 00103 | 112 | 95% |
| 00511 | 179 | 95% |
| 00354 | 85.8 | 96% |
| 00587 | 93 | 96% |
| 00610 | 90.5 | 97% |
| 00485 | 269 | 98% |
| 00356 | 76.9 | 98% |
| 00352 | 134.9 | 99% |
| 00345 | 196.2 | 100% |
| 00338 | 123.2 | 100% |
| 00298 | 0.6 | 100% |
| 00357 | 104.8 | 100% |
| 00605 | 202 | 100% |
| 00559 | 241.8 | 100% |
| 00338 | 268 | 100% |

[0803] Purification by 1 L Immobilized Metal Affinity Chromatography (IMAC). E. coli was grown in 20 L fermentation with targeted expression of individual nutritive polypeptides with HIS8 tags (SEQ ID NO: 3919), as described herein. Cells were harvested from the fermenter and centrifuged using a Sharples AS-16P centrifuge to collect wet cell mass. Cells were subsequently resuspended in 30 mM imidazole, 50 mM sodium phosphate, 0.5 M NaCl, pH 7.5 at a wet cell weight (WCW) concentration of 20% w/v. The cell suspension was then lysed using four passes through a Niro Soavi Homogenizer (Niro Soavi, Parma, Italy) at an operational pressure of 12,500-15,000 psi and a flow rate of 1 L/min. The lysate was clarified using a Beckman J2-HC bucket centrifuge (Beckman-Coulter, Brea, Calif.) at 13,700×g for 1 hour. Cellular debris was discarded, and the supernatant was filtered through a Sartopore® II XLG 0.8/0.2 um filter (Sartorius Stedim, Bohemia, N.Y.) at 30 L/m2/hr. Filtered lysate was purified by IMAC using IMAC Sepharose™ 6 Fast Flow resin packed in a 0.9 L column (9 cm diameter×13.8 cm height).

[0804] IMAC resin was equilibrated, as described herein, at a linear flow rate of 300 cm/hr. Once equilibrated, the entirety of the filtered lysate was passed over the column at a linear flow rate of 150 cm/hr. Load volumes ranged from six to ten column volumes. After the load, unbound material was washed off of the column, and the target protein was eluted. Elution pools were shipped at room temperature, 4° C. or frozen. This decision was dependent on the stability of the nutritive polypeptide in Elution Solution. Table E9B summarizes a number of nutritive polypeptides that have been purified by IMAC at the 1 L column scale.

TABLE E9B
Nutritive polypeptides that have been
purified by IMAC at 1 L scale

| [[SEQID]] | IMAC Elution | IMAC Elution |
|---|---|---|
| SEQ ID NO: | Mass | Purity |
| 00240 | 9.00 grams | 98% |
| 00338 | 43.5 grams | 100% |
| 00341 | 54.3 grams | 100% |
| 00352 | 19.8 grams | 100% |
| 00559 | 19.5 grams | 89% |
| 00587 | 8.6 grams | 69% |

[0805] Nutritive polypeptides were filtered through a Sartopore II XLG 0.8/0.2 μm filter and loaded directly into an ultrafiltration/diafiltration (UF/DF) unit operation. Membrane area and nominal molecular weight cutoff were chosen as appropriate for each nutritive polypeptide. Nutritive polypeptides were ultrafiltered at a cross flow of 12 L/m2/min and a TMP target of 25 psi. Nutritive polypeptides were concentrated approximately ten-fold on Hydrosart ultrafiltration cassettes (Sartorius Stedim, Bohemia, N.Y.), and diafiltered seven diavolumes into a formulation buffer that is specific to the nutritive polypeptide. Ultrafiltration permeate was discarded. The diafiltered, concentrated retentate was collected, filtered through a 0.22 um membrane filter and frozen at −80° C.

[0806] In some cases, frozen protein concentrates were lyophilized using a Labconco lyophilizer (Labconco, Kansas City, Mo.). Residual water content of the cake is analyzed using the Karl Fisher method.

[0807] Purification by 10 L Immobilized Metal Affinity Chromatography (IMAC). E. coli was grown in 250 L fermentation with targeted expression of individual nutritive polypeptides with HIS8 tags (SEQ ID NO: 3919), as described herein. Cells were harvested from the 250 L fermenter and centrifuged using a Sharples AS-16P centrifuge to collect wet cell mass. Cells were subsequently resuspended in 30 mM imidazole, 50 mM sodium phosphate, 0.5 M NaCl, pH 7.5 at a WCW concentration of 20% w/v. The cells suspension was then lysed using four passes through a Niro Soavi Homogenizer (Niro Soavi, Parma, Italy) at an operational pressure of 12,500-15,000 psi and a flow rate of 1 L/min. Clarified lysate was generated using four passes through a Sharples AS-16P centrifuge at 15,000 rpm operated at 0.5 L/min. Cellular debris was discarded, and the supernatant was filtered through a series of filters. Clarified lysate was passed sequentially through a SartoPure® GF+ 0.65 um, a SartoGuard® PES 1.2/0.2 um and a Sartopore® II XLG 0.8/0.2 um filter (Sartorius Stedim, Bohemia, N.Y.). Filtered lysate was purified by IMAC using IMAC Sepharose® 6 Fast Flow resin packed in an 8.5 column (20 cm diameter×27.1 cm height).

[0808] IMAC resin was equilibrated as described at a linear flow rate of 150 cm/hr. Once equilibrated, the filtered lysate was passed over the column at a linear flow rate of 150 cm/hr. Load volumes ranged from 3.8 to 5.0 CV. After the load, unbound material was washed off of the column with additional equilibration. Nutritive polypeptides manufactured at the 10 L IMAC scale were subject to an additional set of washes with 2 CV of 10 mM sodium phosphate dibasic, 300 mM NaCl; 3 CV of 0.5% w/v sodium deoxycholate, 50 mM sodium phosphate dibasic, 300 mM NaCl; and 5CV of 10 mM sodium phosphate dibasic, 300 mM NaCl. Following the washes, the target polypeptide was eluted as described. Elution pools were stored at room temperature.

[0809] Multiple nutritive polypeptides were purified by IMAC chromatography at the 10 L column scale. Table E9C summarizes the purification of [[SEQID]]SEQ ID NO:−00105 and [[SEQID]]SEQ ID NO:−00338. FIG. 1 provides an exemplary SDS-PAGE analysis of the purification of [[SEQID]]SEQ ID NO:−00105.

TABLE E9C
Nutritive polypeptides were purified by IMAC
chromatography at the 10 L column scale

| [[SEQID]]SEQ | | |
|---|---|---|
| ID NO: | Mass | Purity |
| 00105 | 179 g | 98% |
| 00105 | 265 g | 98% |
| 00105 | 131 g | 91% |
| 00105 | 147 g | 92% |
| 00105 | 164 g | 94% |
| 00105 | 148 g | 95% |
| 00105 | 229 g | 100% |
| 00105 | 228 g | 100% |
| 00338 | 137 g | 92% |
| 00338 | 196 g | 100% |
| 00338 | 169 g | 100% |

[0810] After IMAC purification at the 10 L column scale, nutritive polypeptides were filtered through a Sartopore II XLG 0.8/0.2 um filter and loaded directly into an ultrafiltration/diafiltration (UF/DF) unit operation. Membrane area and nominal molecular weight cutoff were chosen as appropriate for each nutritive polypeptide. Nutritive polypeptides were ultrafiltered at a cross flow of 12 L/m2/min and a TMP target of 25 psi. Nutritive polypeptides were concentrated approximately ten-fold on Hydrosart ultrafiltration cassettes (Sartorius Stedim, Bohemia, N.Y.), and diafiltered sequentially into four diavolumes of 10% phosphate buffered saline (PBS), pH 8.7; followed by two diavolumes of 25 mM tetrasodium ethylenediaminetetraacetic acid (Na4EDTA); followed by seven diavolumes of 10% PBS, pH 8.7. Intermediate diafiltration into Na4EDTA was performed in order to chelate any leached nickel(II) from the IMAC resin. Ultrafiltration permeate was discarded; the diafiltered, concentrated retentate was filtered through a 0.2 um membrane filter, and frozen at −80° C.

[0811] The ultrafiltration pool was filtered with a sterilizing-grade filter with the goal of bioburden reduction. The nutritive polypeptide was filtered into glass trays that were rinsed with ethanol. Filled glass trays were subsequently frozen at −80° C. The frozen material was then lyophilized to a dry cake using a Labconco lyophilization unit (Labconco, Kansas City, Mo.). The mass of the protein in the tray was monitored with time, until it plateaued, which was considered to be complete drying. The dried protein cake was sealed by the lid of the tray, and over-packaged by vacuum sealing in a plastic bag. The entire package was stored at −80° C.

[0812] Ion Exchange Chromatography. Selecting an appropriate method of purifying a nutritive polypeptide has implications for the speed of process development, cost of manufacture, final purity, and robustness of the purification. Nutritive polypeptides have been isolated by various chromatographic methods. The mode of chromatography selected for use depends on the physicochemical properties of the target nutritive polypeptide. Charged nutritive polypeptides bind to ion exchange chromatography resin through electrostatic interactions.

[0813] In the present application, we have defined two methods of screening a library of polypeptides to rank-order them for their ability to bind to ion exchange resins. One method is an in silico prediction based on calculation of protein net charge across a range of pH using the primary sequence of the polypeptides, as described herein. The second method is a multiplexed purification screen in vitro, as described herein. The two methods have successfully been used independently of each other, and they have been used together on the same set of 168 nutritive polypeptides with supportive data, as described herein.

[0814] The in silico method of predictive ranking for ion exchange purification is based on calculating net charge of a nutritive polypeptide at a range of pH based on the primary sequence. The primary sequence of a nutritive polypeptide is used to predict the mode of chromatography that is most likely to successfully isolate that nutritive polypeptide from host cell proteins and other impurities. Highly charged nutritive polypeptides are likely to bind tightly to ion exchange chromatography resin. The tightest binding is achieved for nutritive polypeptides which have one predominant charge, either positive or negative. It is possible for a nutritive polypeptide with a mixture of positive and negative charges to have tight binding to ion exchange resin, but it is also possible that those charges may work against each other. Similarly, a nutritive polypeptide with alternating positive and negative patches on its surface may not bind as tightly as one with a dominant portion of its surface that is one single charge. Similarly, a nutritive polypeptide that has a strongly positive or negative terminus, tail, tag, or linker sequence may effectively display that highly charged group allowing for extremely tight binding.

[0815] A prevalence of one or more certain amino acids, e.g., histidine, arginine, and lysine in a polypeptide imparts in that polypeptide, or a portion thereof, a positive charge when the pH of the protein solvent is below the pKa of the one or more amino acids. Polypeptide charge includes total protein charge, net charge, or the charge of a portion of the polypeptide. In embodiments wherein a polypeptide or portion thereof is positively charged, a cation exchange resin is used.

[0816] A prevalence of one or more certain amino acids, e.g., glutamic acid and aspartic acid in a polypeptide imparts in that polypeptide, or a portion thereof, a negative charge when the pH of the protein solvent is above the pKa of the one or more amino acids. Polypeptide charge includes total protein charge, net charge, or the charge of a portion of the polypeptide. In embodiments wherein a polypeptide or portion thereof is negatively charged, an anion exchange resin is used.

[0817] The net charge of a polypeptide changes as a function of the pH of the protein solvent. The number of positive charges and negative charges can be calculated at any pH based on the primary sequence of the polypeptide. The sum of the positive charges and negative charges at any one pH results in the calculated net charge. The isoelectric point (pI) of the polypeptide is the pH at which its calculated net charge is 0. To make comparisons, the net charge of a sequence is normalized by the number of amino acids in the sequence and the parameter “net charge per amino acid” results as the novel comparator between sequences, which is used to predict chromatographic performance.

[0818] Nutritive polypeptide sequences have been evaluated by calculating the net charge per amino acid of each polypeptide at every pH (1-14). Additionally, the pI of each polypeptide was calculated. Nutritive polypeptides were ranked by pI and by net charge per amino acid. Polypeptides with a low pI and very negative net charge per amino acid across a wide range of pH are predicted to bind to anion exchange chromatography resin with high affinity. Polypeptides with a high pI and very positive net charge per amino acid across a wide range of pH are predicted to bind to cation exchange chromatography resin with high affinity. In some embodiments herein, only a portion of the polypeptide is charged (as in a terminus, tail, tag, or linker), it is recognized that the pI and net polypeptide charge may be variable, and other factors or empirical measurements may be useful to predict the binding affinity of such a polypeptide to chromatography resins.

[0819] FIG. 2 demonstrates example nutritive polypeptides, which, based on primary sequence, are predicted to bind to either anion or cation exchange resin. Nutritive polypeptides with a pI of <4.0, and a net charge per amino acid that is negative across a broad range of pH are predicted to bind anion exchange resin with high affinity ((1) [[SEQID]]SEQ ID NO:−00105, (2) [[SEQID]]SEQ ID NO:−00008, (3) [[SEQID]]SEQ ID NO:−00009, (4) [[SEQID]]SEQ ID NO:−00475). Nutritive polypeptides with a pI of >10.0, and a net charge per amino acid that is positive across a broad range of pH are predicted to bind cation exchange resin with high affinity ((5) [[SEQID]]SEQ ID NO:−00472, (6) [[SEQID]]SEQ ID NO:−00640, (7) [[SEQID]]SEQ ID NO:−00019).

[0820] The primary sequence analyses presented herein indicate that [[SEQID]]SEQ ID NO:−00105 and [[SEQID]]SEQ ID NO:−00009 are likely to bind to anion exchange chromatography resin with high affinity, and that [[SEQID]]SEQ ID NO:−00640 is likely to bind to cation exchange chromatography resin with high affinity. These predictions were tested and demonstrated to be true, as demonstrated in the following four examples of polypeptide purification after microbial cell culture. In the first example, [[SEQID]]SEQ ID NO:−00009 was purified directly from lysed E. coli cells to 99% purity using anion exchange chromatography. In the second example, [[SEQID]]SEQ ID NO:−00105 was isolated from Bacillus subtilis supernatant by anion exchange chromatography. In the third example, [[SEQID]]SEQ ID NO:−00105 expressed intracellularly in E. coli was refined to 100% purity using anion exchange chromatography after it had been initially purified by IMAC chromatography. In the fourth example, [[SEQID]]SEQ ID NO:−00640 was isolated from Bacillus subtilis supernatant by cation exchange chromatography.

[0821] [[SEQID]]SEQ ID NO:−00009 was expressed intracellularly in E. coli, as described herein. The cells were suspended in solution and ruptured. Three solutions were tested (0.1 M Na2CO3 pH 11.4, 0.1 M tris HCl pH 4.1, and 0.1 M potassium phosphate pH 7.0). These lysed solutions were clarified by centrifugation and mixed with anion exchange resin for binding. Two resins were tested (Fractogel® EMD TMAE Hicap (M) from EMD and POROS® D 50 μm from Life Technologies). These six binding conditions were performed in batch mode and the resins were washed with the appropriate lysis buffer to remove any unbound protein. The maximally-bound damp resin was then transferred to smaller drip columns. Each drip column was then eluted with up to six sequential washes of increasing NaCl concentration (each NaCl wash solution was buffered with the appropriate lysis buffer). [[SEQID]]SEQ ID NO:−00009 was eluted in these fractions, collected, and analyzed by chip electrophoresis, as described herein. [[SEQID]]SEQ ID NO:−00009 was identified as an eluting band at the expected molecular weight. In every case, [[SEQID]]SEQ ID NO:−00009 eluted from the drip column at a purity higher than the load purity. This observation indicates that [[SEQID]]SEQ ID NO:−00009 did bind to the anion exchange resins, as predicted, and that purification was achieved. The maximum purity achieved was 99%. In every case, [[SEQID]]SEQ ID NO:−00009 was among the last proteins to elute from the resin indicating that the binding affinity of [[SEQID]]SEQ ID NO:−00009 to two resins at a range of pH is generally higher than the binding affinity of any host cell protein from E. coli.

[0822] Microbial cell culture of Bacillus subtilis was performed as described herein expressing and secreting [[SEQID]]SEQ ID NO:−00105 into the fermentation media. The cells were removed by centrifugation, and the supernatant was further clarified by membrane filtration. The clarified supernatant was concentrated by ultrafiltration to decrease load time on the anion exchange column and the solution was exchanged into a low salt solution buffered at pH 6.0. This solution was passed over a chromatography column (1 cm diameter, 20 cm height) containing POROS® XQ Strong Anion Exchange Resin from Life Technologies. The unbound proteins were rinsed from the resin with 20 mM Bistris, pH 6.3. The bound proteins were then eluted using a 30 column volume gradient to 400 mM NaCl, 20 mM Bistris, pH 6.3. The column effluent was collected in sequential fractions and analyzed by chip electrophoresis, as described herein. [[SEQID]]SEQ ID NO:−00105 was identified as an eluting band at the expected molecular weight. The maximum purity achieved in one fraction was 100%.

[0823] [[SEQID]]SEQ ID NO:−00105 was expressed intracellularly in E. coli, as described herein. The cells were ruptured, and the [[SEQID]]SEQ ID NO:−00105 was purified by IMAC chromatography, according to the procedure described herein. The IMAC elution pool was further refined to 100% purity using anion exchange chromatography. The IMAC elution pool was concentrated and then diluted into 50 mM tris pH 8.0. This solution was then passed through a column (1.6 cm diameter, 20 cm height) packed with anion exchange resin: Fractogel® EMD TMAE Hicap (M) from EMD. The bound protein was rinsed with equilibration solution, and then eluted with 350 mM NaCl 50 mM tris pH 8.0. This procedure was repeated multiple times, and all samples were analyzed by chip electrophoresis, as described herein. The elution samples ranged from 79% to 99% pure.

[0824] Microbial cell culture of Bacillus subtilis was performed as described herein expressing and secreting [[SEQID]]SEQ ID NO:−00640 into the fermentation media. The cells were removed by centrifugation, and the supernatant was further clarified by membrane filtration. The clarified supernatant was diluted 1:2 with deionized water and titrated to pH 5 with 1 M acetic acid. The resulting solution was membrane filtered prior to loading onto a cation exchange column (1.2 cm diameter 10 cm height) packed with POROS® XS Strong Cation Exchange Resin from Life Technologies. The bound resin was flushed with a 50 mM Acetate, 50 mM NaCl, pH 5.0 solution. The protein was then eluted with a 20 CV gradient to 1.05 M NaCl pH 5.0. Elution fractions were collected and analyzed by SDS-PAGE, Coomassie Blue Stain. The peak sample demonstrated 100% purity and no impurities eluted later in the gradient, indicating that the [[SEQID]]SEQ ID NO:−00640 polypeptide bound to the cation exchange resin with more affinity than any host cell proteins.

[0825] Purification by Precipitation. Protein precipitation is a well-known method for purification of polypeptides (Scopes R. 1987. Protein Purification: Principles and Practice. New York: Springer). Many polypeptides precipitate as salt concentrations increase, a phenomenon known as salting out. Salt types have been ranked and organized on the Hofmeister series for their different abilities to salt out proteins (F. Hofmeister Arch. Exp. Pathol. Pharmacol. 24, (1888) 247-260.). Proteins also have different propensity to precipitate due to high salt concentration based on their physicochemical properties, however, a universal metric to rank proteins for this characteristic has not been established. The use of such a ranking metric to select nutritive polypeptides for their ability to be purified has implications for the speed of process development, cost of manufacture, final purity, and robustness of the purification.

[0826] In most industrial applications of purification by polypeptides precipitation, the polypeptide of interest is selectively precipitated, and the impurities are then rinsed away from the solid precipitate. In certain embodiments, polypeptides do not precipitate with high levels of salt, and purification is achieved by precipitating the impurities. In the present application, we have defined two methods of screening a library of polypeptides to rank-order them for their ability to remain soluble through harsh precipitation conditions. One method is an in silico prediction based on calculation of protein total charge across a range of pH using the primary sequence of the polypeptides, as described herein. The second method is a multiplexed purification screen in vitro, as described herein. The two methods have successfully been used independently of each other, and they have been used together on the same set of 168 nutritive polypeptides with supportive data, as described herein.

[0827] The solubility of a polypeptide correlates directly with the abundance of surface charges (Jim Kling, Highly Concentrated Protein Formulations: Finding Solutions for the Next Generation of Parenteral Biologics, BioProcess International, 2014.). It has been established that surface charges can impart physical characteristics to a polypeptide (Lawrence, M. S., Phillips, K. J., & Liu, D. R. (2007). Supercharging proteins can impart unusual resilience. Journal of the American Chemical Society, 129(33), 10110-2. doi:10.1021/ja071641y).

[0828] The in silico method of predictive solubility ranking is based on calculating total number of charges of a nutritive polypeptide at a range of pH based on the primary sequence.

[0829] A prevalence of one or more certain amino acids, e.g., histidine, arginine, and lysine in a polypeptide imparts in that polypeptide, or a portion thereof, a positive charge when the pH of the protein solvent is below the pKa of the one or more amino acids. A prevalence of one or more certain amino acids, e.g., glutamic acid and aspartic acid in a polypeptide imparts in that polypeptide, or a portion thereof, a negative charge when the pH of the protein solvent is above the pKa of the one or more amino acids.

[0830] The total number of charges of a polypeptide changes as a function of the pH of the protein solvent. The number of positive charges and negative charges can be calculated at any pH based on the primary sequence of the polypeptide, as described herein. The sum of the positive charges and negative charges at any one pH results in the calculated net charge. The isoelectric point (pI) of the polypeptide is the pH at which its calculated net charge is 0. To make comparisons across nutritive polypeptides, the total number of positive charges is added to the total number of negative charges (the absolute value), and that total charge is normalized by the number of amino acids in the sequence, and the parameter “total charge per amino acid” results as the novel comparator between sequences, which is used to predict the polypeptide's resistance to precipitation. The more resistant a polypeptide is, the higher the likelihood that it can be purified to a high degree by precipitating out the impurities. Unlike predicting chromatographic performance, solubility is not affected by the polarity of the charges. While it is often true that a polypeptide experiences its lowest solubility at the pI of the sequence, some polypeptides have a high total charge and are still extremely soluble at their pI, as shown herein.

[0831] Nutritive polypeptide sequences have been evaluated by calculating the total charge per amino acid of each polypeptide at a range of pH (1-14). Nutritive polypeptides were ranked by total charge per amino acid. Polypeptides with a low pI and very negative net charge per amino acid across a wide range of pH and polypeptides with a high pI and very positive net charge per amino acid across a wide range of pH are all expected to score equally well by this ranking. Polypeptides with a large number of both charges score the best.

[0832] FIG. 3 demonstrates example nutritive polypeptides, which, based on primary sequence, are predicted to have extremely high solubility. This set includes polypeptides with a low pI (<4) and very negative net charge per amino acid across a wide range ((1)[[SEQID]]SEQ ID NO:−00475, (2) [[SEQID]]SEQ ID NO:−00009). This set includes polypeptides with a high pI (>10) and very positive net charge per amino acid across a wide range of pH ((4) [[SEQID]]SEQ ID NO:−00433, (5) [[SEQID]]SEQ ID NO:−00472). This set includes polypeptides with more neutral pI ((3) [[SEQID]]SEQ ID NO:−00478). Many of the polypeptides displayed here show high charge even at extreme pH values, such as <4 and >12. The entire set is expected to be extremely soluble and resist precipitation across a wide range of pH.

[0833] In this demonstration, the E. coli cells were harvested from shake flask fermentation by centrifugation, and the whole cells were distributed into tubes (1 gram of cells per tube). To each tube, 4 mL of lysis solution was added, and cells were lysed by sonication at 75 Amps for 30 seconds. Lysis solutions included: Water, 8 M Urea 0.1 M Tris 0.1M NaCl, 0.1 M Acetate 10% gly 0.1% TWEEN®-80 detergent 0.3 M Arg 0.3M NaCl 10 mM EDTA, 10 mM Imidazole pH 5.0, 0.1 M Acetate 10% gly 0.1% TWEEN®-80 detergent 0.3 M Arg 0.3M NaCl 10 mM EDTA, 10 mM Imidazole pH 7.0, 100 NaCl 100 Hepes 10 Imidazole pH 7.5, 500 NaCl 100 Hepes 10 Imidazole pH 7.5, 100 mM Phos, 150 mM NaCl, 10 mM Imidazole pH 7.5, 0.1 M NaCl 0.1 M Hepes 10 mM Imidazole 50 mM CaCl2 PH 7.5, 0.1 M Hepes 3.5 M Am Sulfate pH 7.5, 0.1 M Hepes 2 M Am. Sulfate pH 7.5, 0.1 M Tris, 0.1 M Tris 0.5 M NaCl, 150 mM NaCl 10 mM Acetate 15 mM Imidazole pH 6.04, and 500 mM NaCl 100 mM Acetate 15 mM Imidazole pH 6.04. The lysate was clarified by centrifugation and 0.2 um filtration. The clarified supernatant was analyzed by SDS-PAGE (blue stain), as described herein.[[SEQID]]SEQ ID NO:−00009 demonstrated solubility in each of these conditions. E. coli host cell proteins generally demonstrated solubility in these conditions as well, with one exception. In the presence of 3.5 M ammonium sulfate effectively precipitated the majority of the host cell proteins resulting in 85% purified [[SEQID]]SEQ ID NO:−00009 after the cell harvest stage of the process. This result indicates that [[SEQID]]SEQ ID NO:−00009 is more soluble than most E. coli host cell proteins and that precipitation can be used as part of a low cost method for isolation. This correlates with the high total charge of [[SEQID]]SEQ ID NO:−00009 and supports that the prediction is accurate. Furthermore, it is predicted that polypeptides with more charge than [[SEQID]]SEQ ID NO:−00009 would be even more soluble which could have the benefit over [[SEQID]]SEQ ID NO:−00009 of higher polypeptide yield.

[0834] In subsequent experiments, [[SEQID]]SEQ ID NO:−00009 was purified to 99% purity with a single stage of ammonium sulfate precipitation. In this demonstration, the E. coli cells were harvested from shake flask fermentation by centrifugation, and the whole cells were suspended in 0.1 M sodium carbonate, pH 10 (1 gram of cells in 4 mL of solution). The cells were lysed by sonication (80 Amp for 2 minutes). The lysate was clarified by centrifugation and 0.2 μm membrane filtration. The clarified supernatant was divided into a series of 3 mL fractions, to which a stock solution of 4 M ammonium sulfate, pH 9.8 was added. Variable amounts of stock solution were added to achieve a range of ammonium sulfate concentrations. The samples were mixed for 10 minutes at room temperature, and clarified by centrifugation and 0.2 um membrane filtration. The clarified supernatants were analyzed by SDS-PAGE (blue stain), as described herein. FIG. 4 shows the purity of [[SEQID]]SEQ ID NO:−00009 is as a function of ammonium sulfate concentration.

[0835] Multiplexed Purification: Ion Exchange Chromatography. In some cases, an entire library of proteins is tested in a multiplexed screening experimental platform. 168 nutritive polypeptides were transfected and expressed in a multiplexed expression system in which a single growth condition was used to produce each polypeptide in a single container. This multiplexed expression system allows any set of polypeptide sequences to be tested in parallel for a wide range of manufacturability parameters, each of which can be used to rank order the set of polypeptides being examined. A set of manufacturability parameters includes expression level, polypeptide solubility, ability of polypeptide to be purified by chromatography, ability to resist thermal denaturation, ability of polypeptide to digest, ability of polypeptide to be purified by resisting harsh treatments.

[0836] The set of 168 nutritive polypeptides was tested for intracellular expression in E. coli. The solubly expressed polypeptides were pre-treated as a group and then subjected to a series of purification conditions so that the set could be rank ordered in terms of their ease of purification by multiple methodologies. As described herein, it is expected that the same subset of proteins will be identified from each expression system to bind a particular mode of chromatography based on the primary sequence analysis, specifically net charge per amino acid.

[0837] For E. coli multiplexed purification, the set of nutritive polypeptide sequences was HIS8 tagged (SEQ ID NO: 3919). The cells were cultured, as described herein, ruptured, and the solution was clarified, as described herein. This production resulted in a solution containing all of the polypeptides from the set which were both expressed and soluble. That set of soluble polypeptides was passed over an 5 ml IMAC column, and eluted, as described herein. This IMAC purification effectively isolated the solubly expressed nutritive polypeptides as a set by removing the majority of E. coli host cell proteins. The elution fraction was concentrated and buffer exchanged into a low salt solution buffered near neutral pH before testing various purification methods. The methods tested include anion exchange chromatography, cation exchange chromatography, and negative precipitation, in which the impurities precipitate and the polypeptides that remain soluble rank the highest. In this case, impurities have been removed, so the polypeptides are rank ordered amongst themselves. Additionally, the set of proteins was tested for thermal stability, by heating, wherein the polypeptides which remain soluble after heating are more thermal stable than those which precipitate.

[0838] This mixture of polypeptides was rank ordered for their ability to bind anion exchange and cation exchange chromatography resins. Four chromatography resins were tested. Two anion exchange resins: Capto™ DEAE, from GE Lifesciences and Eshmuno® Q Resin from EMD. Two cation exchange resins: POROS® XS Strong Cation Exchange Resin from Life Technologies and Eshmuno® S Resin from EMD. Each resin was tested with eight different buffering conditions, as follows. Buffers used for anion exchange: Water (no buffer), pH 7; 15 mM Na2HPO4, pH 8.7; 30 mM Na2HPO4, pH 9.0; 15 mM Tris Base, pH 9.6; 30 mM Tris Base, pH 10.0; 30 mM Na2CO3, pH 11.2; 25 mM Arginine, pH 10.1. Buffers used for cation exchange: Water (no buffer), pH 7; 15 mM KH2PO4, pH 4.2; 30 mM KH2PO4, pH 4.5; 15 mM Tris Acid, pH 4.9; 30 mM Tris Acid, pH 4.7; 15 mM MES Acid, pH 3.9; 25 mM MES Acid, pH 4.1.

[0839] The resins were distributed to a 96 well filterplate (20 uL of resin per well) and each was equilibrated three times. The protein set was mixed with the equilibration buffers and allowed to bind to the resins. The unbound proteins in solution were separated from the resin by centrifuging the liquid through the filterplate for collection in a 96 well plate below. The remaining unbound proteins were further rinsed off the resin with a wash of equilibration buffer. The bound proteins were then sequentially eluted with three stages of increasing salt concentration (50, 250, 1500 mM NaCl buffered in the appropriate set of buffers above). The loosely bound proteins were removed first, and the proteins that were removed in the final elution condition were very tightly bound to the resin. Thus, a library of 168 proteins was expressed in E. coli and rank ordered for their binding affinity to anion exchange and cation exchange chromatography resin.

[0840] The experiment described herein produced 160 samples (four resins, eight buffers, five collections). The five collection stages include: the flow through fraction, the wash fraction, the 50 mM NaCl elution, the 250 mM NaCl elution, and the 1500 mM NaCl elution. All 160 samples were analyzed by UV-vis absorbance at 280 nm, by Bradford total protein assay, by Chip electrophoresis, and select samples were analyzed by LC/MS/MS. All analytical assays are described herein.

[0841] The assays demonstrated that some protein flowed through the resin and was not bound. In most cases, the wash fraction did not elute a significant amount of protein, indicating that any further protein to elute was in fact bound to the resin. As the NaCl concentration increased, the total protein being removed also increased demonstrating successful binding and elution in nearly every condition. The proteins detected by electrophoresis in 1500 mM NaCl elution conditions remained bound through the 250 mM NaCl wash condition, indicating strong binding. Select conditions were selected for LC/MS/MS analysis. The LC/MS/MS analysis was performed with the 1500 mM NaCl elution sample from anion exchange chromatography resin (Capto™ DEAE) in the 30 mM Tris Base buffering condition. The LC/MS/MS results were searched against the sequences of all 168 nutritive polypeptides originally expressed in the library. Eight unique polypeptides were identified as having high binding affinity to this anion exchange resin in this condition are [[SEQID]]SEQ ID NO:−00341, [[SEQID]]SEQ ID NO:−00346, [[SEQID]]SEQ ID NO:−00497, [[SEQID]]SEQ ID NO:−00525, [[SEQID]]SEQ ID NO:−00555, [[SEQID]]SEQ ID NO:−00605, [[SEQID]]SEQ ID NO:−00606, [[SEQID]]SEQ ID NO:−00610. For each polypeptide sequence in this set, the net charge per amino acid was calculated based on primary sequence across the range of pH tested. As described herein, it is expected that polypeptides which bind tightly to anion exchange resins have a net charge per amino acid below 0 across the pH range, and this is demonstrated to be true, with a single exception. Any exception is expected to be due to the fact that there is charge heterogeneity across the length of the sequence, and as described, net charge per amino acid does not always capture that. This multiplexed screen identified a set of polypeptides from a larger library based on their affinity to bind anion exchange resin, and this result can be predicted based on the primary sequence analysis, as described herein.

[0842] The LC/MS/MS analysis was performed with the 1500 mM NaCl elution sample from cation exchange chromatography resin (Poros™ XS) in the 15 mM Tris Acid buffering condition. The LC/MS/MS results were searched against the sequences of all 168 nutritive polypeptides originally expressed in the library. Eight unique polypeptides were identified as having high binding affinity to this cation exchange resin in this condition are [[SEQID]]SEQ ID NO:−00302, [[SEQID]]SEQ ID NO:−495, [[SEQID]]SEQ ID NO:−00522, [[SEQID]]SEQ ID NO:−00537, [[SEQID]]SEQ ID NO:−00546, [[SEQID]]SEQ ID NO:−00547, [[SEQID]]SEQ ID NO:−00560, [[SEQID]]SEQ ID NO:−00598. For each polypeptide sequence in this set, the net charge per amino acid was calculated based on primary sequence across the range of pH tested. As described herein, it is expected that polypeptides which bind tightly to cation exchange resins have a net charge per amino acid above 0 across the pH range, and this is demonstrated to be true, with minor exception. Any exception is expected to be due to the fact that there is charge heterogeneity across the length of the sequence, and as described, net charge per amino acid does not always capture that. This multiplexed screen identified a set of polypeptides from a larger library based on their affinity to bind cation exchange resin, and this result can be predicted based on the primary sequence analysis, as described herein.

[0843] In the Bacillus subtilis example of multiplexed purification, the set of polypeptide sequences was expressed without any type of purification tag. The cells were cultured in flasks, as described herein and expressed and secreted the polypeptides into the growth media. The cells were removed by centrifugation and the solution was further clarified by membrane filtration, as described herein. This production process resulted in a solution containing all of the polypeptides from the set which were both expressed and solubly secreted. That set of soluble polypeptides was concentrated and buffer exchanged into a solution of phosphate, pH 7.0 before testing various purification methods. The methods tested include anion exchange chromatography, cation exchange chromatography, and negative precipitation, in which the impurities precipitate and the polypeptides that remain soluble rank the highest. In these multiplexed purification studies, the polypeptides are purified away from each other and from the host cell proteins in order to be rank ordered amongst themselves.

[0844] This mixture of polypeptides was rank ordered for their ability to bind to anion exchange and cation exchange chromatography resins. Four chromatography resins were tested. Two anion exchange resins: Capto™ DEAE, from GE Lifesciences and Eshmuno® Q Resin from EMD. Two cation exchange resins: POROS® XS Strong Cation Exchange Resin from Life Technologies and Eshmuno® S Resin from EMD. Each resin was tested with eight different buffering conditions. Buffers used for Anion Exchange: 18 mM BIS-TRIS, pH 6.5; 13 mM HEPES, pH 7.0; 18 mM HEPES, pH 7.5; 16 mM TRIS, pH 8.0; 32 mM TRIS, pH 8.5; 88 mM TRIS, pH 9.0; 13 mM Na2CO3, pH 9.5; 20 mM Na2CO3, pH 10.0. Buffers used for Cation Exchange: 19 mM Citrate, pH 3.0; 13 mM Citrate, pH 3.5; 49 mM Acetate, pH 4.0; 22 mM Acetate, pH 4.5; 14 mM Acetate, pH 5.0; 10 mM Acetate, pH 5.5; 24 mM MES, pH 6.0; 15 mM MES, pH 6.5.

[0845] The resins were distributed to a 96 well filterplate (50 μL of resin per well) and each was equilibrated three times. The protein set was mixed with the equilibration buffers and allowed to bind to the resins. The unbound proteins in solution were separated from the resin by centrifuging the liquid through the filterplate for collection in a 96 well plate below. The remaining unbound proteins were further rinsed off the resin with two wash cycles of equilibration buffer. The bound proteins were then sequentially eluted with increasing salt concentration (250, 500, 1000 mM, 2000 mM NaCl). Each salt solution was buffered in the appropriate equilibration buffer except for the 2000 mM NaCl solution which was buffered with MES at pH 6.0 for anion exchange resins and with TRIS at pH 8.0 for cation exchange resins. The loosely bound proteins were removed first, and the proteins that were removed in the final elution condition were very tightly bound to the resin. Thus, the library of proteins was expressed in Bacillus subtilis and rank ordered for their binding affinity to anion exchange and cation exchange chromatography resin.

[0846] The experiment described herein produced 192 samples (four resins, eight buffers, six collections). The six collection stages include: the flow through fraction, the wash fraction, the 250 mM NaCl elution, the 500 mM NaCl elution, the 1000 mM NaCl elution, and the 2000 mM NaCl elution. All 192 samples were analyzed by Chip electrophoresis. Select samples were analyzed by SDS-PAGE. Select samples were analyzed by LC/MS/MS. All analytical assays are described herein. Identification of strongly bound proteins is performed by a combination of Chip electrophoresis, SDS-PAGE, and LC/MS/MS.

[0847] SDS-PAGE results demonstrate that the majority of polypeptides do not bind to these resins, in fact they are found in the flow through fraction. Therefore, the polypeptides that bind to the resins are unique in their ability to be purified from the majority of other polypeptides. The set of polypeptides in the various elution fractions have been isolated from a larger set based on their properties in a purification process, which has implications for the manufacture, cost, development time, and eventual purity of these polypeptides. Furthermore, of the polypeptides that bind to resins, these can be rank ordered by their ability to remain bound to the resin through stringent wash conditions with increasing concentrations of NaCl. Those polypeptides found in the 2000 mM NaCl samples have been able to remain bound through 1000 mM NaCl wash conditions. It is widely accepted that any polypeptide which can remain bound to an ion exchange resin above 500 mM NaCl is considered to have very high affinity for that resin. The banding pattern is similar between the two cation exchange resins supporting that the proposed mechanism. Likewise, the banding pattern is similar between the two anion exchange resins, and represents a different sample set than those identified by cation exchange. To rank order the individual polypeptides identified in any subset, LC/MS/MS is utilized.

[0848] As an exemplary dataset, the LC/MS/MS results identified the following polypeptides as binding to the Capto DEAE anion exchange resin at pH 7.5: P39645, P37869, P80698, P80868, P21880, P80239, P50849, P12425, O34669, P39138, P37871, P19669, P29727, P80643, O34981, P80879, P54716, P37477. As an exemplary dataset, the LC/MS/MS results identified the following polypeptides as binding to the Poros XS cation exchange resin at pH 4.0: O34669, P19405, O31803, O05411, O31973, O31643, P80239, P26901, P08821, P80240, P49814, O34310, P0CI78, O31925, P71014, P42111.

[0849] These polypeptides identified as having high binding affinity were analyzed for physicochemical properties based on their primary sequence. The net charge per amino acid was calculated based on primary sequence across the range of pH tested. As described herein, it is expected that polypeptides which bind tightly to anion exchange resins have a net charge per amino acid below 0 across the pH range, and this was generally demonstrated to be true. As described herein, it is expected that polypeptides which bind tightly to cation exchange resins have a net charge per amino acid above 0 across the pH range, and this was generally demonstrated to be true. Any exception is expected to be due to the fact that there is charge heterogeneity across the length of the sequence, and as described, net charge per amino acid does not always capture that. This multiplexed screen identified a set of polypeptides from a larger library based on their affinity to bind anion exchange resin, and this result can be predicted based on the primary sequence analysis, as described herein.

[0850] In the Bacillus subtilis example of multiplexed purification, the set of 168 nutritive polypeptide sequences was expressed without any type of purification tag. The cells were cultured in flasks, as described herein and expressed and secreted the polypeptides into the growth media. The methods tested included negative flocculation/precipitation, in which the impurities precipitate and the polypeptides that remain soluble rank the highest. In these multiplexed purification studies, impurities are present in the form of soluble impurities (e.g. host cell proteins, DNA, phospholipids, and product-related impurities, such as isoforms or aggregated species), insoluble impurities, cells, or cellular debris (e.g. membrane fragments). Negative precipitation was performed prior to and following removal of insoluble impurities, cells, and cellular debris centrifugation and further clarification by membrane filtration.

[0851] The set of solubly expressed and secreted polypeptides in the cell suspension (prior to centrifugation and membrane filtration) and clarified supernatant (following centrifugation and membrane filtration) were rank ordered for their ability to associate with the flocculating agents. Furthermore, the flocculating agents were rank ordered for their ability to associate with the impurities. 48 flocculating agents were tested at two different concentrations, as follows: Ammonium Bicarbonate (100 mM, 200 mM); Manganese Chloride (100 mM, 200 mM); Nickel Sulfate (100 mM, 200 mM); Sodium Citrate(100 mM, 200 mM); Lithium Acetate (100 mM, 200 mM); Propylene Glycol (10% v/v, 20% v/v); Ammonium Nitrate (100 mM, 200 mM); Potassium Chloride (100 mM, 200 mM); Sodium Sulfate (100 mM, 200 mM); Sodium Molybdate (100 mM, 200 mM); Acetic Acid (100 mM, 200 mM); Chitosan MMW (0.1% w/v, 0.2% w/v); Ammonium Sulfate (100 mM, 200 mM); Sodium Chloride (0.5M, 1.0M); Zinc Sulfate (100 mM, 200 mM); Sodium Nitrate (100 mM, 200 mM); Citric Acid (100 mM, 200 mM); Guanidine HCl (0.6M, 1.2M); Ammonium Chloride (100 mM, 200 mM); Zinc Chloride (100 mM, 200 mM); Potassium Carbonate (100 mM, 200 mM); Sodium Phosphate (100 mM, 200 mM); Hydrochloric Acid (100 mM, 200 mM); PEG 1000 (5% w/v, 10% w/v); Calcium Chloride (100 mM, 200 mM); Iron Citrate (100 mM, 200 mM); Potassium Nitrate (100 mM, 200 mM); Sodium Propionate (100 mM, 200 mM); Potassium Hydroxide (100 mM, 200 mM); PEG 4000 (5% w/v, 10% w/v); Choline Chloride (100 mM, 200 mM); Copper Sulfate (100 mM, 200 mM); Potassium Phosphate (100 mM, 200 mM); Sodium Succinate (100 mM, 200 mM); Sodium Hydroxide (100 mM, 200 mM); Triton X-100 (0.5% w/v, 1.0% w/v); Iron Chloride (100 mM, 200 mM); Iron Sulfate (100 mM, 200 mM); Deoxycholic Acid (0.5% w/v, 1.0% w/v); Sodium Thiocyanate (100 mM, 200 mM); Ethanol (10% v/v, 20% v/v); TWEEN® 80 detergent (0.5% w/v, 1.0% w/v); Magnesium Chloride (100 mM, 200 mM); Magnesium Sulfate (100 mM, 200 mM); Sodium Carbonate (100 mM, 200 mM); Sodium Thiosulfate (100 mM, 200 mM); Isopropanol (10% v/v, 20% v/v); Urea (0.8M, 1.6M).

[0852] The cell suspension (prior to centrifugation and membrane filtration) and clarified supernatant (following centrifugation and membrane filtration) were distributed into a 96-well filter plate (300 μL per well for the low flocculating agent concentration and 267 μL for the high flocculating agent concentration). These loads were diluted 0.1× or 0.2× by adding 33 μL or 67 μL, respectively, of concentrated flocculating agent solutions. The resulting solution was mixed for 1 hour at room temperature. Following mixing, the remaining soluble material was separated from the insoluble material by centrifuging the liquid through the filterplate for collection in a 96 well plate below. All 192 samples were analyzed by Chip electrophoresis. Select samples were analyzed by SDS-PAGE. Select samples were analyzed by LC/MS/MS. All analytical assays are described herein.

[0853] SDS-PAGE results demonstrated that some conditions effectively precipitated many polypeptides, indicating that the soluble polypeptides in those conditions were rather soluble, and can be isolated in these conditions. The polypeptides that were soluble in the various precipitation conditions were isolated from a larger set based on their properties in a purification process, which has implications for the manufacture, cost, development time, and eventual purity of these polypeptides. Some polypeptides are widely soluble across a range of conditions due to their high charge, according the mechanism described herein. To rank order the individual polypeptides identified in any subset, LC/MS/MS is utilized.

[0854] As an exemplary dataset, the LC/MS/MS results demonstrated that the following polypeptides were isolated due to their sustained solubility in 100 mM Acetic Acid, pH 5.18: O34669, P54423, P21879, P10475, P28598, O31803, P40767, P17889, O34918, Q08352, P24327, P37871, O31973, P81101, P50849, P26901, P80700, O34385, P70960, P42111, P21880, P27876, P80868, P54716, O34313, O07603, O05411, P54531, O05497, P12425, O07921, P19405, Q06797, P02394, P24141, P09339, P37965, P07343, P37809, P0CI78, P39824, P49814, P39632, P39773, P51777, P21883, O06989, P25152, P70961, O07593, O34310, P80860, P37437, P80698, P13243, P38494, P39645, P39148, O31398, P08821, P08877, O05268, P04957, P28366, P31103, P94421, P14949, P80864, P37869, P80240, P80859, O06993, O34666, O34714, P37546, Q9KWU4, O31605, P16616, P80239, O34788, P71014, P37571, P09124, P42971, O31925, P39793, P17865, P16263, P18429, P05653, P26908, P33166, O34499, P08750, P54602, Q45071, P12047, P42919, O34334, O34358, P39120, P39126, P00691, P14192, P22250, P37870, P39116, P54484, P54488, P54547, P56849, O31579, O34629, P30949, P54422, P54530, P54542, P96739.

[0855] As an exemplary dataset, the LC/MS/MS results demonstrated that the following polypeptides were isolated due to their sustained solubility in 100 mM Potassium Carbonate, pH 9.66: O34669, P54423, P21879, P24327, P40767, P17889, O31973, P10475, P28598, P80700, P37871, P80868, O31803, P81101, P70960, P27876, P19405, P28366, P71014, P26901, O34385, P21880, Q06797, P24141, P07343, P80698, P13243, P42971, P39793, O31643, P39071, O32210, P21468, P42199, P54531, P37965, P37809, P21883, P38494, P39148, P08877, P09124, P17865, P16263, P54602, P46906, O34918, Q08352, P42111, O05411, O05497, O07921, P02394, P09339, P49814, P39632, P37437, P39645, P08821, P04957, P31103, Q9KWU4, P80239, O34788, P18429, P05653, P26908, O34499, P08750, P12047, P37870, P54547, Q06796, Q45477, P25144, P46898, P40871, O31501, P21464, P21465, P40409.

[0856] As an exemplary dataset, the LC/MS/MS results demonstrated that the following polypeptides were isolated due to their sustained solubility in 100 mM Calcium Chloride, pH 7.50: O34669, P54423, P21879, O34918, O31803, P10475, P28598, P24327, P40767, P80700, P27876, P37871, O34385, P13243, Q08352, O07921, P17889, O31973, P80868, P26901, P24141, P80698, P02394, Q06797, P39148, P19405, P54531, P37965, P09339, P39645, O34788, P37571, O07909, P70960, P21880, P42971, P37809, P80239, Q45477, P94421, P81101, P07343, P39793, P39071, P38494, P17865, P42111, P12425, P39773, O06989, P80864, O05411, O05497, P25144, P0CI78, P39824, P25152, P70961, O31398, O05268, P37869, P80859, O32150, P39138, O31643, P21468, P42199, P21883, P09124, P49814, P05653, Q06796, 034313, P51777, O34310, O06993, O34666, O31925, P33166, P39634, P37808, P39779, P28366, P08877, P16263, P39632, P08821, P04957, O34499, P08750, P46898, P50849, P54716, P80860, P14949, P80240, Q45071, O34334, O34358, P39120, P39126, P20278, P53001, P54375, O06006, O06988, O34667, O34981, P08164, P19669, P30950, P37487, P45694, P81102, P71014, P54602, P46906, P31103, P18429, P26908, P12047, P40871, O07603, O34714, P37546, P42919, P00691, P22250, P39116, P54488, P40924, C0SP93, O31760, O32023, O32106, O32167, O34962, P12048, P25995, P28015, P28599, P34957, P35137, P37253, P37477, P37812, P37940, P46354, P49778, P54169, P54418, P54550, P54941, P80885, P94576, Q04796, Q06004, Q07868, Q9R9I1.

[0857] As an exemplary dataset, the LC/MS/MS results demonstrated that the following polypeptides were isolated due to their sustained solubility in 100 mM Iron Chloride, pH 4.54: P26901, O34669, O34918, P54423, O31803, P96657, O31973, P37871, O07921, O31643, Q06796, P17889, P80698, P80239, O05411, O07909, O31925, P20278, P71014, P21879, P10475, P80700, P27876, Q08352, P81101, P42111, P0CI78, P39824, O32210, P28598, P24327, O34385, Q06797, P19405, P37571, P38494, O31398, P09124, P51777, P08821, P18429, O07593, P80868, P09339, P39645, O34788, O05268, P49814, P08877, P39632, P04957, P14949, P31103, O06746, O07555, P40767, P02394, P54531, P37965, P70960, P37809, P07343, P39773, P33166, P39634, P16263, P46898, P50849, P54716, P80240, Q45071, P53001, P54375, P26908, P42919, P40924, P14192, P54484, P56849, 006748, P12878, P21477, P32081, P46899, P50620, P54464.

[0858] These polypeptides identified as having high solubility were analyzed for physicochemical properties based on their primary sequence. The total charge per amino acid was calculated based on primary sequence across the range of pH tested. As described herein, it is expected that the most soluble polypeptides have a high total charge per amino acid, and this was generally demonstrated to be true. This multiplexed screen identified a set of polypeptides from a larger library based on their affinity to bind anion exchange resin, and this result can be predicted based on the primary sequence analysis, as described herein.

[0859] Multiplexed Purification: Precipitation & Flocculation. Conventional biopharmaceutical protein purification methods used to remove cells and cellular debris include centrifugation, microfiltration, and depth filters. Filter aids, such as diatomaceous earth, can be used to enhance performance of these steps, but they are not always effective and sometimes significantly bind the product of interest. Their use may also require the addition of a solid or a homogeneous suspension that can be challenging as part of large-scale biopharmaceutical operations.

[0860] Polymeric flocculants can be used to aid in the clarification of mammalian cell culture process streams, but they can have limitations. For example, protamine sulfate preparations typically used as processing aids are limited in application due to concerns about inactivation of the protein of interest or product loss due to precipitation (Scopes, Protein Purification Principles and Practice 3rd edition, Cantor eds. 22-43; 171 (1994)).

[0861] High quality reagents, such as that sold for medical use, can be expensive. In certain instances, removal to very low levels be required to ensure there are no adverse effects in patients. For example, chitosan is not a well-defined reagent and there are concerns about its consistent performance in routine use in clarification applications. Multiple charged polymers, such as DEAE dextran, acrylamide-based polymers often used in waste-water treatment (NALCO Water Handbook, Section 2.1: Applications Impurity Removal, 3rd ed., McGraw-Hill, 2009) and polyethylene amine (PEI) have been considered for use in clarification applications. With respect to the latter two types of polymers, the acrylamide reagents have the potential for contamination with toxic reagents and polyethylene amine, while a highly effective clarification reagent, is often contaminated with varying amounts of ethylenimine monomer, a suspected cancer agent (Scawen et al., Handbook of Enzyme Biotechnology 2nd edition, Wiseman eds.: 15-53 (1985)). Moreover, many of these polymers, including PEI, tend to bind almost irreversibly to many chromatography resins, thereby limiting downstream processing options. The regulatory and raw material reuse concerns associated with these polymers have limited their application primarily to academic studies.

[0862] Non-polymer based flocculants, such as alum and iron salts, have been utilized in the wastewater treatment industry (NALCO Water Handbook, Section 2.1: Applications—Impurity Removal, 3rd ed., McGraw-Hill, 2009). These substances may appear to be non-useful in processing protein products, because they may bind to the protein product or may catalyze chemical reactions resulting in modifications of the protein that could affect safety or efficacy.

[0863] In some cases, an entire library of proteins is tested in a multiplexed screening experimental platform. The 168 nutritive polypeptide library was transfected and expressed in a multiplexed expression system in which a single growth condition was used to produce each polypeptide in a single container. This multiplexed expression system allows any set of polypeptide sequences to be tested in parallel for a wide range of manufacturability parameters, each of which can be used to rank order the set of polypeptides being examined. A set of manufacturability parameters includes expression level, polypeptide solubility, ability of polypeptide to be purified by chromatography, ability to resist thermal denaturation, ability of polypeptide to digest, ability of polypeptide to be purified by resisting harsh treatments.

[0864] For E. coli multiplexed purification by precipitation, the set of 168 nutritive polypeptide sequences was HIS8 tagged (SEQ ID NO: 3919). The cells were cultured, as described herein, ruptured, and the solution was clarified, as described herein. This production resulted in a solution containing all of the polypeptides from the set which were both expressed and soluble. That set of soluble polypeptides was passed over an IMAC column, and eluted, as described herein. This IMAC purification effectively isolated the solubly expressed nutritive polypeptides as a set by removing the majority of E. coli host cell proteins. The elution fraction was concentrated and buffer exchanged into a low salt solution buffered near neutral pH before testing various purification methods. The methods tested include anion exchange chromatography, cation exchange chromatography, and negative precipitation, in which the impurities precipitate and the polypeptides that remain soluble rank the highest. In this case, impurities have been removed, so the polypeptides are rank ordered amongst themselves. Additionally, the set of proteins was tested for thermal stability, by heating, wherein the polypeptides which remain soluble after heating are more thermal stable than those which precipitate.

[0865] The pre-treated group of polypeptides expressed by E. coli was distributed to 32 wells of a 96 well plate (4.7 uL of protein stock per well at a total protein concentration of 43 g/L). Stock solutions were added to each well to create the following conditions: Control(No Additives); 42 mM Citrate/Phosphate, pH 7.1; 42 mM Citrate/Phosphate, pH 6.5; 42 mM Citrate/Phosphate, pH 6.0; 42 mM Citrate/Phosphate, pH 5.6; 42 mM Citrate/Phosphate, pH 5.0; 42 mM Citrate/Phosphate, pH 4.6; 42 mM Citrate/Phosphate, pH 4.3; 42 mM Citrate/Phosphate, pH 3.9; 42 mM Citrate/Phosphate, pH 3.7; 42 mM Citrate/Phosphate, pH 2.8; 75 mM Tris Base; 50 mM Na2CO3; 50 mM Piperazine Base; 100 mM sodium phosphate dibasic; 50 mM ethanolamine; 100 mM sodium phosphate monobasic; 100 mM MES Acid; 100 mM Sodium Acetate, pH 4.1; 100 mM MOPS Acid; 100 mM Tris HCl; 25 mM Acetic Acid; 25 mM Boric Acid; 25 mM Citric Acid; 50 mM PIPES Acid; 50 mM Succinic Acid; 1.2 M sodium sulfite; 1.5 M sodium sulfite; 2.5 M Ammonium Sulfate; 3.5 M Ammonium Sulfate; 200 mM CaCl2; 60% methanol. Water was added such that each well contained a total of 40 uL of solution at 5 g/L. The plates were mixed for 30 minutes at room temperature, then centrifuged at 3,000 RCF for 10 minutes to pellet any precipitated protein. A sample was taken from each well for analysis. The 96 well plates as then heated at 95° C. for 2 minutes. The plate was again centrifuged at 3,000 RCF for 10 minutes to pellet any precipitated protein, and a sample was taken from each well for analysis. All 64 samples were analyzed by Bradford assay, and select samples were analyzed by chip electrophoresis, followed by LC/MS/MS. All analytical assays are described herein. The measurements of total protein remaining in solution demonstrate that many conditions caused polypeptide precipitation, indicating that a portion of the conditions tested were rigorous harsh conditions.

[0866] LC/MS/MS analysis was performed with four select samples, described in the Table E9D. The detection of nutritive polypeptide in the soluble fraction is noted with an X.

TABLE E9D
Nutritive polypeptides detected in the soluble fraction of select
conditions. Detection is noted with an X.

| | 42 mM | 100 mM | | |
|---|---|---|---|---|
| | citrate/ | sodiunn | 50 mM | 2.5M |
| [[SEQID]]SEQ | phosphate, | phosphate | PIPES acid, | Ammonium |
| ID NO: | pH 5.6, heated | monobasic | heated | sulfate |
| [[SEQID]]SEQ | X | | | |
| ID NO:-00105 | | | | |
| [[SEQID]]SEQ | X | | | |
| ID NO:-00115 | | | | |
| [[SEQID]]SEQ | X | X | X | X |
| ID NO:-00302 | | | | |
| [[SEQID]]SEQ | X | | | |
| ID NO:-00304 | | | | |
| [[SEQID]]SEQ | X | X | X | X |
| ID NO:-00305 | | | | |
| [[SEQID]]SEQ | X | X | | |
| ID NO:-00316 | | | | |
| [[SEQID]]SEQ | X | X | | |
| ID NO:-00323 | | | | |
| [[SEQID]]SEQ | X | X | X | X |
| ID NO:-00338 | | | | |
| [[SEQID]]SEQ | X | X | X | X |
| ID NO:-00341 | | | | |
| [[SEQID]]SEQ | X | X | X | X |
| ID NO:-00343 | | | | |
| [[SEQID]]SEQ | X | X | X | X |
| ID NO:-00345 | | | | |
| [[SEQID]]SEQ | X | X | X | |
| ID NO:-00346 | | | | |
| [[SEQID]]SEQ | X | X | X | X |
| ID NO:-00352 | | | | |
| [[SEQID]]SEQ | X | X | X | X |
| ID NO:-00354 | | | | |
| [[SEQID]]SEQ | X | | | |
| ID NO:-00356 | | | | |
| [[SEQID]]SEQ | X | | X | X |
| ID NO:-00357 | | | | |
| [[SEQID]]SEQ | | X | X | |
| ID NO:-00485 | | | | |
| [[SEQID]]SEQ | X | X | X | |
| ID NO:-00495 | | | | |
| [[SEQID]]SEQ | | X | X | |
| ID NO:-00497 | | | | |
| [[SEQID]]SEQ | | | | |
| ID NO:-00502 | X | X | X | X |
| [[SEQID]]SEQ | | | | |
| ID NO:-00507 | | | X | |
| [[SEQID]]SEQ | X | | | |
| ID NO:-00509 | | | | |
| [[SEQID]]SEQ | X | X | X | X |
| ID NO:-00510 | | | | |
| [[SEQID]]SEQ | X | X | X | |
| ID NO:-00511 | | | | |
| [[SEQID]]SEQ | X | | | |
| ID NO:-00515 | | | | |
| [[SEQID]]SEQ | X | | | |
| ID NO:-00518 | | | | |
| [[SEQID]]SEQ | | X | X | |
| ID NO:-00521 | | | | |
| [[SEQID]]SEQ | X | X | X | X |
| ID NO:-00522 | | | | |
| [[SEQID]]SEQ | X | X | X | X |
| ID NO:-00525 | | | | |
| [[SEQID]]SEQ | | X | X | |
| ID NO:-00528 | | | | |
| [[SEQID]]SEQ | X | X | | |
| ID NO:-00529 | | | | |
| [[SEQID]]SEQ | | X | X | |
| ID NO:-00533 | | | | |
| [[SEQID]]SEQ | X | | X | |
| ID NO:-00537 | | | | |
| [[SEQID]]SEQ | X | X | X | |
| ID NO:-00540 | | | | |
| [[SEQID]]SEQ | X | X | | |
| ID NO:-00546 | | | | |
| [[SEQID]]SEQ | X | X | X | |
| ID NO:-00547 | | | | |
| [[SEQID]]SEQ | X | X | X | X |
| ID NO:-00553 | | | | |
| [[SEQID]]SEQ | | X | X | |
| ID NO:-00555 | | | | |
| [[SEQID]]SEQ | X | | | |
| ID NO:-00559 | | | | |
| [[SEQID]]SEQ | X | X | | X |
| ID NO:-00560 | | | | |
| [[SEQID]]SEQ | X | X | X | X |
| ID NO:-00564 | | | | |
| [[SEQID]]SEQ | X | X | X | |
| ID NO:-00570 | | | | |
| [[SEQID]]SEQ | X | X | X | X |
| ID NO:-00585 | | | | |
| [[SEQID]]SEQ | X | X | X | |
| ID NO:-00587 | | | | |
| [[SEQID]]SEQ | X | X | X | |
| ID NO:-00592 | | | | |
| [[SEQID]]SEQ | X | X | X | |
| ID NO:-00598 | | | | |
| [[SEQID]]SEQ | X | X | X | |
| ID NO:-00601 | | | | |
| [[SEQID]]SEQ | | | X | |
| ID NO:-00603 | | | | |
| [[SEQID]]SEQ | | X | X | X |
| ID NO:-00605 | | | | |
| [[SEQID]]SEQ | | X | X | |
| ID NO:-00606 | | | | |
| [[SEQID]]SEQ | | | X | |
| ID NO:-00610 | | | | |
| [[SEQID]]SEQ | X | X | X | |
| ID NO:-00613 | | | | |
| [[SEQID]]SEQ | X | | | |
| ID NO:-00619 | | | | |
| [[SEQID]]SEQ | | X | X | |
| ID NO:-00622 | | | | |
| [[SEQID]]SEQ | X | X | X | X |
| ID NO:-00623 | | | | |
| [[SEQID]]SEQ | X | X | X | |
| ID NO:-00631 | | | | |
| [[SEQID]]SEQ | X | X | X | X |
| ID NO:-00632 | | | | |
| [[SEQID]]SEQ | X | X | X | |
| ID NO:-00633 | | | | |
| [[SEQID]]SEQ | X | | | |
| ID NO:-00641 | | | | |
| [[SEQID]]SEQ | X | X | X | |
| ID NO:-00647 | | | | |
| [[SEQID]]SEQ | | | X | |
| ID NO:-00648 | | | | |

[0867] LC/MS/MS data identified a number of soluble polypeptides in each condition. The different conditions tested across the screen represent a number of different mechanisms of precipitation, and these different conditions were able to identify different sets of polypeptides based on their different physicochemical properties. Based on the number of polypeptides which remained soluble, of the conditions examined by LC/MS/MS, the harshest condition is the 2.5 M ammonium sulfate condition at room temperature. The polypeptides that were soluble in that condition were generally soluble in all three other conditions tested, with few exceptions. A large number of polypeptides were identified as being soluble after being heated to 95° C. for two minutes. In this experiment, a library of nutritive polypeptides was physically screened for solubility across a wide variety of conditions, and subsets of soluble peptides were identified within each condition.

### Example 11. Selection of Amino Acid Sequences of Nutritive Polypeptides from Amino Acid Sequence Libraries Based on Solvation Scores and Aggregation Scores, and Other Sequence-Based Analyses

[0868] Solvation Score. The solvation score is a primary sequence-based metric for assessing the hydrophilicity and potential solubility of a given protein. It is defined as the total free energy of solvation (i.e. the free energy change associated with transfer from gas phase to a dilute solution) for all amino acid side chains, assuming each residue were solvated independently, normalized by the total number of residues in the sequence. The side chain solvation free energies were found computationally by calculating the electrostatic energy difference between a vacuum dielectric of 1 and a water dielectric of 80 (by solving the Poisson-Boltzmann equation) as well as the non-polar, Van der Waals energy using a linear solvent accessible surface area model (D. Sitkoff, K. A. Sharp, B. Honig. “Accurate Calculation of Hydration Free Energies Using Macroscopic Solvent Models”. J. Phys. Chem. 98, 1994). These solvation free energies correlate well with experimental measurements. For amino acids with ionizable sidechains (Arg, Asp, Cys, Glu, His, Lys and Tyr), an average solvation free energy is based on the relative probabilities for each ionization state at the specified pH. The solvation score is effectively a measure of the solvation free energy assuming all polar residues are solvent exposed and non-polar residues are solvent excluded upon folding.

[0869] Aggregation Score. The aggregation score is a primary sequence based metric for assessing the hydrophobicity and likelihood of aggregation of a given protein. Using the Kyte and Doolittle hydrophobity scale (Kyte J, Doolittle R F (May 1982). “A simple method for displaying the hydropathic character of a protein”. J. Mol. Biol. 157 (1): 105-32), which gives hydrophobic residues positive values and hydrophilic residues negative values, the effective hydrophobicity as a function of sequence position is calculated using a moving average of 5 residues centered around each residue. The aggregation score is found by summing all those average hydrophobicity values greater than 0 and normalizing by the total length of the protein. The underlying understanding is that aggregation is the result of two or more hydrophobic patches coming together to exclude water and reduce surface exposure, and the likelihood that a protein will aggregate is a function of how densely packed its hydrophobic (i.e., aggregation prone) residues are.

[0870] Charge Content. The absolute or net charge per amino acid is calculated as a function of pH and independently of the location of the residue within the protein. Given a pH value and the pKa of a titratable residue, the Henderson-Hasselbalch equation is solved to determine the relative concentrations of each titration state (e.g. −1 or 0 for the acidic residue glutamate).

$$pH = {pK}_{a} + {log}_{10} ( \frac{[ {A}^{-} ]}{[ HA ]} )$$

### The Henderson-Hasselbalch Equation

[0871] The average charge for that titratable residue is found by converting these relative concentrations into effective probabilities of being charged and multiplying by the charge and number of instances of that amino acid. The net or absolute charge found from this procedure is then divided by the number of amino acids to get the per amino acid value.

[0872] The residue types shown below in Table E11A are used with the corresponding pKa values and relevant titration states. These pKa values come from the pKa table provided in the European Molecular Biology Open Software Suite (Rice, P. Longden, I. and Bleasby, A. EMBOSS: The European Molecular Biology Open Software Suite. Trends in Genetics, 16, 2000).

TABLE E11A

| Residue | pKa | Titration States |
|---|---|---|
| Glutamate | −4.1 | −1, 0 |
| Aspartate | −3.9 | −1, 0 |
| Arginine | −12.5 | 0, +1 |
| Lysine | −10.8 | 0, +1 |
| Histidine | −6.5 | 0, +1 |
| Cysteine | −8.5 | −1, 0 |
| Tyrosine | −10.1 | −1, 0 |
| C-terminus | −3.6 | −1, 0 |
| N-terminus | −8.6 | 0, +1 |

[0873] Weighted Euclidean Distance. To identify candidate proteins with a similar amino acid breakdown to a known, clinically efficacious blend, a weighted Euclidean distance based search strategy is used. In principle, this means computing the weighted percent differences for each amino acid relative to the target amino acid distribution, as defined by the following equation:

Distance=\sqrt{Σ_{i∈AA}αᵢ(xᵢ−xᵢ^{T})²}

[0874] where AA is the set of all amino acids in the target distribution, xᵢ is the fraction by weight of amino acid i in the candidate protein sequence, xᵢ^{T} is the fraction by weight of amino acid i in the target amino acid distribution, and αᵢ is the relative weight associated with amino acid i. The relative weights were applied to ensure that large deviations from the most important amino acid targets were appropriately penalized.

[0875] As an example, for treatment of sarcopenia, support of exercise, and stimulation of thermogenesis amino acid blends (given the relative importance of Leucine and the other two branched chain amino acids, Isoleucine and Valine) relative weights of 3:2:2 for Leucine, Valine, and Isoleucine were used. All other amino acids were given a relative weight of 1.

[0876] Allergenicity. The allergenicity score is a primary sequence based metric based on WHO recommendations (<fao.org/ag/agn/food/pdf/allergygm.pdf>) for assessing how similar a protein is to any known allergen, the primary understanding being that high percent identity between a target and a known allergen is likely indicative of cross reactivity. For a given protein, the likelihood of eliciting an allergic response is assessed via a complimentary pair of sequence homology based tests. The first test determines the protein's percent identity across the entire sequence via a global-local sequence alignment to a database of known allergens using the FASTA algorithm with the BLOSUM50 substitution matrix, a gap open penalty of 10, and a gap extension penalty of 2. It is suggested that proteins with less than 50% global homology across both sequences are unlikely to be allergenic (Goodman R. E. et al. Allergenicity assessment of genetically modified crops—what makes sense? Nat. Biotech. 26, 73-81 (2008).; Aalberse R. C. Structural biology of allergens. J. Allergy Clin. Immunol. 106, 228-238 (2000).). The second test assesses the local allergenicity along the protein sequence by determining the local allergenicity of all possible contiguous 80 amino acid fragments via a global-local sequence alignment of each fragment to a database of known allergens using the FASTA algorithm with the BLOSUM50 substitution matrix, a gap open penalty of 10, and a gap extension penalty of 2. The highest percent identity of any 80 amino acid window with any allergen is taken as the final score for the protein of interest. The WHO guidelines suggest using a 35% identity cutoff. The custom database comprises pooled allergen lists collected by the Food Allergy Research and Resource Program (<allergenonline.org/>), UNIPROT annotations (<uniprot.org/docs/allergen>), and the Structural Database of Allergenic Proteins (SDAP, fermi.utmb.edu/SDAP/sdap_lnk.html). This database includes all currently recognized allergens by the International Union of Immunological Socieities allergen.org/>) as well as a large number of additional allergens not yet officially named.

[0877] Toxicity/Nonallergenicity/Antinutricity. The toxicity, nonallergenicity, and anti-nutricity of a protein are all assessed similarly, by determining the protein's percent identity to databases of known toxic, nonallergenic, and protease inhibitory proteins, respectively. The toxicity and anti-nutritive qualities are assumed to be a function of the whole protein (i.e., a fragment of a known toxic protein will not be toxic), as their toxic and inhibitory mechanisms of action are often structural in nature (Huntington J, Read R, Carrell R. “Structure of a serpin-protease complex shows inhibition by deformation”. Nature 407 (2000): 923-6; Van den Born H. K. et al. Theoretical analysis of the structure of the peptide fasciculin and its docking to acetylcholinesterase. Protein Sci. 4 (1995): 703-715.; and Harel M. Crystal structure of an acetylcholinesterase-fasciculin complex: interaction of a three-fingered toxin from snake venom with its target. Structure. 3 (1995): 1355-1366.). Given that protein structure is a function of the entire protein sequence, a global-global alignment is performed of the protein of interest against the two respective databases using the FASTA algorithm with the BLOSUM50 substitution matrix, a gap open penalty of 10, and a gap extension penalty of 2. A cut off of 35% can be used. While it does not provide specific instructions of how to avoid toxic/antinutritive polypeptides, reference Delaney B. et al. Evaluation of protein safety in the context of agricultural biotechnology. Food. Chem. Toxicol. 46 (2008: S71-S97 suggests that one should avoid both known toxic and antinutritive polypeptides when assessing the safety of a possible food protein.

[0878] The nonallergenicity of a protein is related to its likelihood of eliciting an allergenic response upon exposure (similar to but opposite of allergenicity). Specifically, the human immune system is exposed to a multitude of possible allergenic proteins on a regular basis, and has the intrinsic ability to determine self from non-self. The exact nature of this ability is not always clear, and there are many diseases that arise as a result of the failure of the body to differentiate self from non-self (e.g. arthritis). Nonetheless, the understanding is that proteins that look (i.e. share a large degree of sequence homology to) a lot like nonallergenic (i.e., human) proteins are less likely to elicit an immune response. In particular, it has been shown that for some protein families with known allergenic members (tropomyosins, parvalbumins, caseins), those proteins that bear more sequence homology to their human counterparts relative to known allergenic proteins, are not thought to be allergenic (Jenkins J. A. et al. Evolutionary distance from human homologs reflects allergenicity of animal food proteins. J. Allergy Clin Immunol. 120 (2007): 1399-1405.) For a given protein, the nonallergenicity score is measured by determining the maximum percent identity of the protein to a database of human proteins from a global-local alignment using the FASTA algorithm with the BLOSUM50 substitution matrix, a gap open penalty of 10, and a gap extension penalty of 2. Cutoffs can vary. For example, Jenkins J. A. et al. (Evolutionary distance from human homologs reflects allergenicity of animal food proteins. J. Allergy Clin Immunol. 120 (2007): 1399-1405) claim that proteins with a sequence identity to a human protein above 62% are less likely to be allergenic.

### Example 12. Expression of Nutritive Polypeptides

[0879] The lists below include all the nutritive protein sequences that were expressed in Escherichia coli, Bacillus, Aspergillus niger, and mammalian cells. In E. coli, the proteins were detected in either whole cell lysates or in the soluble fraction of the cell lysate. In Bacillus, expression was detected in either cell lysates or secreted supernatants of Bacillus subtilis or Bacillus megaterium. In Aspergillus niger, proteins were secreted from the fungus and detected in the supernatant. For proteins expressed in mammalian cells, they were expressed in either in Chinese Hamster Ovarian-S strain (CHO-S) or Human Embryonic Kidney 293F strain (HEK293F). Expression was measured by the following metrics: mass spectrometry spectrum counts for protein expression data acquired from LC-MS/MS in pooled library, SDS-PAGE, Chip Electrophoresis, dot blot, Western blot and ELISA for individual protein expression as described above.

[0880] The following nutritive polypeptides were detected in either whole cell lysates or in the soluble fraction of the cell lysates of Escherichia coli: [[SEQID]]SEQ ID NO:−00001, [[SEQID]]SEQ ID NO:−00002, [[SEQID]]SEQ ID NO:−00003, [[SEQID]]SEQ ID NO:−00004, [[SEQID]]SEQ ID NO:−00005, [[SEQID]]SEQ ID NO:−00007, [[SEQID]]SEQ ID NO:−00008, [[SEQID]]SEQ ID NO:−00009, [[SEQID]]SEQ ID NO:−00011, [[SEQID]]SEQ ID NO:−00012, [[SEQID]]SEQ ID NO:−00013, [[SEQID]]SEQ ID NO:−00014, [[SEQID]]SEQ ID NO:−00015, [[SEQID]]SEQ ID NO:−00016, [[SEQID]]SEQ ID NO:−00020, [[SEQID]]SEQ ID NO:−00021, [[SEQID]]SEQ ID NO:−00024, [[SEQID]]SEQ ID NO:−00025, [[SEQID]]SEQ ID NO:−00027, [[SEQID]]SEQ ID NO:−00028, [[SEQID]]SEQ ID NO:−00029, [[SEQID]]SEQ ID NO:−00030, [[SEQID]]SEQ ID NO:−00031, [[SEQID]]SEQ ID NO:−00033, [[SEQID]]SEQ ID NO:−00043, [[SEQID]]SEQ ID NO:−00049, [[SEQID]]SEQ ID NO:−00051, [[SEQID]]SEQ ID NO:−00052, [[SEQID]]SEQ ID NO:−00053, [[SEQID]]SEQ ID NO:−00054, [[SEQID]]SEQ ID NO:−00055, [[SEQID]]SEQ ID NO:−00057, [[SEQID]]SEQ ID NO:−00059, [[SEQID]]SEQ ID NO:−00060, [[SEQID]]SEQ ID NO:−00061, [[SEQID]]SEQ ID NO:−00068, [[SEQID]]SEQ ID NO:−00070, [[SEQID]]SEQ ID NO:−00071, [[SEQID]]SEQ ID NO:−00073, [[SEQID]]SEQ ID NO:−00074, [[SEQID]]SEQ ID NO:−00075, [[SEQID]]SEQ ID NO:−00076, [[SEQID]]SEQ ID NO:−00077, [[SEQID]]SEQ ID NO:−00078, [[SEQID]]SEQ ID NO:−00083, [[SEQID]]SEQ ID NO:−00084, [[SEQID]]SEQ ID NO:−00085, [[SEQID]]SEQ ID NO:−00086, [[SEQID]]SEQ ID NO:−00087, [[SEQID]]SEQ ID NO:−00088, [[SEQID]]SEQ ID NO:−00090, [[SEQID]]SEQ ID NO:−00091, [[SEQID]]SEQ ID NO:−00092, [[SEQID]]SEQ ID NO:−00093, [[SEQID]]SEQ ID NO:−00098, [[SEQID]]SEQ ID NO:−00099, [[SEQID]]SEQ ID NO:−00100, [[SEQID]]SEQ ID NO:−00101, [[SEQID]]SEQ ID NO:−00102, [[SEQID]]SEQ ID NO:−00103, [[SEQID]]SEQ ID NO:−00104, [[SEQID]]SEQ ID NO:−00105, [[SEQID]]SEQ ID NO:−00106, [[SEQID]]SEQ ID NO:−00107, [[SEQID]]SEQ ID NO:−00108, [[SEQID]]SEQ ID NO:−00110, [[SEQID]]SEQ ID NO:−00112, [[SEQID]]SEQ ID NO:−00113, [[SEQID]]SEQ ID NO:−00115, [[SEQID]]SEQ ID NO:−00116, [[SEQID]]SEQ ID NO:−00117, [[SEQID]]SEQ ID NO:−00118, [[SEQID]]SEQ ID NO:−00123, [[SEQID]]SEQ ID NO:−00124, [[SEQID]]SEQ ID NO:−00128, [[SEQID]]SEQ ID NO:−00130, [[SEQID]]SEQ ID NO:−00131, [[SEQID]]SEQ ID NO:−00132, [[SEQID]]SEQ ID NO:−00134, [[SEQID]]SEQ ID NO:−00137, [[SEQID]]SEQ ID NO:−00139, [[SEQID]]SEQ ID NO:−00140, [[SEQID]]SEQ ID NO:−00141, [[SEQID]]SEQ ID NO:−00142, [[SEQID]]SEQ ID NO:−00143, [[SEQID]]SEQ ID NO:−00145, [[SEQID]]SEQ ID NO:−00146, [[SEQID]]SEQ ID NO:−00148, [[SEQID]]SEQ ID NO:−00150, [[SEQID]]SEQ ID NO:−00151, [[SEQID]]SEQ ID NO:−00152, [[SEQID]]SEQ ID NO:−00153, [[SEQID]]SEQ ID NO:−00154, [[SEQID]]SEQ ID NO:−00155, [[SEQID]]SEQ ID NO:−00157, [[SEQID]]SEQ ID NO:−00158, [[SEQID]]SEQ ID NO:−00159, [[SEQID]]SEQ ID NO:−00162, [[SEQID]]SEQ ID NO:−00166, [[SEQID]]SEQ ID NO:−00169, [[SEQID]]SEQ ID NO:−00175, [[SEQID]]SEQ ID NO:−00193, [[SEQID]]SEQ ID NO:−00194, [[SEQID]]SEQ ID NO:−00195, [[SEQID]]SEQ ID NO:−00196, [[SEQID]]SEQ ID NO:−00197, [[SEQID]]SEQ ID NO:−00198, [[SEQID]]SEQ ID NO:−00199, [[SEQID]]SEQ ID NO:−00200, [[SEQID]]SEQ ID NO:−00201, [[SEQID]]SEQ ID NO:−00202, [[SEQID]]SEQ ID NO:−00203, [[SEQID]]SEQ ID NO:−00204, [[SEQID]]SEQ ID NO:−00205, [[SEQID]]SEQ ID NO:−00211, [[SEQID]]SEQ ID NO:−00212, [[SEQID]]SEQ ID NO:−00213, [[SEQID]]SEQ ID NO:−00214, [[SEQID]]SEQ ID NO:−00215, [[SEQID]]SEQ ID NO:−00216, [[SEQID]]SEQ ID NO:−00218, [[SEQID]]SEQ ID NO:−00219, [[SEQID]]SEQ ID NO:−00220, [[SEQID]]SEQ ID NO:−00221, [[SEQID]]SEQ ID NO:−00223, [[SEQID]]SEQ ID NO:−00224, [[SEQID]]SEQ ID NO:−00225, [[SEQID]]SEQ ID NO:−00226, [[SEQID]]SEQ ID NO:−00227, [[SEQID]]SEQ ID NO:−00228, [[SEQID]]SEQ ID NO:−00230, [[SEQID]]SEQ ID NO:−00232, [[SEQID]]SEQ ID NO:−00233, [[SEQID]]SEQ ID NO:−00234, [[SEQID]]SEQ ID NO:−00235, [[SEQID]]SEQ ID NO:−00236, [[SEQID]]SEQ ID NO:−00237, [[SEQID]]SEQ ID NO:−00239, [[SEQID]]SEQ ID NO:−00240, [[SEQID]]SEQ ID NO:−00241, [[SEQID]]SEQ ID NO:−00264, [[SEQID]]SEQ ID NO:−00265, [[SEQID]]SEQ ID NO:−00266, [[SEQID]]SEQ ID NO:−00267, [[SEQID]]SEQ ID NO:−00268, [[SEQID]]SEQ ID NO:−00269, [[SEQID]]SEQ ID NO:−00270, [[SEQID]]SEQ ID NO:−00271, [[SEQID]]SEQ ID NO:−00273, [[SEQID]]SEQ ID NO:−00274, [[SEQID]]SEQ ID NO:−00275, [[SEQID]]SEQ ID NO:−00276, [[SEQID]]SEQ ID NO:−00284, [[SEQID]]SEQ ID NO:−00287, [[SEQID]]SEQ ID NO:−00297, [[SEQID]]SEQ ID NO:−00298, [[SEQID]]SEQ ID NO:−00299, [[SEQID]]SEQ ID NO:−00302, [[SEQID]]SEQ ID NO:−00303, [[SEQID]]SEQ ID NO:−00304, [[SEQID]]SEQ ID NO:−00305, [[SEQID]]SEQ ID NO:−00306, [[SEQID]]SEQ ID NO:−00307, [[SEQID]]SEQ ID NO:−00309, [[SEQID]]SEQ ID NO:−00318, [[SEQID]]SEQ ID NO:−00322, [[SEQID]]SEQ ID NO:−00325, [[SEQID]]SEQ ID NO:−00326, [[SEQID]]SEQ ID NO:−00327, [[SEQID]]SEQ ID NO:−00328, [[SEQID]]SEQ ID NO:−00329, [[SEQID]]SEQ ID NO:−00332, [[SEQID]]SEQ ID NO:−00335, [[SEQID]]SEQ ID NO:−00336, [[SEQID]]SEQ ID NO:−00337, [[SEQID]]SEQ ID NO:−00338, [[SEQID]]SEQ ID NO:−00341, [[SEQID]]SEQ ID NO:−00343, [[SEQID]]SEQ ID NO:−00344, [[SEQID]]SEQ ID NO:−00345, [[SEQID]]SEQ ID NO:−00346, [[SEQID]]SEQ ID NO:−00349, [[SEQID]]SEQ ID NO:−00350, [[SEQID]]SEQ ID NO:−00352, [[SEQID]]SEQ ID NO:−00353, [[SEQID]]SEQ ID NO:−00354, [[SEQID]]SEQ ID NO:−00355, [[SEQID]]SEQ ID NO:−00356, [[SEQID]]SEQ ID NO:−00357, [[SEQID]]SEQ ID NO:−00358, [[SEQID]]SEQ ID NO:−00359, [[SEQID]]SEQ ID NO:−00360, [[SEQID]]SEQ ID NO:−00362, [[SEQID]]SEQ ID NO:−00363, [[SEQID]]SEQ ID NO:−00408, [[SEQID]]SEQ ID NO:−00409, [[SEQID]]SEQ ID NO:−00415, [[SEQID]]SEQ ID NO:−00416, [[SEQID]]SEQ ID NO:−00418, [[SEQID]]SEQ ID NO:−00424, [[SEQID]]SEQ ID NO:−00481, [[SEQID]]SEQ ID NO:−00482, [[SEQID]]SEQ ID NO:−00483, [[SEQID]]SEQ ID NO:−00484, [[SEQID]]SEQ ID NO:−00485, [[SEQID]]SEQ ID NO:−00486, [[SEQID]]SEQ ID NO:−00487, [[SEQID]]SEQ ID NO:−00488, [[SEQID]]SEQ ID NO:−00489, [[SEQID]]SEQ ID NO:−00490, [[SEQID]]SEQ ID NO:−00491, [[SEQID]]SEQ ID NO:−00492, [[SEQID]]SEQ ID NO:−00493, [[SEQID]]SEQ ID NO:−00494, [[SEQID]]SEQ ID NO:−00495, [[SEQID]]SEQ ID NO:−00496, [[SEQID]]SEQ ID NO:−00497, [[SEQID]]SEQ ID NO:−00498, [[SEQID]]SEQ ID NO:−00499, [[SEQID]]SEQ ID NO:−00500, [[SEQID]]SEQ ID NO:−00501, [[SEQID]]SEQ ID NO:−00502, [[SEQID]]SEQ ID NO:−00503, [[SEQID]]SEQ ID NO:−00504, [[SEQID]]SEQ ID NO:−00505, [[SEQID]]SEQ ID NO:−00506, [[SEQID]]SEQ ID NO:−00507, [[SEQID]]SEQ ID NO:−00508, [[SEQID]]SEQ ID NO:−00509, [[SEQID]]SEQ ID NO:−00510, [[SEQID]]SEQ ID NO:−00511, [[SEQID]]SEQ ID NO:−00512, [[SEQID]]SEQ ID NO:−00513, [[SEQID]]SEQ ID NO:−00514, [[SEQID]]SEQ ID NO:−00515, [[SEQID]]SEQ ID NO:−00516, [[SEQID]]SEQ ID NO:−00517, [[SEQID]]SEQ ID NO:−00518, [[SEQID]]SEQ ID NO:−00519, [[SEQID]]SEQ ID NO:−00520, [[SEQID]]SEQ ID NO:−00521, [[SEQID]]SEQ ID NO:−00522, [[SEQID]]SEQ ID NO:−00523, [[SEQID]]SEQ ID NO:−00524, [[SEQID]]SEQ ID NO:−00525, [[SEQID]]SEQ ID NO:−00526, [[SEQID]]SEQ ID NO:−00527, [[SEQID]]SEQ ID NO:−00528, [[SEQID]]SEQ ID NO:−00529, [[SEQID]]SEQ ID NO:−00530, [[SEQID]]SEQ ID NO:−00531, [[SEQID]]SEQ ID NO:−00532, [[SEQID]]SEQ ID NO:−00533, [[SEQID]]SEQ ID NO:−00534, [[SEQID]]SEQ ID NO:−00535, [[SEQID]]SEQ ID NO:−00536, [[SEQID]]SEQ ID NO:−00537, [[SEQID]]SEQ ID NO:−00538, [[SEQID]]SEQ ID NO:−00539, [[SEQID]]SEQ ID NO:−00540, [[SEQID]]SEQ ID NO:−00541, [[SEQID]]SEQ ID NO:−00542, [[SEQID]]SEQ ID NO:−00543, [[SEQID]]SEQ ID NO:−00544, [[SEQID]]SEQ ID NO:−00545, [[SEQID]]SEQ ID NO:−00546, [[SEQID]]SEQ ID NO:−00547, [[SEQID]]SEQ ID NO:−00548, [[SEQID]]SEQ ID NO:−00549, [[SEQID]]SEQ ID NO:−00550, [[SEQID]]SEQ ID NO:−00551, [[SEQID]]SEQ ID NO:−00552, [[SEQID]]SEQ ID NO:−00553, [[SEQID]]SEQ ID NO:−00554, [[SEQID]]SEQ ID NO:−00555, [[SEQID]]SEQ ID NO:−00556, [[SEQID]]SEQ ID NO:−00557, [[SEQID]]SEQ ID NO:−00558, [[SEQID]]SEQ ID NO:−00559, [[SEQID]]SEQ ID NO:−00560, [[SEQID]]SEQ ID NO:−00561, [[SEQID]]SEQ ID NO:−00562, [[SEQID]]SEQ ID NO:−00563, [[SEQID]]SEQ ID NO:−00564, [[SEQID]]SEQ ID NO:−00565, [[SEQID]]SEQ ID NO:−00566, [[SEQID]]SEQ ID NO:−00567, [[SEQID]]SEQ ID NO:−00568, [[SEQID]]SEQ ID NO:−00569, [[SEQID]]SEQ ID NO:−00570, [[SEQID]]SEQ ID NO:−00571, [[SEQID]]SEQ ID NO:−00572, [[SEQID]]SEQ ID NO:−00573, [[SEQID]]SEQ ID NO:−00574, [[SEQID]]SEQ ID NO:−00575, [[SEQID]]SEQ ID NO:−00576, [[SEQID]]SEQ ID NO:−00577, [[SEQID]]SEQ ID NO:−00578, [[SEQID]]SEQ ID NO:−00579, [[SEQID]]SEQ ID NO:−00580, [[SEQID]]SEQ ID NO:−00581, [[SEQID]]SEQ ID NO:−00582, [[SEQID]]SEQ ID NO:−00583, [[SEQID]]SEQ ID NO:−00584, [[SEQID]]SEQ ID NO:−00585, [[SEQID]]SEQ ID NO:−00586, [[SEQID]]SEQ ID NO:−00587, [[SEQID]]SEQ ID NO:−00588, [[SEQID]]SEQ ID NO:−00589, [[SEQID]]SEQ ID NO:−00590, [[SEQID]]SEQ ID NO:−00591, [[SEQID]]SEQ ID NO:−00592, [[SEQID]]SEQ ID NO:−00593, [[SEQID]]SEQ ID NO:−00594, [[SEQID]]SEQ ID NO:−00595, [[SEQID]]SEQ ID NO:−00596, [[SEQID]]SEQ ID NO:−00597, [[SEQID]]SEQ ID NO:−00598, [[SEQID]]SEQ ID NO:−00599, [[SEQID]]SEQ ID NO:−00600, [[SEQID]]SEQ ID NO:−00601, [[SEQID]]SEQ ID NO:−00602, [[SEQID]]SEQ ID NO:−00603, [[SEQID]]SEQ ID NO:−00604, [[SEQID]]SEQ ID NO:−00605, [[SEQID]]SEQ ID NO:−00606, [[SEQID]]SEQ ID NO:−00607, [[SEQID]]SEQ ID NO:−00608, [[SEQID]]SEQ ID NO:−00609, [[SEQID]]SEQ ID NO:−00610, [[SEQID]]SEQ ID NO:−00611, [[SEQID]]SEQ ID NO:−00612, [[SEQID]]SEQ ID NO:−00613, [[SEQID]]SEQ ID NO:−00614, [[SEQID]]SEQ ID NO:−00615, [[SEQID]]SEQ ID NO:−00616, [[SEQID]]SEQ ID NO:−00617, [[SEQID]]SEQ ID NO:−00618, [[SEQID]]SEQ ID NO:−00619, [[SEQID]]SEQ ID NO:−00620, [[SEQID]]SEQ ID NO:−00621, [[SEQID]]SEQ ID NO:−00622, [[SEQID]]SEQ ID NO:−00623, [[SEQID]]SEQ ID NO:−00624, [[SEQID]]SEQ ID NO:−00625, [[SEQID]]SEQ ID NO:−00626, [[SEQID]]SEQ ID NO:−00627, [[SEQID]]SEQ ID NO:−00628, [[SEQID]]SEQ ID NO:−00629, [[SEQID]]SEQ ID NO:−00630, [[SEQID]]SEQ ID NO:−00631, [[SEQID]]SEQ ID NO:−00632, [[SEQID]]SEQ ID NO:−00633, [[SEQID]]SEQ ID NO:−00634, [[SEQID]]SEQ ID NO:−00635, [[SEQID]]SEQ ID NO:−00636, [[SEQID]]SEQ ID NO:−00637, [[SEQID]]SEQ ID NO:−00638, [[SEQID]]SEQ ID NO:−00639, [[SEQID]]SEQ ID NO:−00640, [[SEQID]]SEQ ID NO:−00641, [[SEQID]]SEQ ID NO:−00642, [[SEQID]]SEQ ID NO:−00643, [[SEQID]]SEQ ID NO:−00644, [[SEQID]]SEQ ID NO:−00645, [[SEQID]]SEQ ID NO:−00646, [[SEQID]]SEQ ID NO:−00647, [[SEQID]]SEQ ID NO:−00648, [[SEQID]]SEQ ID NO:−00669, [[SEQID]]SEQ ID NO:−00670, [[SEQID]]SEQ ID NO:−00671, [[SEQID]]SEQ ID NO:−00672, [[SEQID]]SEQ ID NO:−00673, [[SEQID]]SEQ ID NO:−00674, [[SEQID]]SEQ ID NO:−00675, [[SEQID]]SEQ ID NO:−00676, [[SEQID]]SEQ ID NO:−00677, [[SEQID]]SEQ ID NO:−00678, [[SEQID]]SEQ ID NO:−00679, [[SEQID]]SEQ ID NO:−00680, [[SEQID]]SEQ ID NO:−00681, [[SEQID]]SEQ ID NO:−00682, [[SEQID]]SEQ ID NO:−00716, [[SEQID]]SEQ ID NO:−00717, [[SEQID]]SEQ ID NO:−00718, [[SEQID]]SEQ ID NO:−00719, [[SEQID]]SEQ ID NO:−00720, [[SEQID]]SEQ ID NO:−00723, [[SEQID]]SEQ ID NO:−00724, [[SEQID]]SEQ ID NO:−00725, [[SEQID]]SEQ ID NO:−00726, [[SEQID]]SEQ ID NO:−00727, [[SEQID]]SEQ ID NO:−00728, [[SEQID]]SEQ ID NO:−00729, [[SEQID]]SEQ ID NO:−00730, [[SEQID]]SEQ ID NO:−00731, [[SEQID]]SEQ ID NO:−00732, [[SEQID]]SEQ ID NO:−00734, [[SEQID]]SEQ ID NO:−00735, [[SEQID]]SEQ ID NO:−00736, [[SEQID]]SEQ ID NO:−00737, [[SEQID]]SEQ ID NO:−00738, [[SEQID]]SEQ ID NO:−00739, [[SEQID]]SEQ ID NO:−00740, [[SEQID]]SEQ ID NO:−00741, [[SEQID]]SEQ ID NO:−00742, [[SEQID]]SEQ ID NO:−00743, [[SEQID]]SEQ ID NO:−00744, [[SEQID]]SEQ ID NO:−00745, [[SEQID]]SEQ ID NO:−00746, [[SEQID]]SEQ ID NO:−00747, [[SEQID]]SEQ ID NO:−00748, [[SEQID]]SEQ ID NO:−00749, [[SEQID]]SEQ ID NO:−00750, [[SEQID]]SEQ ID NO:−00751, [[SEQID]]SEQ ID NO:−00752, [[SEQID]]SEQ ID NO:−00753, [[SEQID]]SEQ ID NO:−00754, [[SEQID]]SEQ ID NO:−00755, [[SEQID]]SEQ ID NO:−00756, [[SEQID]]SEQ ID NO:−00757, [[SEQID]]SEQ ID NO:−00758, [[SEQID]]SEQ ID NO:−00759, [[SEQID]]SEQ ID NO:−00760, [[SEQID]]SEQ ID NO:−00761, [[SEQID]]SEQ ID NO:−00763, [[SEQID]]SEQ ID NO:−00765, [[SEQID]]SEQ ID NO:−00766, [[SEQID]]SEQ ID NO:−00767, [[SEQID]]SEQ ID NO:−00768, [[SEQID]]SEQ ID NO:−00769, [[SEQID]]SEQ ID NO:−00770, [[SEQID]]SEQ ID NO:−00771, [[SEQID]]SEQ ID NO:−00772, [[SEQID]]SEQ ID NO:−00773, [[SEQID]]SEQ ID NO:−00774, [[SEQID]]SEQ ID NO:−00775, [[SEQID]]SEQ ID NO:−00777, [[SEQID]]SEQ ID NO:−00778, [[SEQID]]SEQ ID NO:−00780, [[SEQID]]SEQ ID NO:−00781, [[SEQID]]SEQ ID NO:−00782, [[SEQID]]SEQ ID NO:−00783, [[SEQID]]SEQ ID NO:−00784, [[SEQID]]SEQ ID NO:−00785, [[SEQID]]SEQ ID NO:−00786, [[SEQID]]SEQ ID NO:−00787, [[SEQID]]SEQ ID NO:−00788, [[SEQID]]SEQ ID NO:−00789, [[SEQID]]SEQ ID NO:−00790, [[SEQID]]SEQ ID NO:−00791, [[SEQID]]SEQ ID NO:−00792, [[SEQID]]SEQ ID NO:−00793, [[SEQID]]SEQ ID NO:−00794, [[SEQID]]SEQ ID NO:−00795, [[SEQID]]SEQ ID NO:−00796, [[SEQID]]SEQ ID NO:−00797, [[SEQID]]SEQ ID NO:−00798, [[SEQID]]SEQ ID NO:−00799, [[SEQID]]SEQ ID NO:−00801, [[SEQID]]SEQ ID NO:−00802, [[SEQID]]SEQ ID NO:−00803, [[SEQID]]SEQ ID NO:−00804, [[SEQID]]SEQ ID NO:−00805, [[SEQID]]SEQ ID NO:−00806, [[SEQID]]SEQ ID NO:−00807, [[SEQID]]SEQ ID NO:−00808, [[SEQID]]SEQ ID NO:−00809, [[SEQID]]SEQ ID NO:−00810, [[SEQID]]SEQ ID NO:−00811, [[SEQID]]SEQ ID NO:−00812, [[SEQID]]SEQ ID NO:−00813, [[SEQID]]SEQ ID NO:−00814, [[SEQID]]SEQ ID NO:−00815, [[SEQID]]SEQ ID NO:−00816, [[SEQID]]SEQ ID NO:−00817, [[SEQID]]SEQ ID NO:−00818, [[SEQID]]SEQ ID NO:−00819, [[SEQID]]SEQ ID NO:−00820, [[SEQID]]SEQ ID NO:−00821, [[SEQID]]SEQ ID NO:−00822, [[SEQID]]SEQ ID NO:−00823, [[SEQID]]SEQ ID NO:−00824, [[SEQID]]SEQ ID NO:−00825, [[SEQID]]SEQ ID NO:−00826, [[SEQID]]SEQ ID NO:−00827, [[SEQID]]SEQ ID NO:−00828, [[SEQID]]SEQ ID NO:−00829, [[SEQID]]SEQ ID NO:−00830, [[SEQID]]SEQ ID NO:−00831, [[SEQID]]SEQ ID NO:−00832, [[SEQID]]SEQ ID NO:−00833, [[SEQID]]SEQ ID NO:−00834, [[SEQID]]SEQ ID NO:−00835, [[SEQID]]SEQ ID NO:−00836, [[SEQID]]SEQ ID NO:−00837.

[0881] The following nutritive polypeptides were detected in either cell lysates or secreted supernatants of Bacillus subtilis or Bacillus megaterium: [[SEQID]]SEQ ID NO:−00003, [[SEQID]]SEQ ID NO:−00004, [[SEQID]]SEQ ID NO:−00005, [[SEQID]]SEQ ID NO:−00087, [[SEQID]]SEQ ID NO:−00099, [[SEQID]]SEQ ID NO:−00102, [[SEQID]]SEQ ID NO:−00103, [[SEQID]]SEQ ID NO:−00105, [[SEQID]]SEQ ID NO:−00115, [[SEQID]]SEQ ID NO:−00218, [[SEQID]]SEQ ID NO:−00220, [[SEQID]]SEQ ID NO:−00223, [[SEQID]]SEQ ID NO:−00226, [[SEQID]]SEQ ID NO:−00236, [[SEQID]]SEQ ID NO:−00240, [[SEQID]]SEQ ID NO:−00267, [[SEQID]]SEQ ID NO:−00271, [[SEQID]]SEQ ID NO:−00276, [[SEQID]]SEQ ID NO:−00297, [[SEQID]]SEQ ID NO:−00298, [[SEQID]]SEQ ID NO:−00299, [[SEQID]]SEQ ID NO:−00302, [[SEQID]]SEQ ID NO:−00303, [[SEQID]]SEQ ID NO:−00304, [[SEQID]]SEQ ID NO:−00305, [[SEQID]]SEQ ID NO:−00306, [[SEQID]]SEQ ID NO:−00307, [[SEQID]]SEQ ID NO:−00309, [[SEQID]]SEQ ID NO:−00318, [[SEQID]]SEQ ID NO:−00322, [[SEQID]]SEQ ID NO:−00325, [[SEQID]]SEQ ID NO:−00326, [[SEQID]]SEQ ID NO:−00327, [[SEQID]]SEQ ID NO:−00328, [[SEQID]]SEQ ID NO:−00329, [[SEQID]]SEQ ID NO:−00330, [[SEQID]]SEQ ID NO:−00332, [[SEQID]]SEQ ID NO:−00335, [[SEQID]]SEQ ID NO:−00336, [[SEQID]]SEQ ID NO:−00337, [[SEQID]]SEQ ID NO:−00338, [[SEQID]]SEQ ID NO:−00340, [[SEQID]]SEQ ID NO:−00341, [[SEQID]]SEQ ID NO:−00343, [[SEQID]]SEQ ID NO:−00344, [[SEQID]]SEQ ID NO:−00345, [[SEQID]]SEQ ID NO:−00346, [[SEQID]]SEQ ID NO:−00349, [[SEQID]]SEQ ID NO:−00350, [[SEQID]]SEQ ID NO:−00352, [[SEQID]]SEQ ID NO:−00353, [[SEQID]]SEQ ID NO:−00354, [[SEQID]]SEQ ID NO:−00355, [[SEQID]]SEQ ID NO:−00356, [[SEQID]]SEQ ID NO:−00357, [[SEQID]]SEQ ID NO:−00358, [[SEQID]]SEQ ID NO:−00359, [[SEQID]]SEQ ID NO:−00360, [[SEQID]]SEQ ID NO:−00361, [[SEQID]]SEQ ID NO:−00362, [[SEQID]]SEQ ID NO:−00363, [[SEQID]]SEQ ID NO:−00374, [[SEQID]]SEQ ID NO:−00389, [[SEQID]]SEQ ID NO:−00398, [[SEQID]]SEQ ID NO:−00403, [[SEQID]]SEQ ID NO:−00404, [[SEQID]]SEQ ID NO:−00405, [[SEQID]]SEQ ID NO:−00407, [[SEQID]]SEQ ID NO:−00409, [[SEQID]]SEQ ID NO:−00415, [[SEQID]]SEQ ID NO:−00416, [[SEQID]]SEQ ID NO:−00417, [[SEQID]]SEQ ID NO:−00418, [[SEQID]]SEQ ID NO:−00419, [[SEQID]]SEQ ID NO:−00420, [[SEQID]]SEQ ID NO:−00421, [[SEQID]]SEQ ID NO:−00424, [[SEQID]]SEQ ID NO:−00481, [[SEQID]]SEQ ID NO:−00482, [[SEQID]]SEQ ID NO:−00483, [[SEQID]]SEQ ID NO:−00484, [[SEQID]]SEQ ID NO:−00485, [[SEQID]]SEQ ID NO:−00486, [[SEQID]]SEQ ID NO:−00487, [[SEQID]]SEQ ID NO:−00488, [[SEQID]]SEQ ID NO:−00489, [[SEQID]]SEQ ID NO:−00490, [[SEQID]]SEQ ID NO:−00491, [[SEQID]]SEQ ID NO:−00492, [[SEQID]]SEQ ID NO:−00493, [[SEQID]]SEQ ID NO:−00494, [[SEQID]]SEQ ID NO:−00495, [[SEQID]]SEQ ID NO:−00496, [[SEQID]]SEQ ID NO:−00497, [[SEQID]]SEQ ID NO:−00498, [[SEQID]]SEQ ID NO:−00499, [[SEQID]]SEQ ID NO:−00500, [[SEQID]]SEQ ID NO:−00501, [[SEQID]]SEQ ID NO:−00502, [[SEQID]]SEQ ID NO:−00503, [[SEQID]]SEQ ID NO:−00504, [[SEQID]]SEQ ID NO:−00505, [[SEQID]]SEQ ID NO:−00506, [[SEQID]]SEQ ID NO:−00507, [[SEQID]]SEQ ID NO:−00508, [[SEQID]]SEQ ID NO:−00509, [[SEQID]]SEQ ID NO:−00510, [[SEQID]]SEQ ID NO:−00511, [[SEQID]]SEQ ID NO:−00512, [[SEQID]]SEQ ID NO:−00513, [[SEQID]]SEQ ID NO:−00514, [[SEQID]]SEQ ID NO:−00515, [[SEQID]]SEQ ID NO:−00516, [[SEQID]]SEQ ID NO:−00517, [[SEQID]]SEQ ID NO:−00518, [[SEQID]]SEQ ID NO:−00519, [[SEQID]]SEQ ID NO:−00520, [[SEQID]]SEQ ID NO:−00521, [[SEQID]]SEQ ID NO:−00522, [[SEQID]]SEQ ID NO:−00523, [[SEQID]]SEQ ID NO:−00524, [[SEQID]]SEQ ID NO:−00525, [[SEQID]]SEQ ID NO:−00526, [[SEQID]]SEQ ID NO:−00527, [[SEQID]]SEQ ID NO:−00528, [[SEQID]]SEQ ID NO:−00529, [[SEQID]]SEQ ID NO:−00530, [[SEQID]]SEQ ID NO:−00531, [[SEQID]]SEQ ID NO:−00532, [[SEQID]]SEQ ID NO:−00533, [[SEQID]]SEQ ID NO:−00534, [[SEQID]]SEQ ID NO:−00535, [[SEQID]]SEQ ID NO:−00536, [[SEQID]]SEQ ID NO:−00537, [[SEQID]]SEQ ID NO:−00538, [[SEQID]]SEQ ID NO:−00539, [[SEQID]]SEQ ID NO:−00540, [[SEQID]]SEQ ID NO:−00541, [[SEQID]]SEQ ID NO:−00542, [[SEQID]]SEQ ID NO:−00543, [[SEQID]]SEQ ID NO:−00544, [[SEQID]]SEQ ID NO:−00545, [[SEQID]]SEQ ID NO:−00546, [[SEQID]]SEQ ID NO:−00547, [[SEQID]]SEQ ID NO:−00548, [[SEQID]]SEQ ID NO:−00549, [[SEQID]]SEQ ID NO:−00550, [[SEQID]]SEQ ID NO:−00551, [[SEQID]]SEQ ID NO:−00552, [[SEQID]]SEQ ID NO:−00553, [[SEQID]]SEQ ID NO:−00554, [[SEQID]]SEQ ID NO:−00555, [[SEQID]]SEQ ID NO:−00556, [[SEQID]]SEQ ID NO:−00557, [[SEQID]]SEQ ID NO:−00558, [[SEQID]]SEQ ID NO:−00559, [[SEQID]]SEQ ID NO:−00560, [[SEQID]]SEQ ID NO:−00561, [[SEQID]]SEQ ID NO:−00562, [[SEQID]]SEQ ID NO:−00563, [[SEQID]]SEQ ID NO:−00564, [[SEQID]]SEQ ID NO:−00565, [[SEQID]]SEQ ID NO:−00566, [[SEQID]]SEQ ID NO:−00567, [[SEQID]]SEQ ID NO:−00568, [[SEQID]]SEQ ID NO:−00569, [[SEQID]]SEQ ID NO:−00570, [[SEQID]]SEQ ID NO:−00571, [[SEQID]]SEQ ID NO:−00572, [[SEQID]]SEQ ID NO:−00573, [[SEQID]]SEQ ID NO:−00574, [[SEQID]]SEQ ID NO:−00575, [[SEQID]]SEQ ID NO:−00576, [[SEQID]]SEQ ID NO:−00577, [[SEQID]]SEQ ID NO:−00578, [[SEQID]]SEQ ID NO:−00579, [[SEQID]]SEQ ID NO:−00580, [[SEQID]]SEQ ID NO:−00581, [[SEQID]]SEQ ID NO:−00582, [[SEQID]]SEQ ID NO:−00583, [[SEQID]]SEQ ID NO:−00584, [[SEQID]]SEQ ID NO:−00585, [[SEQID]]SEQ ID NO:−00586, [[SEQID]]SEQ ID NO:−00587, [[SEQID]]SEQ ID NO:−00588, [[SEQID]]SEQ ID NO:−00589, [[SEQID]]SEQ ID NO:−00590, [[SEQID]]SEQ ID NO:−00591, [[SEQID]]SEQ ID NO:−00592, [[SEQID]]SEQ ID NO:−00593, [[SEQID]]SEQ ID NO:−00594, [[SEQID]]SEQ ID NO:−00595, [[SEQID]]SEQ ID NO:−00596, [[SEQID]]SEQ ID NO:−00597, [[SEQID]]SEQ ID NO:−00598, [[SEQID]]SEQ ID NO:−00599, [[SEQID]]SEQ ID NO:−00600, [[SEQID]]SEQ ID NO:−00601, [[SEQID]]SEQ ID NO:−00602, [[SEQID]]SEQ ID NO:−00603, [[SEQID]]SEQ ID NO:−00604, [[SEQID]]SEQ ID NO:−00605, [[SEQID]]SEQ ID NO:−00606, [[SEQID]]SEQ ID NO:−00607, [[SEQID]]SEQ ID NO:−00608, [[SEQID]]SEQ ID NO:−00609, [[SEQID]]SEQ ID NO:−00610, [[SEQID]]SEQ ID NO:−00611, [[SEQID]]SEQ ID NO:−00612, [[SEQID]]SEQ ID NO:−00613, [[SEQID]]SEQ ID NO:−00614, [[SEQID]]SEQ ID NO:−00615, [[SEQID]]SEQ ID NO:−00616, [[SEQID]]SEQ ID NO:−00617, [[SEQID]]SEQ ID NO:−00618, [[SEQID]]SEQ ID NO:−00619, [[SEQID]]SEQ ID NO:−00620, [[SEQID]]SEQ ID NO:−00621, [[SEQID]]SEQ ID NO:−00622, [[SEQID]]SEQ ID NO:−00623, [[SEQID]]SEQ ID NO:−00624, [[SEQID]]SEQ ID NO:−00625, [[SEQID]]SEQ ID NO:−00626, [[SEQID]]SEQ ID NO:−00627, [[SEQID]]SEQ ID NO:−00628, [[SEQID]]SEQ ID NO:−00629, [[SEQID]]SEQ ID NO:−00630, [[SEQID]]SEQ ID NO:−00631, [[SEQID]]SEQ ID NO:−00632, [[SEQID]]SEQ ID NO:−00633, [[SEQID]]SEQ ID NO:−00634, [[SEQID]]SEQ ID NO:−00635, [[SEQID]]SEQ ID NO:−00636, [[SEQID]]SEQ ID NO:−00637, [[SEQID]]SEQ ID NO:−00638, [[SEQID]]SEQ ID NO:−00639, [[SEQID]]SEQ ID NO:−00640, [[SEQID]]SEQ ID NO:−00641, [[SEQID]]SEQ ID NO:−00642, [[SEQID]]SEQ ID NO:−00643, [[SEQID]]SEQ ID NO:−00644, [[SEQID]]SEQ ID NO:−00645, [[SEQID]]SEQ ID NO:−00646, [[SEQID]]SEQ ID NO:−00647, [[SEQID]]SEQ ID NO:−00648, [[SEQID]]SEQ ID NO:−00653, [[SEQID]]SEQ ID NO:−00654, [[SEQID]]SEQ ID NO:−00655, [[SEQID]]SEQ ID NO:−00656, [[SEQID]]SEQ ID NO:−00657, [[SEQID]]SEQ ID NO:−00659, [[SEQID]]SEQ ID NO:−00660, [[SEQID]]SEQ ID NO:−00664, [[SEQID]]SEQ ID NO:−00668, [[SEQID]]SEQ ID NO:−00670, [[SEQID]]SEQ ID NO:−00671, [[SEQID]]SEQ ID NO:−00672, [[SEQID]]SEQ ID NO:−00673, [[SEQID]]SEQ ID NO:−00674, [[SEQID]]SEQ ID NO:−00675, [[SEQID]]SEQ ID NO:−00676, [[SEQID]]SEQ ID NO:−00678, [[SEQID]]SEQ ID NO:−00679, [[SEQID]]SEQ ID NO:−00680, [[SEQID]]SEQ ID NO:−00681, [[SEQID]]SEQ ID NO:−00682, [[SEQID]]SEQ ID NO:−00690, [[SEQID]]SEQ ID NO:−00710, [[SEQID]]SEQ ID NO:−00711, [[SEQID]]SEQ ID NO:−00712, [[SEQID]]SEQ ID NO:−00713, [[SEQID]]SEQ ID NO:−00714, [[SEQID]]SEQ ID NO:−00715, [[SEQID]]SEQ ID NO:−00716, [[SEQID]]SEQ ID NO:−00717, [[SEQID]]SEQ ID NO:−00718, [[SEQID]]SEQ ID NO:−00719, [[SEQID]]SEQ ID NO:−00720, [[SEQID]]SEQ ID NO:−00723, [[SEQID]]SEQ ID NO:−00724, [[SEQID]]SEQ ID NO:−00725, [[SEQID]]SEQ ID NO:−00726, [[SEQID]]SEQ ID NO:−00727, [[SEQID]]SEQ ID NO:−00728, [[SEQID]]SEQ ID NO:−00729, [[SEQID]]SEQ ID NO:−00730, [[SEQID]]SEQ ID NO:−00731, [[SEQID]]SEQ ID NO:−00734, [[SEQID]]SEQ ID NO:−00735, [[SEQID]]SEQ ID NO:−00736, [[SEQID]]SEQ ID NO:−00737, [[SEQID]]SEQ ID NO:−00738, [[SEQID]]SEQ ID NO:−00739, [[SEQID]]SEQ ID NO:−00740, [[SEQID]]SEQ ID NO:−00741, [[SEQID]]SEQ ID NO:−00742, [[SEQID]]SEQ ID NO:−00743, [[SEQID]]SEQ ID NO:−00744, [[SEQID]]SEQ ID NO:−00745, [[SEQID]]SEQ ID NO:−00746, [[SEQID]]SEQ ID NO:−00747, [[SEQID]]SEQ ID NO:−00748, [[SEQID]]SEQ ID NO:−00749, [[SEQID]]SEQ ID NO:−00750, [[SEQID]]SEQ ID NO:−00751, [[SEQID]]SEQ ID NO:−00752, [[SEQID]]SEQ ID NO:−00753, [[SEQID]]SEQ ID NO:−00754, [[SEQID]]SEQ ID NO:−00755, [[SEQID]]SEQ ID NO:−00756, [[SEQID]]SEQ ID NO:−00757, [[SEQID]]SEQ ID NO:−00758, [[SEQID]]SEQ ID NO:−00759, [[SEQID]]SEQ ID NO:−00760, [[SEQID]]SEQ ID NO:−00761, [[SEQID]]SEQ ID NO:−00763, [[SEQID]]SEQ ID NO:−00765, [[SEQID]]SEQ ID NO:−00766, [[SEQID]]SEQ ID NO:−00767, [[SEQID]]SEQ ID NO:−00768, [[SEQID]]SEQ ID NO:−00769, [[SEQID]]SEQ ID NO:−00770, [[SEQID]]SEQ ID NO:−00771, [[SEQID]]SEQ ID NO:−00772, [[SEQID]]SEQ ID NO:−00773, [[SEQID]]SEQ ID NO:−00774, [[SEQID]]SEQ ID NO:−00775, [[SEQID]]SEQ ID NO:−00777, [[SEQID]]SEQ ID NO:−00778, [[SEQID]]SEQ ID NO:−00780, [[SEQID]]SEQ ID NO:−00781, [[SEQID]]SEQ ID NO:−00782, [[SEQID]]SEQ ID NO:−00783, [[SEQID]]SEQ ID NO:−00784, [[SEQID]]SEQ ID NO:−00785, [[SEQID]]SEQ ID NO:−00786, [[SEQID]]SEQ ID NO:−00787, [[SEQID]]SEQ ID NO:−00788, [[SEQID]]SEQ ID NO:−00789, [[SEQID]]SEQ ID NO:−00790, [[SEQID]]SEQ ID NO:−00791, [[SEQID]]SEQ ID NO:−00792, [[SEQID]]SEQ ID NO:−00793, [[SEQID]]SEQ ID NO:−00794, [[SEQID]]SEQ ID NO:−00795, [[SEQID]]SEQ ID NO:−00796, [[SEQID]]SEQ ID NO:−00797, [[SEQID]]SEQ ID NO:−00798, [[SEQID]]SEQ ID NO:−00799, [[SEQID]]SEQ ID NO:−00800, [[SEQID]]SEQ ID NO:−00801, [[SEQID]]SEQ ID NO:−00802, [[SEQID]]SEQ ID NO:−00803, [[SEQID]]SEQ ID NO:−00804, [[SEQID]]SEQ ID NO:−00805, [[SEQID]]SEQ ID NO:−00806, [[SEQID]]SEQ ID NO:−00807, [[SEQID]]SEQ ID NO:−00808, [[SEQID]]SEQ ID NO:−00809, [[SEQID]]SEQ ID NO:−00810, [[SEQID]]SEQ ID NO:−00811, [[SEQID]]SEQ ID NO:−00812, [[SEQID]]SEQ ID NO:−00813, [[SEQID]]SEQ ID NO:−00814, [[SEQID]]SEQ ID NO:−00815, [[SEQID]]SEQ ID NO:−00816, [[SEQID]]SEQ ID NO:−00817, [[SEQID]]SEQ ID NO:−00818, [[SEQID]]SEQ ID NO:−00819, [[SEQID]]SEQ ID NO:−00820, [[SEQID]]SEQ ID NO:−00821, [[SEQID]]SEQ ID NO:−00822, [[SEQID]]SEQ ID NO:−00823, [[SEQID]]SEQ ID NO:−00824, [[SEQID]]SEQ ID NO:−00825, [[SEQID]]SEQ ID NO:−00826, [[SEQID]]SEQ ID NO:−00827, [[SEQID]]SEQ ID NO:−00828, [[SEQID]]SEQ ID NO:−00829, [[SEQID]]SEQ ID NO:−00830, [[SEQID]]SEQ ID NO:−00831, [[SEQID]]SEQ ID NO:−00832, [[SEQID]]SEQ ID NO:−00833, [[SEQID]]SEQ ID NO:−00834, [[SEQID]]SEQ ID NO:−00835, [[SEQID]]SEQ ID NO:−00836, [[SEQID]]SEQ ID NO:−00837.

[0882] The following nutritive polypeptides were detected from the secreted supernatant of Aspergillus niger: [[SEQID]]SEQ ID NO:−00087, [[SEQID]]SEQ ID NO:−00103, [[SEQID]]SEQ ID NO:−00105, [[SEQID]]SEQ ID NO:−00112, [[SEQID]]SEQ ID NO:−00115, [[SEQID]]SEQ ID NO:−00218, [[SEQID]]SEQ ID NO:−00298, [[SEQID]]SEQ ID NO:−00341, [[SEQID]]SEQ ID NO:−00352, [[SEQID]]SEQ ID NO:−00354, [[SEQID]]SEQ ID NO:−00363, [[SEQID]]SEQ ID NO:−00406, [[SEQID]]SEQ ID NO:−00409, [[SEQID]]SEQ ID NO:−00415, [[SEQID]]SEQ ID NO:−00416, [[SEQID]]SEQ ID NO:−00417, [[SEQID]]SEQ ID NO:−00418, [[SEQID]]SEQ ID NO:−00419, [[SEQID]]SEQ ID NO:−00420, [[SEQID]]SEQ ID NO:−00421, [[SEQID]]SEQ ID NO:−00424, [[SEQID]]SEQ ID NO:−00552, [[SEQID]]SEQ ID NO:−00554.

[0883] The following nutritive polypeptides were expressed in the mammalian cell lines Chinese Hamster Ovarian-S strain (CHO-S) or Human Embryonic Kidney 293F strain (HEK293F): [[SEQID]]SEQ ID NO:−00001, [[SEQID]]SEQ ID NO:−00103, [[SEQID]]SEQ ID NO:−00105, [[SEQID]]SEQ ID NO:−00298.

### Example 13. Expression of Nutritive Polypeptides in E. coli Bacteria

[0884] A nutritive polypeptide sequence library was generated from edible species and screened to demonstrate nutritive polypeptide expression in E. coli.

[0885] Gene Synthesis & Plasmid Construction. All genes were made synthetically by either Life Technologies/GeneArt™ or DNA2.0, and optimized for expression in Escherichia coli. The genes were cloned into pET15b (EMD Millipore/Novagen) using the NdeI-BamHI restriction sites within the multiple cloning site (therefore containing an amino-terminal MGSSHHHHHHSSGLVPRGSH tag (SEQ ID NO: 3916)), or cloned into the NcoI-BamHI sites (therefore removing the amino terminal tag on the plasmid) using primers to include an amino terminal tag containing MGSHHHHHHHH (SEQ ID NO: 3917) or MGSHHHHHHHHSENLYFQG (SEQ ID NO: 3918). pET15b contains a pBR322 origin of replication, a lac-controlled T7 promoter, and a bla gene conferring resistance to carbenicillin. For manually cloned fragments, inserts were verified by Sanger sequencing using both the T7 promoter primer and the T7 terminator primer. For the secreted constructs, the genes were cloned into pJ444 vector (DNA 2.0, USA) upstream of T5 terminator with C-terminal HHHHHHHH tag (SEQ ID NO: 3919) and DsbA signal peptide (ATGAAAAAGATTTGGCTGGCGCTGGCTGGTTTAGTTTTAGCGTTTAGCGCATCGG CG (SEQ ID NO: 3920)) in N-terminal.

[0886] Strain Construction. T7 Express Competent E. coli was purchased from New England Biolabs and was used as the parent strain. T7 Express is an enhanced BL21 derivative which contains the T7 RNA polymerase in the lac operon, while still lacking the Lon and OmpT proteases. The genotype of T7 Express is: fhuA2 lacZ::T7 gene1 [lon] ompT gal sulA11 R(mcr-73::miniTn10—TetS)2 [dcm] R(zgb-210::Tn10—TetS) endA1 Δ(mcrC-mrr)114::IS10. For secreted constructs, CGSC 5610 (Yale E. coli genetic stock center, USA) was used for the study. The genotype of CGSC 5610 is F-, lacY1 or Δ(cod-lacI)6, glnV44(AS), galK2(Oc), galT22, λ-, e14-, mcrA0, rfbC1, metB1, mcrB1, hsdR2. Roughly 1 ng of purified plasmid DNA described above was used to transform chemically competent T7 Express and single colonies were selected on LB agar plates containing 100 mg/l carbenicillin after roughly 16 hr of incubation at 37° C. Single colonies were inoculated into liquid LB containing 100 mg/l carbenicillin and grown to a cell-density of OD600 nm 0.6, at which point, glycerol was supplemented to the medium at 10% (v/v) and an aliquot was taken for storage in a cryovial at 80° C.

[0887] Expression Testing. Expression cultures were grown in LB medium (10 g/l NaCl, 10 g/l tryptone, and 5 g/l yeast extract) or in BioSilta EnBase medium and induced with isopropyl β-D-1-thiogalactopyranoside (IPTG). For expression testing in LB media, a colony or stab from a glycerol stock was inoculated into 3 ml LB supplemented with 100 mg/l carbenicillin and grown overnight (roughly 16 hr) at 37° C. and 250 rpm. The next morning, the cell-density (spectrophotometrically at OD600 nm) was measured and diluted back to OD600 nm=0.05 into 3 ml LB medium supplemented with carbenicillin and grown at 37° C. and 250 rpm. At OD600 nm≈0.8±0.2 the cultures were induced with 1 mM IPTG. Heterologous expression was allowed to proceed for 2 hr at 37° C. and 250 rpm, at which point the cultures were terminated. The terminal cell-density was measured. For expression with Enbase media, a colony or stab from a glycerol stock was inoculated into 3 ml LB with 100 mg/l carbenicillin and transferred to Enbase media with 100 mg/l carbenicillin and 600 mU/l of glucoamylase at OD600=0.1 and grown overnight at 37° C. and 250 rpm and induced with 1 mM IPTG next day. Heterologous expression was allowed for 24 hours at 37° C. and 250 rpm, at which point the cultures were terminated. The terminal cell-density was measured and the cells were harvested by centrifugation (3000 rpm, 10 min, RT). To determine intracellular production the cells were lyzed with B-PER (Pierce) according to manufacturer's protocol and then assayed to measure protein of interest (POI). To determine the levels of secreted protein, 0.5-ml aliquots of the culture supernatants were filtered by a 0.22 μm filter. The filtrates were then assayed to determine the levels of secreted protein of interest (POI).

[0888] Fermentation. The intracellular soluble proteins [[SEQID]]SEQ ID NO:−00105, [[SEQID]]SEQ ID NO:−00240, [[SEQID]]SEQ ID NO:−00338, [[SEQID]]SEQ ID NO:−00341, [[SEQID]]SEQ ID NO:−00352, [[SEQID]]SEQ ID NO:−00363, [[SEQID]]SEQ ID NO:−00423, [[SEQID]]SEQ ID NO:−00424, [[SEQID]]SEQ ID NO:−00425, [[SEQID]]SEQ ID NO:−00426, [[SEQID]]SEQ ID NO:−00429, [[SEQID]]SEQ ID NO:−00559, and [[SEQID]]SEQ ID NO:−00587 were expressed in E. coli host cells NEB T7 Express (New England BioLabs) in 20 and/or 250 L fermentations. The fermentation occurred in a carbon and nitrogen rich media containing: Yeast Extract, Soy Hydrolysate, Glycerol, Glucose, and Lactose. The fermentation occurred at 30° C. and induction occurred when the Glucose present in the media was exhausted and Lactose became the primary carbon source sugar. The fermentation process time generally lasted 24 26 hrs. Fermentation run parameters were controlled at a pH of 6.9, temperature of 30° C., and a percent dissolved oxygen of 35%. The culture was supplemented with a Glycerol based feed in the later stages of the culture duration. Harvest occurred when the cells entered stationary phase and no longer required oxygen supplementation to maintain the 35% set point.

[0889] Nutritive polypeptide library gene synthesis & plasmid construction. Genes encoding for 168 different edible species polypeptide sequences were generated as linear fragments and codon-selected for expression in Escherichia coli. In some cases, a single linear fragment contained two or more nucleic acid sequences encoding two or more distinct polypeptide sequences that had a flanking 5′ NdeI restriction site and 3′ BamHI restriction site. All linear fragments were combined at equal molar concentrations. The linear fragments were digested with NdeI and BamHI and the digested mixture was cloned into pET15b (EMD Millipore/Novagen) using primers to include an amino terminal tag containing MGSHHHHHHHH (SEQ ID NO: 3917) and NdeI-BamHI restriction sites. pET15b contains a pBR322 origin of replication, a lac-controlled T7 promoter, and a bla gene conferring resistance to carbenicillin. For cloned fragments, inserts were verified by Sanger sequencing using both the T7 promoter primer and the T7 terminator primer.

[0890] 168 nutritive polypeptide library strain construction. T7 Express Competent E. coli (New England Biolabs) was used as the parent strain. T7 Express is an enhanced BL21 derivative which contains the T7 RNA polymerase in the lac operon, while lacking the Lon and OmpT proteases. The genotype of T7 Express is: fhuA2 lacZ::T7 gene1 [lon] ompT gal sulA11 R(mcr-73::miniTn10—TetS)2 [dcm] R(zgb-210::Tn10—TetS) endA1 Δ(mcrC-mrr)114::IS10. For secreted constructs, CGSC 5610 (Yale E. coli genetic stock center, USA) was used. The genotype of CGSC 5610 is F-, lacY1 or Δ(cod-lacI) 6, glnV44(AS), galK2(Oc), galT22, λ-, e14-, mcrA0, rfbC1, metB1, mcrB1, hsdR2. Approximately 10 ng of ligated DNA mixture were transformed into chemically competent T7 Express and single colonies were selected on LB agar plates containing 100 mg/l carbenicillin after roughly 16 hr of incubation at 37° C. Multiple transformations were done and approximately 1000 colonies were pooled together and suspended into LB medium. The DNA from 50-100 colonies was sequenced to determine the diversity of the generated library.

[0891] 168 nutritive polypeptide library expression testing. The colony mixtures resuspended in LB medium were initially grown in 3 ml of LB medium (10 g/l NaCl, 10 g/l tryptone, and 5 g/l yeast extract) with 100 mg/l carbenicillin, then transferred to BioSilta Enbase® media with 100 mg/l carbenicillin and 600 mU/l of glucoamylase at OD600=0.1, grown overnight at 37° C. and 250 rpm and induced with 1 mM IPTG next day. Heterologous expression was allowed for 24 hours at 37° C. and 250 rpm, at which point the cultures were terminated. The terminal cell-density was measured and the cells were harvested by centrifugation (3000 rpm, 10 min, RT). To determine intracellular production the cells were lysed using a microfluidizer and the soluble fraction was purified in 5 ml Nickel Affinity column according to manufacturer's protocol and then assayed using LC-MS/MS to identify the proteins that were expressed as described below. 114/168 different proteins were successfully solubly expressed in E. coli based on MS spectral count. Based on this result, certain genes were individually cloned and tested for intracellular soluble expression in E. coli.

[0892] Fungal nutritive polypeptides expressed in E. coli strain backgrounds. Four strains were used to express fungal nutritive polypeptides: T7 Express, SHuffle® T7, and Shuffle® T7 Express from New England Biolabs; and Origami™ B(DE3) from EMD Millipore.

[0893] T7 Express is an enhanced BL21 derivative which contains the T7 RNA polymerase in the lac operon, while lacking the Lon and OmpT proteases. The genotype of T7 Express is: fhuA2 lacZ::T7 genet [lon] ompT gal sulA11 R(mcr-73::miniTn10—TetS)2 [dcm] R(zgb-210::Tn10—TetS) endA1 Δ(mcrC-mrr)114::IS10.

[0894] SHuffle® T7 is a K12 derivative strain that promotes cytoplasmic disulfide bond formation and expresses a chromosomal copy of T7 RNAP. The genotype of SHuffle® T7 is F′ lac, pro, lacIQ/Δ(ara-leu)7697 araD139 fhuA2 lacZ::T7 genet A(phoA)PvuII phoR ahpC* galE (or U) galK λatt::pNEB3-r1-cDsbC (SpecR, lacIq) ΔtrxB rpsL150(StrR) Δgor Δ(malF)3.

[0895] SHuffle® T7 Express is a BL21 derivative strain that promotes cytoplasmic disulfide bond formation and expresses a chromosomal copy of T7 RNAP. The genotype of SHuffle® T7 Express is fhuA2 lacZ::T7 genet [lon] ompT ahpC gal λatt::pNEB3-r1-cDsbC (SpecR, lacIq) ΔtrxB sulA11 R(mcr-73::miniTn10—TetS)2 [dcm] R(zgb-210::Tn10—TetS) endA1 Δgor Δ(mcrC-mrr)114::IS10.

[0896] Origami™ B(DE3) is a BL21 derivative that contains mutations in trxB and gor that promote disulfide bond formation in the cytoplasm. The genotype of Origami™ B(DE3) is F− ompT hsdSB(rB− mB-) gal dcm lacY1 ahpC (DE3) gor522:: Tn10 trxB (KanR, TetR)

[0897] Expression screening of these strains was completed as described for E. coli.

### Example 14. Expression of Nutritive Polypeptides in B. subtilis Bacteria

[0898] Gene Synthesis & Plasmid Construction. All of the genes encoding proteins of interest (POI) were cloned by PCR. The templates for PCR amplification of these genes were either synthetic genes, generated for expression in E. coli (see above), or genomic DNA from a source organism (e.g. B. subtilis). Synthetic genes were codon optimized for expression in E. coli. All of the genes were cloned with a sequence encoding a 1×FLAG tag (a.a.=DYKDDDK (SEQ ID NO: 4135)) fused, in frame, to their 3′-terminus immediately preceding the stop codon. For expression in B. subtilis, genes were cloned in the MoBiTec (Göttingen, Germany) expression vector, pHT43, using the Gibson Assembly Master Mix (New England Biolabs, Beverly, Mass.) and the cloning host E. coli Turbo (New England Biolabs) according to manufacturer's instructions. The genes were cloned into pHT43 either as secretion expression constructs (gene fused in-frame with DNA encoding the α-amylase signal peptide (SamyQ) from Bacillus amyloliquefaciens) or as an intracellular expression constructs (gene inserted immediately downstream of the ribosomal binding site (RBS), removing the SamyQ sequence). Following transformation into E. coli, cells containing recombinant plasmids were selected on LB agar plates containing 100 μg/ml carbenicillin (Cb100). Recombinant plasmids were isolated from E. coli and their DNA sequences were verified by Sanger sequencing prior to transformation into the B. subtilis expression host.

[0899] Strain Construction. B. subtilis strain WB800N was purchased from MoBiTec (Göttingen, Germany) and used as the expression host. WB800N is a derivative of a well-studied strain (B. subtilis 168) and it has been engineered to reduce proteolytic degradation of secreted proteins by deletion of genes encoding 8 extracellular proteases (nprE, aprE, epr, bpr, mpr, nprB, vpr and wprA). B. subtilis transformations were performed according to the manufacturer's instructions. Approximately 1 μg of each expression construct was transformed into WB800N and single colonies were selected at 37° C. by plating on LB agar containing 5.0 μg/ml chloramphenicol (Cm5). Individual transformants were grown in LB broth containing Cm5 until they reached log phase. Aliquots of these cultures were mixed with glycerol (20% final concentration) and frozen at 80° C.

[0900] Expression Testing. Frozen glycerol stocks of B. subtilis expression strains were used to inoculate 1-ml of 2×-MAL medium (20 g/l NaCl, 20 g/l tryptone, and 10 g/l yeast extract, 75 g/l maltose) with Cm5, in deep well blocks (96-square wells). Culture blocks were covered with porous adhesive plate seals and incubated overnight in a micro-expression chamber (Glas-Col, Terre Haute, Ind.) at 37° C. and 880 rpm. Overnight cultures were used to inoculate fresh, 2×-MAL, Cm5 cultures, in deep well blocks, to a starting OD600=0.1. These expression cultures were incubated at 37° C., 880 rpm until the OD600=1.0 (approx. 4 hrs) at which time they were induced by adding isopropyl β-D-1-thiogalactopyranoside (IPTG) at a final concentration of 0.1 M and continuing incubation for 4 hrs. After 4 hrs, the cell densities of each culture was measured (0D600) and cells were harvested by centrifugation (3000 rpm, 10 min, RT). After centrifugation, culture supernatant was carefully removed and transferred to a new block and cell pellets were frozen at −80° C. To determine the levels of secreted protein, 0.5-ml aliquots of the culture supernatants were filtered first through a 0.45-μm filter followed by a 0.22 μm filter. The filtrates were then assayed to determine the levels of secreted protein of interest (POI).

[0901] To determine levels of intracellularly produced POI, frozen cell pellets were thawed and 0.5 g of 0.1 mm zirconium beads were added to each sample followed by 0.5 ml of PBS. The cells were lysed in the cold room (4° C.) by bead-beating for 5 min in a Qiagen TissuelyserII (Qiagen, Hilden, Germany) equipped with a 96-well plate adapter. Cell lysates were centrifuged at 3000 rpm for 10 min and the supernatant was removed and analyzed for POI concentration as described below. To determine the levels of secreted protein, 0.5-ml aliquots of the culture supernatants were filtered by a 0.22 μm filter. The filtrates were then assayed to determine the levels of secreted protein of interest (POI).

[0902] Shake flask expression. A single colony was picked from an agar plate for each [[SEQID]]SEQ ID NO: and inoculated into 5 mL of 2×Mal media. These shake flasks inocula were grown in a 30° C. shaker incubator overnight. 5mLs of this overnight culture was used to inoculate 250 mL 2×Mal. Cultures were grown for 4 hours at 30° C. then induced for 4 hours at 30° C. Cultures were harvested by centrifugation. Centrifuged supernatants for each [[SEQID]]SEQ ID NO: were sterile filtered and frozen at −80° C.

[0903] Fermentation Expression. Soluble protein for [[SEQID]]SEQ ID NO:−00105 has been secreted from engineered Bacillus subtilis strains containing episomal or integrated plasmids. The fermentation occurred at a volume of 4 L in a carbon and nitrogen rich media containing Phytone Peptone, Yeast Extract, and Glucose. Fermentation cultures were grown at 30° C., at a pH of 7.0 and a percent dissolved oxygen of 40%. Induction, via the addition of IPTG, occurred at an OD600 nm of 5.0 (+/−1.0). The cultures were supplemented with a Glucose based feed post induction. The cultures were harvested 5 8 hours post induction. The biomass was then removed via centrifugation and the supernatant was clarified via filtration and stored at 4° C. until processing.

[0904] 168 nutritive polypeptide library gene synthesis & plasmid construction. For expression in B. subtilis, the vector that was used was derived from pHT43 backbone vector (MoBiTec Göttingen, Germany) with no signal peptide and grac promoter substituted with aprE promoter and lad expression cassette removed. 168 genes encoding for 168 different protein sequences that were identified above were made synthetically by Life Technologies/GeneArt as linear fragments (GeneStrings) and selected for expression in Escherichia coli. In most cases two genes were synthesized together in a single linear fragment that had a flanking 5′ NdeI restriction site and 3′ BamHI restriction site. All the linear fragments were mixed together at equal molar concentrations. Then the linear fragments mixture was digested with NdeI and BamHI. The digested mixtures were cloned into the vector either as secretion expression constructs (gene fused in-frame with DNA encoding the lipase signal peptide (LipAsp) from Bacillus subtilis) or as an intracellular expression constructs (gene inserted immediately downstream of the ribosomal binding site (RBS), with and without N-terminal tag containing MGSHHHHHHH (SEQ ID NO: 4136)). The library of genes was ligated to the vector PCR product using T4 DNA ligase (New England Biolabs, Beverly, Mass.). The ligation products were transformed into the cloning host, E. coli Turbo (New England Biolabs) according to manufacturer's instructions. 50-100 colonies were sequenced to determine the diversity of the leader peptide library. The colonies on the agar plate were then suspended in LB media and harvested for plasmid purification.

[0905] 168 nutritive polypeptide library strain construction. WB800N is a derivative of a well-studied strain (B. subtilis 168) and it has been engineered to reduce proteolytic degradation of secreted proteins by deletion of genes encoding 8 extracellular proteases (nprE, aprE, epr, bpr, mpr, nprB, vpr and wprA). B. subtilis strain WB800N was purchased from MoBiTec (Göttingen, Germany) and was modified to have the following mutations WB800N: pXylA-comK::Erm, degU32(Hy), ΔsigF. This new strain was used as the expression host. Roughly 1 μg of the plasmid mixture purified from E. coli cells was transformed into the expression strain. After transformation, 100 μL of the culture were plated onto four LB 1.5% agar plates containing 5 mg/L chloramphenicol and incubated at 37° C. for 16 hrs. After incubation, 2 mL of LB media with 5 mg/L chloramphenicol were added to the surface of each plate containing several thousand transformants, and the cells were suspended in the surface medium by scraping with a cell spreader and mixing. Suspended cells from the four replicates were pooled together to form the preinoculum culture for the expression experiment.

[0906] 168 nutritive polypeptide expression testing. The OD600 of the preinoculum culture made from resuspended cells was measured using a plate reader to be roughly 20-25. A 500 mL baffled shake flask containing 50 mL of 2×Mal medium (20 g/L NaCl, 20 g/L Tryptone, 10 g/L yeast extract, 75 g/L D-Maltose) with 5 mg/L chloramphenicol was inoculated to OD600≈0.2 to form the inoculum culture, and incubated at 30° C. shaking at 250 rpm for roughly 6 hours. OD600 was measured and the inoculum culture was used to inoculate the expression culture in a 2 L baffled shake flask containing 250 ml 2×Mal medium with 5 mg/L chloramphenicol, 1× Teknova Trace Metals, and 0.01% Antifoam 204 to an OD600 of 0.1. The culture was shaken for 30° C. and 250 rpm for 18 hours, at which point the culture was harvested. For the secreted protein library constructs, the terminal cell density was measured and the supernatant was harvested by centrifugation (5000×g, 30 min, RT) and filtered using 0.22 um filter. For the intracellular protein library constructs, the terminal cell density was measured and the cells were harvested by centrifugation (5000×g, 30 min, RT). Cells were then lysed using microfluidizer and the soluble fraction was purified using nickel affinity column if the construct library had N-terminal His tag. Otherwise the soluble fraction was used for further analysis. All the samples were run on SDS-PAGE gels, separated into ten fractions, and then analyzed using LC-MS/MS as described below. 40/168 proteins were successfully secreted, 10/168 proteins were successfully produced intracellularly without His tag and 28/168 proteins were successfully produced intracellularly with 5′ 8×His tag (SEQ ID NO: 3919) in Bacillus subtilis. Based on the results, certain genes were individually cloned and tested for individual secretion in Bacillus subtilis.

[0907] Secreted nutritive polypeptide plasmid construction. For this study, the pHT43 backbone vector with no signal peptide was modified by removing the SamyQ signal peptide to allow for the native signal peptide to guide secretion, substituting the grac promoter with the aprE promoter, removing the lad region, and adding a 1×FLAG tag (DYKDDDDK (SEQ ID NO: 3914)) before the terminator region. The unmodified pHT43 vector from MoBiTec contains the Pgrac promoter, the SamyQ signal peptide, Amp and Cm resistance genes, a lad region, a repA region, and the ColE1 origin of replication. To amplify the genes of interest, genomic DNA preps were made from wild-type Bacillus strains. Secreted nutritive polypeptide genes including their native signal peptide coding regions were PCR amplified using PCR primers with tails containing 25 bp homology regions to the pHT43 backbone and were run on a 1% Agarose TAE gel to check for correct insert size. 104 from each PCR were pooled together into a single library of inserts, and the mix was Gibson ligated to a pHT43 backbone vector. The ligation was transformed into 10-Beta electrocompetent cells (New England Biolabs), and transformed cells were plated at a 10-1 dilution onto four LB agar plates with 100 mg/L carbenicillin. One plate was sequenced using a forward primer that binds in the promoter region and a reverse primer that binds in the terminator region. 2 mL of LB medium with 100 mg/L carbenicillin was added to the remaining three plates. Cells were scraped and suspended into the LB medium, and the plasmids were extracted from the cell suspensions to form the multiplex plasmid mix to be transformed into the expression strain. The secreted polypeptide library strain construction and expression were done similar to 168 nutritive polypeptide library strain construction and expression testing.

[0908] Secretion leader peptide library construction. Secretion signal peptide libraries facilitate the secretion of any given protein of interest. One approach to enhancing secretion is to fuse a library of signal peptide sequences to the protein of interest and screen for those that result in the highest level of secretion. The signal peptide library described here consists of 173 signal peptides that were identified as being associated to naturally Sec mediated secreted proteins in Bacillus subtilis (Brockmeier et al Molecular Biology, 2006). A signal peptide library was generated for [[SEQID]]SEQ ID NO:−43136, starting with plasmid pES1207 which has [[SEQID]]SEQ ID NO:−43136 fused to the signal peptide from the B. amyloliquefaciens α-amylase (SamyQ). pES1207 was used as template for a PCR reaction with primers, Pfwd and Prev, which amplified the entire plasmid except for the SamyQ sequence. Pfwd and Prev possessed tails that had AarI restriction sites and the PCR products were purified and cut with Aar I. The fragment was then dephosphorylated using Antarctic phosphatase (New England Biolabs, Beverly, Mass.). DNA encoding the individual signal peptides was constructed by duplexing single stranded oligonucleotides comprising the forward- and reverse-strands of each signal peptide sequence. The oligonucleotides were designed such that single strand tails were formed at the 5′-ends of the duplexed molecule. These were complementary of the overhangs generated by the AarI digestion of the vector PCR fragment. To duplex the oligonucleotides, the direct strand and the reverse strand oligonucleotides were mixed together, phosphorylated using T4 polynucleotide kinase (New England Biolabs, Beverly, Mass.) and annealed. Post annealing, signal peptide DNA sequences were mixed in equal proportion in a single tube. The library of signal peptides was ligated to the vector PCR product using T4 DNA ligase (New England Biolabs, Beverly, Mass.). The ligation products were transformed into the cloning host, E. coli Turbo (New England Biolabs) according to manufacturer's instructions. 50-100 colonies were sequenced to determine the diversity of the leader peptide library for [[SEQID]]SEQ ID NO:−00298 and [[SEQID]]SEQ ID NO:−00338. The colonies on the agar plate were then suspended in LB media and harvested for plasmid purification.

[0909] Secretion leader peptide library strain construction. B. subtilis strain WB800N (MoBiTec, Göttingen, Germany) was used as the expression host. Approximately 10 μg of signal peptide library of a particular protein construct was transformed into WB800N and single colonies were selected at 37° C. by plating on LB agar containing 5.0 μg/ml chloramphenicol (Cm5). The leader peptide library screening for [[SEQID]]SEQ ID NO:−00105, [[SEQID]]SEQ ID NO:−00352, [[SEQID]]SEQ ID NO:−00341, [[SEQID]]SEQ ID NO:−00103 were carried out in B. subtilis WB800N that has been modified to have mutations in the sigF sporulation factor and also the intracellular serine protease (ispA) was disrupted with an antibiotic marker. The strain also had an inducible comK (the competence initiation transcription factor) integrated into chromosome for higher transformation efficiency.

[0910] Secretion leader peptide library expression screening. 400-500 individual transformants of the B. subtilis signal peptide library were used to inoculate individual, 1-ml cultures of 2×-MAL medium (20 g/l NaCl, 20 g/l tryptone, and 10 g/l yeast extract, 75 g/l maltose) with Cm5, in deep well blocks (96-square wells). In addition to the signal peptide library strains, a strain containing plasmid with the protein of interest and the SamyQ leader peptide was inoculated as a control. Culture blocks were covered with porous adhesive plate seals and incubated overnight in a micro-expression chamber (Glas-Col, Terre Haute, Ind.) at 37° C. and 800 rpm. Overnight cultures were used to inoculate fresh, 2×-MAL, Cm5 cultures, in deep well blocks, to a starting OD600=0.15.

[0911] Expression cultures were incubated at 37° C., 880 rpm until the OD600=1.0 (approx. 4 hrs) at which time they were induced by adding isopropyl r3-D-1-thiogalactopyranoside (IPTG) at a final concentration of 1 mM and continuing incubation for 4 hrs. After 4 hrs, the cell densities of each culture was measured (0D600) and cells were harvested by centrifugation (3000 rpm, 10 min, RT). After centrifugation, the culture supernatant was carefully removed and transferred to a new block and cell pellets were frozen at −80° C. To determine the levels of secreted protein, 0.5-ml aliquots of the culture supernatants were filtered first through a 0.45-μm filter followed by a 0.22 μm filter. The filtrates were then assayed by Chip electrophoresis, as described herein, to determine the levels of secreted protein of interest (POI) and compared with the level of secretion of base construct.

[0912] Diluted overnight cultures were used as inoculum for LB broth cultures containing Cm5. These cultures were grown at 37 C until they reached log phase. Aliquots of these cultures were mixed with glycerol (20% final concentration) and frozen at 80° C. The top 10-15 hits were then purified using Instagene matrix (Biorad, USA) and amplified around the signal peptide and sent for sequencing to identify the signal peptide sequence.

TABLE E14A
Exemplary results of B. subtilis leader peptide library screening.

| | | | [[SEQID]] | [[SEQID]] | [[SEQID]] | [[SEQID]] | [[SEQID]] | [[SEQID]] | |
|---|---|---|---|---|---|---|---|---|---|
| [[SEQ | | | SEQ | SEQ | SEQ | SEQ | SEQ | SEQ | |
| ID]] | | | ID NO: - | ID NO: - | ID NO: - | ID NO: - | ID NO: - | ID NO: - | Other |
| SEQ ID | Gene | | 298 | 00338 | 00105 | 00352 | 00341 | 00103 | SEQ IDs |
| NO: | Name | Protein Sequence | mg/l/OD | mg/l/OD | mg/l/OD | mg/l/OD | mg/l/OD | mg/l/OD | mg/l/OD |
| 3921 | abnA | MKKKKTWKRFLHFSSA | 4.4 | 9.5 | 135.7 | ~ | 148.14 | 12.1 | 3.1 |
| | | ALAAGLIFTSAAPAEA | | | | | | | [[SEQID]] |
| | | | | | | | | | SEQ |
| | | | | | | | | | ID NO: - |
| | | | | | | | | | 00405 |
| 3922 | bglC | MKRSISIFITCLLITLLT | 7.8 | ~ | 73.6 | 2.7 | 33.9 | 12.1 | ~ |
| | | MGGMIASPASA | | | | | | | |
| 3923 | bpr | MRKKTKNRLISSVLSTV | ~ | ~ | ~ | ~ | 40.4 | ~ | ~ |
| | | VISSLLFPGAAGA | | | | | | | |
| 3924 | glPQ | MRKNRILALFVLSLGLL | ~ | 5.7 | ~ | ~ | 41.9 | ~ | 5.5 |
| | | SFMVTPVSA | | | | | | | [[SEQID]] |
| | | | | | | | | | SEQ |
| | | | | | | | | | ID NO: - |
| | | | | | | | | | 00398 |
| 3925 | lipA | MKFVKRRIIALVTILML | 14.1 | ~ | ~ | 10.9 | ~ | 16.1 | ~ |
| | | SVTSLFALQPSAKAA | | | | | | | |
| 3926 | lytB | MKSCKQLIVCSLAAILL | ~ | 3.4 | ~ | ~ | ~ | ~ | ~ |
| | | LIPSVSFA | | | | | | | |
| 3927 | lytF | MKKKLAAGLTASAIVG | ~ | ~ | ~ | ~ | -~ | 14.8 | ~ |
| | | TTLVVTPAEA | | | | | | | |
| 3928 | mpr | MKLVPRFRKQWFAYLT | 10.8 | ~ | ~ | ~ | ~ | ~ | ~ |
| | | VLCLALAAAVSFGVPA | | | | | | | |
| | | KA | | | | | | | |
| 3929 | nprB | MRNLTKTSLLLAGLCT | ~ | ~ | ~ | ~ | 37.5 | ~ | ~ |
| | | AAQMVFVTHASA | | | | | | | |
| 3930 | pelB | MKRLCLWFTVFSLFLV | ~ | ~ | ~ | ~ | 64.4 | ~ | ~ |
| | | LLPGKALG | | | | | | | |
| 3931 | penP | MKLKTKASIKFGICVGL | ~ | ~ | ~ | 2.8 | ~ | ~ | ~ |
| | | LCLSITGFTPFFNSTHAE | | | | | | | |
| | | A | | | | | | | |
| 3932 | phoB | MKKFPKKLLPIAVLSSI | 7.9 | ~ | ~ | ~ | ~ | ~ | ~ |
| | | AFSSLASGSVPEASA | | | | | | | |
| 3933 | wapA | MKKRKRRNFKRFIAAF | ~ | 7 | ~ | 2.14 | ~ | ~ | ~ |
| | | LVLALMISLVPADVLA | | | | | | | |
| 3934 | xynA | MFKFKKNFLVGLSAAL | 4.3 | 9.8 | 114.4 | ~ | 83.3 | 13.4 | ~ |
| | | MSISLFSATASA | | | | | | | |
| 3935 | ybfO | MKRMIVRMTLPLLIVC | ~ | ~ | ~ | 0.69 | ~ | ~ | ~ |
| | | LAFSSFSASARA | | | | | | | |
| 3936 | yckD | MKRITINIITMFIAAAVI | ~ | ~ | ~ | ~ | 61.7 | ~ | ~ |
| | | SLTGTAEA | | | | | | | |
| 3937 | yddT | MRKKRVITCVMAASLT | ~ | ~ | 135.6 | ~ | ~ | ~ | ~ |
| | | LGSLLPAGYASA | | | | | | | |
| 3938 | yfhK | MKKKQVMLALTAAAG | ~ | ~ | ~ | ~ | ~ | 20.8 | ~ |
| | | LGLTALHSAPAAKA | | | | | | | |
| 3939 | yfjS | MKWMCSICCAAVLLA | ~ | ~ | ~ | ~ | ~ | 9.4 | ~ |
| | | GGAAQA | | | | | | | |
| 3940 | yjcM | MKKELLASLVLCLSLSP | ~ | ~ | 83.4 | ~ | 80.2 | ~ | ~ |
| | | LVSTNEVFA | | | | | | | |
| 3941 | yjdB | MNFKKTVVSALSISAL | ~ | ~ | 152.7 | ~ | ~ | 14.3 | ~ |
| | | ALSVSGVASA | | | | | | | |
| 3942 | yjfA | MKRLFMKASLVLFAVV | ~ | ~ | ~ | ~ | ~ | 20 | ~ |
| | | FVFAVKGAPAKA | | | | | | | |
| 3943 | ykoJ | MLKKKWMVGLLAGCL | ~ | ~ | ~ | 2.23 | 132.5 | ~ | ~ |
| | | AAGGFSYNAFA | | | | | | | |
| 3944 | ylqB | MKKIGLLFMLCLAALF | ~ | ~ | ~ | ~ | ~ | 13.3 | ~ |
| | | TIGFPAQQADA | | | | | | | |
| 3945 | yndA | MRFTKVVGFLSVLGLA | ~ | ~ | 124.3 | ~ | ~ | ~ | ~ |
| | | AVFPLTAQA | | | | | | | |
| 3946 | yqgA | MKQGKFSVFLILLLML | 3.9 | ~ | ~ | ~ | ~ | ~ | ~ |
| | | TLVVAPKGKAEA | | | | | | | |
| 3947 | yraJ | MTLTKLKMLSMLTVMI | ~ | 6.3 | ~ | ~ | ~ | ~ | ~ |
| | | ASLFIFSSQALA | | | | | | | |
| 3948 | yuaB | MKRKLLSSLAISALSLG | ~ | ~ | ~ | ~ | ~ | ~ | 2.5 |
| | | LLVSAPTASFAAE | | | | | | | [[SEQID]] |
| | | | | | | | | | SEQ |
| | | | | | | | | | ID NO: - |
| | | | | | | | | | 00404 |
| 3949 | yurI | MTKKAWFLPLVCVLLI | ~ | ~ | ~ | 2.26 | ~ | ~ | ~ |
| | | SGWLAPAASASA | | | | | | | |
| 3950 | yvcE | MRKSLITLGLASVIGTS | ~ | ~ | 124.4 | ~ | ~ | 14.6 | ~ |
| | | SFLIPFTSKTASA | | | | | | | |
| 3951 | yvgO | MKRIRIPMTLALGAALT | ~ | ~ | ~ | ~ | ~ | 17.7 | ~ |
| | | IAPLSFASA | | | | | | | |
| 3952 | yvnB | MRKYTVIASILLSFLSV | ~ | ~ | ~ | ~ | ~ | 26.2 | ~ |
| | | LSGG | | | | | | | |
| 3953 | ywaD | MKKLLTVMTMAVLTA | ~ | ~ | ~ | ~ | ~ | ~ | 3.4 |
| | | GTLLLPAQSVTPAAHA | | | | | | | [[SEQID]] |
| | | | | | | | | | SEQ |
| | | | | | | | | | ID NO: - |
| | | | | | | | | | 403 |
| 3954 | ywsB | MNKPTKLFSTLALAAG | ~ | ~ | 131 | ~ | ~ | ~ | ~ |
| | | MTAAAAGGAGTRIA | | | | | | | |
| 3955 | yxaK | MVKSFRMKALIAGAAV | ~ | ~ | ~ | 3.7 | ~ | ~ | ~ |
| | | AAAVSAGAVSDVPAA | | | | | | | |
| | | KVLQPTAAYA | | | | | | | |
| 3956 | yxiT | MKWNNMLKAAGIAVL | ~ | 7.9 | ~ | 0.95 | 41.5 | ~ | ~ |
| | | LFSVFAYAAPSLKAVQ | | | | | | | |
| | | A | | | | | | | |

### Example 15. Expression of Nutritive Polypeptides in Aspergillus niger Fungi

[0913] Gene Synthesis & Plasmid Construction. Genes encoding natively secreted proteins were PCR amplified from the Aspergillus niger ATCC 64974 using primers designed from the genome sequence of Aspergillus niger CBS 513.88. In one example, genes included native 5′ secretion sequences and were cloned into the expression vector pAN56-1 (Genbank: Z32700.1) directly under the control of the gpdA promoter from Aspergillus nidulans with the addition of a C-terminal 3×FLAG tag (DYKDHDGDYKDHDIDYKDDDDK (SEQ ID NO: 3915)). In another example genes included only the mature peptide with the addition of a heterologous 5′ secretion signal. Plasmids were constructed using the Gibson Assembly® Kit (New England Biolabs, Beverly, Mass.). Recombinant plasmids were sequence verified before transformation into Aspergillus hosts.

[0914] pFGLAHIL6T was obtained from the BCCM/LMBP (Ghent, Netherlands). Plasmids were constructed using the Gibson Assembly® Kit (New England Biolabs, Beverly, Mass.). Recombinant plasmids were sequence verified before transformation into Aspergillus hosts.

[0915] The pyrA nutritional marker was PCR amplified from Aspergillus niger ATCC 64974 using primers designed from genome sequence of Aspergillus niger ATCC 1015. The pyrA PCR fragment was digested with XbaI and ligated into an XbaI fragment of pCSN44 (Staben et al., 1989) to construct pES1947. pCSN44 was obtained from the BCCM/LMBP (Ghent, Netherlands). The recombinant plasmid was sequence verified before transformation into Aspergillus hosts.

[0916] Strain Construction. A protease deficient derivate of Aspergillus niger ATCC 62590 was used as the expression host. Expression vectors were co-transformed with pES1947 using the protoplast method as described in Punt et al., 1992, Methods in Enzymology, 216, 447-457. Approximately 5 ug of each plasmid was transformed into Aspergillus niger protoplasts. Transformants were selected on minimal media supplemented with 1.2 M sorbitol and 1.5% bacto agar (10 g/l glucose, 4 g/l sodium nitrate, 20 ml/l salts solution (containing 26.2 g/l potassium chloride and 74.8 g/l Potassium phosphate monobasic at pH 5.5), 1 ml/l vitamin solution (containing 100 mg/l Pyridoxine hydrochloride, 150 mg/l Thiamine hydrochloride, 750 mg/l 4-Aminobenzoic acid, 2.5 g/l Nicotinic acid, 2.5 g/l riboflavin, 20 g/l choline chloride, and 30 mg/l biotin), and 1 ml/l of metals solution (containing 20 g/l Zinc sulfate heptahydrate (ZnSO4-7H2O), 11 g/l Boric acid (H3B03), 5 g/l Manganese (II) chloride tetrahydrate (MnCl2-4H2O), 5 g/l Iron (II) sulfate heptahydrate (FeSO4-7H2O), 1.7 g/l Cobalt(II) chloride hexahydrate (CoCl2-6H2O), 1.6 g/l Copper(II) sulfate pentahydrate (CuSO4-5H2O), 1.5 g/l Sodium molybdate dihydrate (NaMoO4-2H2O), and 5.0 g/l EDTA disodium salt dihydrate (Na2EDTA-2H2O) at pH 6.5). Individual transformants were isolated on minimal media plates and allowed to grow at 30° C. until they sporulated. Spores were harvested in water and stored at 4 C.

[0917] Expression Testing. Spore stocks of Aspergillus niger strains were inoculated at 10⁶ spores/mL into 2 mL of CM (MM plus 5.0 g/l yeast extract, 2.0 g/l casamino acids) adjusted to pH 7 with 40 mM MES and SigmaFast Protease Inhibitor Cocktail (1 tab/100 mL, Sigma Aldrich) in 24 well square bottom deep well blocks. Culture blocks were covered with porous adhesive plate seals and incubated for 48 hrs in a micro-expression chamber (Glas-Col, Terre Haute, Ind.) at 30° C. at 600 rpm. After the growth period, 0.5-ml aliquots of the culture supernatants were filtered first through a 25 μm/0.45-μm dual stage filter followed by a 0.22 μm filter. The filtrates were then assayed to determine the levels of secreted protein of interest (POI).

TABLE E15A
Exemplary results of Aspergillus leader peptide library screening.

| | signal peptide | | |
|---|---|---|---|
| [[SEQID]] | name (gene | | |
| SEQ ID | name_species | | |
| NO: | name) | signal sequence | Genotype |
| 3957 | native signal | MRWLLTSSALLVPAAA | PgpdA-native signal peptide-[[SEQID]]SEQ ID NO: - |
| | peptide | | 00409-3XFlag |
| 3958 | AXHA_ASPNG | MKFLKAKGSLLSSGIYLIALAPFV | PgpdA-AXHA_ASPNG-[[SEQID]]SEQ ID NO: -00409- |
| | | NA | 3XFlag |
| 3959 | PPIB_ASPNG | MNFKNIFLSFFFVLAVGLALVHA | PgpdA-PPIB_ASPNG-[[SEQID]]SDEQ ID NO: -00409- |
| | | | 3XFlag |
| 3960 | FAEA_ASPNG | MKQFSAKYALILLATAGQALA | PgpdA-FAEA_ASPNG-[[SEQID]]SEQ ID NO: -00409- |
| | | | 3XFlag |
| 3961 | BGAL_ASPNG | MKLSSACAIALLAAQAAGA | PgpdA-BGAL_ASPNG-[[SEQID]]SEQ ID NO: -00409- |
| | | | 3XFlag |
| 3962 | PLYA_ASPNG | MKYSTIFSAAAAVFAGSAAA | PgpdA-PLYA_ASPNG-[[SEQID]]SEQ ID NO: -00409- |
| | | | 3XFlag |
| 3963 | PRTA_ASPNG | MKFSTILIGSLFATAALA | PgpdA-PRTA_ASPNG-[[SEQID]]SEQ ID NO: -00409- |
| | | | 3XFlag |
| 3964 | AGALC_ASPNG | MIGSSHAVVALGLFTLYGNSAA | PgpdA-AGALC_ASPNG-[[SEQID]]SEQ ID NO: -00409- |
| | | | 3XFlag |
| 3965 | PHYB_ASPNG | MPRTSLLTLACALATGASA | PgpdA-PHYB_ASPNG-[[SEQID]]SEQ ID NO: -00409- |
| | | | 3XFlag |
| 3966 | AORSN_ASPOR | MRPLSHLSFFNGLLLGLSALSA | PgpdA-AORSN_ASPOR-[[SEQID]]SEQ ID NO: -00409- |
| | | | 3XFlag |
| 3967 | DPP5_ASPOR | MGALRWLSIAATASTALA | PgpdA-DPP5_ASPOR-[[SEQID]]SEQ ID NO: -00409- |
| | | | 3XFlag |
| 3968 | PHYA_ASPNG | MGVSAVLLPLYLLSGVTSGLAVP | PgpdA-PHYA_ASPNG-[[SEQID]]SEQ ID NO: -00409- |
| | | | 3XFlag |
| 3969 | EXG_ASPOR | MLPLLLCIVPYCWS | PgpdA-EXG_ASPOR-[[SEQID]]SEQ ID NO: -00409- |
| | | | 3XFlag |
| 3970 | native signal | MHFLQNAVVAATMGAALA | PgpdA-native signal peptide-[[SEQID]]SEQ ID NO:- |
| | peptide | | 00420-3XFlag |
| 3971 | PPALASPNG | MKGTAASALLIALSATAAQA | PgpdA-PPA1_ASPNG-[[SEQID]]SEQ ID NO: -00420- |
| | | | 3XFlag |
| 3972 | PEPC_ASPNG | MKGILGLSLLPLLTAA | PgpdA-PEPC_ASPNG-[[SEQID]]SEQ ID NO: -00420- |
| | | | 3XFlag |
| 3973 | PRTA_ASPNG | MKFSTILTGSLFATAALA | PgpdA-PRTA_ASPNG-[[SEQID]]SEQ ID NO: -00420- |
| | | | 3XFlag |
| 3974 | AGALC_ASPNG | MIGSSHAVVALGLFTLYGHSAA | PgpdA-AGALC_ASPNG-[[SEQID]]SEQ ID NO: -00420- |
| | | | 3XFlag |
| 3975 | RNT1_ASPOR | MMYSKLLTLTTLLLPTALALPSLV | PgpdA-RNT1_ASPOR-[[SEQID]]SEQ ID NO: -00420- |
| | | ER | 3XFlag |
| 3976 | PGLRLASPNG | MHSYQLLGLAAVGSLVSA | PgpdA-PGLR1_ASPNG-[[SEQID]]SEQ ID NO: -00420- |
| | | | 3XFlag |
| 3977 | ORYZ_ASPOR | MQSIKRTLLLLGAILPAVLGA | PgpdA-ORYZ_ASPOR-[[SEQID]]SEQ ID NO: -00420- |
| | | | 3XFlag |
| 3978 | PLYB_ASPNG | MHYKLLFAAAAASLASAVSA | PgpdA-PLYB_ASPNG-[[SEQID]]SEQ ID NO: -00420- |
| | | | 3XFlag |
| 3979 | NUS1_ASPOR | MPRLLPISAATLALAQLTYG | PgpdA-NUS1_ASPOR-[[SEQID]]SEQ ID NO: -00420- |
| | | | 3XFlag |
| 3980 | PHYB_ASPNG | MPRTSLLTLACALATGASA | PgpdA-PHYB_ASPNG-[[SEQID]]SEQ ID NO: -00420- |
| | | | 3XFlag |
| 3981 | TAN_ASPOR | MRQHSRMAVAALAAGANA | PgpdA-TAN_ASPOR-[[SEQID]]SEQ ID NO: -00420- |
| | | | 3XFlag |
| 3982 | PDI_ASPNG | MRSFAPWLVSLLGASAVVAA | PgpdA-PDI_ASPNG-[[SEQID]]SEQ ID NO: -00420- |
| | | | 3XFlag |
| 3983 | XYN2_ASPNG | MLTKNLLLCFAAAKAALA | PgpdA-XYN2_ASPNG-[[SEQID]]SEQ ID NO: -00420- |
| | | | 3XFlag |
| 3984 | PHYA_ASPOR | MAVLSVLLPITFLLSSVTG | PgpdA-PHYA_ASPOR-[[SEQID]]SEQ ID NO: -00420- |
| | | | 3XFlag |
| 3985 | DPP5_ASPOR | MGALRWLSIAATASTALA | PgpdA-DPP5_ASPOR-[[SEQID]]SEQ ID NO: -00420- |
| | | | 3XFlag |
| 3986 | PHYA_ASPNG | MGVSAVLLPLYLLSGVTSGLAVP | PgpdA-PHYA_ASPNG-[[SEQID]]SEQ ID NO: -00420- |
| | | | 3XFlag |
| 3987 | PEPA_ASPNG | MVVFSKTAALVLGLSTAVSA | PgpdA-PEPA_ASPNG-[[SEQID]]SEQ ID NO: -00420- |
| | | | 3XFlag |
| 3988 | AGLU_ASPNG | MVKLTHLLARAWLVPLAYGASQ | PgpdA-AGLU_ASPNG-[[SEQID]]SEQ ID NO: -00420- |
| | | SLL | 3XFlag |
| 3989 | ABFA_ASPNG | MVAFSALSGVSAVSLLLSLVQNA | PgpdA-ABFA_ASPNG-[[SEQID]]SEQ ID NO: -00420- |
| | | HG | 3XFlag |
| 3990 | AMYG_ASPNG | MSFRSLLALSGLVCTGLA | PgpdA-AMYG_ASPNG-[[SEQID]]SEQ ID NO: -00420- |
| | | | 3XFlag |
| 3991 | PHOA_ASPNG | MFTKQSLVTLLGGLSLAVA | PgpdA-PHOA_ASPNG-[[SEQID]]SEQ ID NO: -00420- |
| | | | 3XFlag |
| 3992 | ABFB_ASPNG | MFSRRNLVALGLAATVSA | PgpdA-ABFB_ASPNG-[[SEQID]]SEQ ID NO: -00420- |
| | | | 3XFlag |

[0918] Aspergillus niger signal peptide library construction. It is difficult to predict which secretion signal peptide will facilitate the secretion of any given protein of interest best. Therefore, one approach to optimizing secretion is to fuse a library of signal peptide sequences to the protein and screen for those that result in the highest level of secretion. We constructed a signal peptide library for [[SEQID]]SEQ ID NO:−00409 and [[SEQID]]SEQ ID NO:−00420. Table EISA shows the signal peptides that were fused with [[SEQID]]SEQ ID NO:−00409 and [[SEQID]]SEQ ID NO:−00420. DNA encoding the individual signal peptides was constructed by duplexing single stranded oligonucleotides comprising the forward- and reverse-strands of each signal peptide sequence. The oligonucleotides were designed such that single strand tails were formed at the 5′-ends of the duplexed molecule. Genes encoding natively secreted proteins [[SEQID]]SEQ ID NO:−00409 and [[SEQID]]SEQ ID NO:−00420 were PCR amplified from the Aspergillus niger ATCC 64974 using primers designed from the genome sequence of Aspergillus niger CBS 513.88. Genes included native 5′ secretion sequences and were cloned into the expression vector pAN56-1 (Genbank: Z32700.1) directly under the control of the gpdA promoter from Aspergillus nidulans with the addition of a C-terminal 3×FLAG tag (DYKDHDGDYKDHDIDYKDDDDK (SEQ ID NO: 3915)). Then the vectors were amplified without the native signal peptide and plasmids with different signal peptides were reconstructed with the duplex signal peptide sequences using the Gibson Assembly® Kit (New England Biolabs, Beverly, Mass.). Recombinant plasmids were sequence verified before transformation into Aspergillus hosts.

[0919] The pyrA nutritional marker was PCR amplified from Aspergillus niger ATCC 64974 using primers designed from genome sequence of Aspergillus niger ATCC 1015. The pyrA PCR fragment was digested with XbaI and ligated into an XbaI fragment of pCSN44 (Staben et al., 1989) to construct pES1947. pCSN44 was obtained from the BCCM/LMBP (Ghent, Netherlands). The recombinant plasmid was sequence verified before transformation into Aspergillus hosts.

[0920] Aspergillus niger signal peptide library strain construction. A protease deficient derivate of Aspergillus niger ATCC 62590 was used as the expression host. Each signal peptide-gene combination vector was individually co-transformed with plasmid containing the nutritional marker pyrG using the protoplast method as described in Punt et al., 1992. Approximately 5 ug of each plasmid were transformed into Aspergillus niger protoplasts. Transformants were selected on minimal media supplemented with 1.2 M sorbitol and 1.5% bacto agar (10 g/l glucose, 4 g/l sodium nitrate, 20 ml/l salts solution (containing 26.2 g/l potassium chloride and 74.8 g/l Potassium phosphate monobasic at pH 5.5), 1 ml/l vitamin solution (containing 100 mg/Pyridoxine hydrochloride, 150 mg/l Thiamine hydrochloride, 750 mg/l 4-Aminobenzoic acid, 2.5 g/l Nicotinic acid, 2.5 g/l riboflavin, 20 g/l choline chloride, and 30 mg/l biotin), and 1 ml/l of metals solution (containing 20 g/l Zinc sulfate heptahydrate (ZnSO4-7H2O), 11 g/l Boric acid (H3B03), 5 g/l Manganese (II) chloride tetrahydrate (MnCl2-4H2O), 5 g/l Iron (II) sulfate heptahydrate (FeSO4-7H2O), 1.7 g/l Cobalt(II) chloride hexahydrate (CoCl2-6H2O), 1.6 g/l Copper(II) sulfate pentahydrate (CuSO4-5H2O), 1.5 g/l Sodium molybdate dihydrate (NaMoO4-2H2O), and 5.0 g/l EDTA disodium salt dihydrate (Na2EDTA-2H2O) at pH 6.5). Individual transformants were isolated on minimal media plates and allowed to grow at 30 C until they sporulated.

[0921] Aspergillus niger signal peptide library expression testing. Six different primary transformants from each construct were inoculated into 1 ml of minimal media as defined above supplemented with 5.0 g/l yeast extract, 2.0 g/l casamino acids) adjusted to pH 7 with 160 mM MES in 96 deep well culture blocks. Culture blocks were covered with porous adhesive plate seals and incubated for 48 hrs in a micro-expression chamber (Glas-Col, Terre Haute, Ind.) at 33° C. at 800 rpm. After the growth period, 0.5-ml aliquots of the culture supernatants were filtered first through a 25 μm/0.45 μm dual stage filter followed by a 0.22 μm filter. The filtered supernatants were then analyzed using Chip Electrophoresis as described below or anti-FLAG DOT-BLOT and SDS-PAGE as described below. Based on these results the primary transformants, which demonstrated higher secretion than the native signal peptide, were isolated on minimal media plate and allowed to grow at 30° C. until they sporulated.

[0922] Spore stocks of the above Aspergillus niger strains along with the control Aspergillus niger strain that contain expression construct of pgpdA promoter and native signal peptide of [[SEQID]]SEQ ID NO:−00409 and [[SEQID]]SEQ ID NO:−00424 were inoculated at 10⁶ spores/mL into 10 mL of minimal media as defined above supplemented with 5.0 g/l yeast extract, 2.0 g/l casamino acids) adjusted to pH 7 with 160 mM MES in 125 ml plastic flask. Aspergillus spores were then grown at 30° C. with 150 RPM for two days. After the growth period, aliquots of the culture supernatants were filtered first through a 25 μm/0.45 μm dual stage filter followed by a 0.22 μm filter. The filtrates were then analyzed using SDS-PAGE as described herein.

[0923] FIG. 5. demonstrates the secretion of [[SEQID]]SEQ ID NO:−00409 (left) and [[SEQID]]SEQ ID NO:−00420 (right) with new signal peptide compared to native signal peptide.

[0924] Aspergillus niger heterologous nutritive polypeptide gene synthesis & plasmid construction. Genes encoding nutritive polypeptides were synthesized (Geneart, Life Technologies). Genes were codon optimized for expression in Aspergillus niger. Synthesized genes were PCR amplified and cloned into the expression vector pAN56-1 (Genbank: Z32700.1) fused to glucoamylase with its native leader sequence under the control of the gpdA promoter from Aspergillus nidulans with the addition of a C-terminal 3×FLAG tag (DYKDHDGDYKDHDIDYKDDDDK (SEQ ID NO: 3915)) and Kexin protease site (NVISKR (SEQ ID NO: 3993)) between glucoamylase gene and gene of interest. Plasmids were constructed using the Gibson Assembly® Kit (New England Biolabs, Beverly, Mass.). Recombinant plasmids were sequence verified before transformation into Aspergillus hosts.

[0925] [[SEQID]]SEQ ID NO:−00087, [[SEQID]]SEQ ID NO:−00103, [[SEQID]]SEQ ID NO:−00105, [[SEQID]]SEQ ID NO:−00115, [[SEQID]]SEQ ID NO:−00218, [[SEQID]]SEQ ID NO:−00298, [[SEQID]]SEQ ID NO:−00302, [[SEQID]]SEQ ID NO:−00341, [[SEQID]]SEQ ID NO:−00352, [[SEQID]]SEQ ID NO:−00354 genes were utilized.

[0926] Aspergillus niger heterologous nutritive polypeptide strain construction. A protease deficient derivate of Aspergillus niger D15 #26 (E. Karnaukhova et al, Microbial Cell Factories, 6:34) was used as the expression host. 10 ug of Expression vectors were co-transformed with 1 ug plasmid containing pyrG selection marker using the protoplast method described in Punt et al., 1992, Methods in Enzymology, 216, 447-457. Transformants were selected on minimal media containing 10 g/l glucose, 6 g/l sodium nitrate, 20 ml/l salts solution (containing 26 g/l potassium chloride and 76 g/l Potassium phosphate monobasic at pH 5.5), 2 mM magnesium sulphate, 1 ml/l vitamin solution (containing 100 mg/l Pyridoxine hydrochloride, 150 mg/l Thiamine hydrochloride, 750 mg/l 4-Aminobenzoic acid, 2.5 g/l Nicotinic acid, 2.5 g/l riboflavin, 20 g/l choline chloride, and 30 mg/l biotin), and 1 ml/l of metals solution (containing 20 g/l Zinc sulfate heptahydrate (ZnSO4-7H2O), 11 g/l Boric acid (H3B03), 5 g/l Manganese (II) chloride tetrahydrate (MnCl2-4H2O), 5 g/l Iron (II) sulfate heptahydrate (FeSO4-7H2O), 1.7 g/l Cobalt(II) chloride hexahydrate (CoCl2-6H2O), 1.6 g/l Copper(II) sulfate pentahydrate (CuSO4-5H2O), 1.5 g/l Sodium molybdate dihydrate (NaMoO4-2H2O), and 5.0 g/l EDTA disodium salt dihydrate (Na2EDTA-2H2O) at pH 6.5) and supplemented with 1.2 M sorbitol and 1.5% bacto agar. Individual transformants were isolated on minimal media plates and allowed to grow at 30 C until they sporulated. Spores were harvested in water at stored at 4 C.

[0927] Aspergillus niger heterologous nutritive polypeptide expression testing. 90 different primary transformants from each construct were inoculated into 1 ml of minimal media as defined above supplemented with 1 g/L casamino acids in 96 deep well culture blocks (1^{st} MTP). Culture blocks were covered with porous adhesive plate seals and incubated for 72 hrs in a micro-expression chamber (Glas-Col, Terre Haute, Ind.) at 33° C. at 800 rpm. After the growth period, 0.5-m1 aliquots of the culture supernatants were filtered first through a 25 μm/0.45-μm dual stage filter followed by a 0.22 μm filter. The filtrates were then assayed using an anti-FLAG ELISA method, as described herein, to determine the levels of secreted protein of interest (POI). At least five colonies from nine expression constructs excluding [[SEQID]]SEQ ID NO:−00302 yielded positive signals in an anti-Flag® ELISA as reported in Table E15B. At least 5 primary transformants that showed positive signals in anti-FLAG® ELISA assay from each of the nine expression strains were also streaked onto a fresh minimal media agar plate for single spore purification and retested for confirmation (2^{nd} MTP).

[0928] Spores were harvested from the plate and inoculation was done with fresh spore crops with a density of approximately 1E9 spores/ml. 10 ul of these spore crops were added to 10 ml of minimal medium giving a start density of 1E6 spores/ml. Aspergillus spores were then grown at 33 C with 150 RPM for three days. After the growth period, aliquots of the culture supernatants were filtered first through a 25 μm/0.45-μm dual stage filter followed by a 0.22 μm filter. The filtrates were then analyzed using anti-FLAG® ELISA, anti-flag western blot and SDS-PAGE described below.

[0929] Certain clones from different expression construct were grown using fresh spore crops with a final density of approximately. 1E6 spores/ml in one litre minimal media. Aspergillus spores were then grown at 33 C with 150 RPM for three days. After the growth period, aliquots of the culture supernatants were filtered first through a 25 μm/0.45-μm dual stage filter followed by a 0.22 μm filter. The filtrates were then analyzed using anti-FLAG ELISA, anti-flag western blot and SDS-PAGE described below. Any secreted protein above 39 mg/l in an anti-Flag® ELISA from a one liter shake flask were detected by an anti-FLAG western blot and SDS-PAGE.

TABLE E15B
demonstrates the anti-flag ELISA results and anti-FLAG ® western
blot results of different protein secretion in Aspergillus niger

| | ELISA | ELISA | ELISA 10 ml | Western | ELISA |
|---|---|---|---|---|---|
| | 1st MTP | 2nd MTP | shake flask | 10 ml shake | 1 litre shake |
| Seq ID # | (mg/l) | (mg/l) | (mg/l) | flask | flask (mg/l) |
| [[SEQID]]SEQ | 14.7-42.2 | 3.0-29.1 | 1.6-4.0 | ++ | 1.2-5.6 |
| ID NO:-00103 | | | | | |
| [[SEQID]]SEQ | 1.4-20.2 | 0-2.1 | 0-2.4 | + | 0.2-1.6 |
| ID NO:-00105 | | | | | |
| [[SEQID]]SEQ | 66.0-215.4 | 5.2-119.5 | 1.3-79.4 | +++ | 93.9-224.3 |
| ID NO:-00298 | | | | | |
| [[SEQID]]SEQ | 11.9-21.4 | 3.6-17.5 | 0.6-2.2 | + | — |
| ID NO:-00897 | | | | | |
| [[SEQID]]SEQ | 16.3-96.2 | 0-4.9 | 0.7-3.7 | — | — |
| ID NO:-00115 | | | | | |
| [[SEQID]]SEQ | 28.2-69.3 | 0.4-191.7 | 2.1-13.3 | + | — |
| ID NO:-00218 | | | | | |
| [[SEQID]]SEQ | 10.4-25.3 | 1.9-20.5 | 3.0-8.3 | +++ | 1.0-3.6 |
| ID NO:-00341 | | | | | |
| [[SEQID]]SEQ | 27.1-207.6 | 0-16.2 | 0.7-245.70 | +++ | 39.0-124.3 |
| ID NO:-00352 | | | | | |
| [[SEQID]]SEQ | 9.1-120.4 | 0-47.2 | 0.9-7.8 | +++ | 0-1.2 |
| ID NO:-00354 | | | | | |

### Example 16. Expression of Nutritive Polypeptides in Cultured Mammalian Cells

[0930] Gene Synthesis and Plasmid Construction. All genes were made synthetically (GeneArt, Life Technologies) and optimized for expression in Homo Sapiens. Genes encoding [[SEQID]]SEQ ID NO:−00001, [[SEQID]]SEQ ID NO:−00103, [[SEQID]]SEQ ID NO:−00105, [[SEQID]]SEQ ID NO:−00298 and [[SEQID]]SEQ ID NO:−00363 were chosen for secretion in mammalian cells. All the genes were fused with 5′ signal peptide sequence from Ig-kappa protein (METDTLLLWVLLLWVPGSTGD (SEQ ID NO: 3994)) and HHHHHHHH tag (SEQ ID NO: 3919) in the 3′ end. All the gene constructs were cloned to pcDNA 3.1 (+) vector (Life Technologies) downstream of pCMV promoter in the multiple cloning site of NheI and BamHI. All gene sequences contained the GCC sequence upstream of start codon to generate GCCATGG Kozak sequence. All plasmids were transformed in E. coli, sequence verified and 10 mg of each plasmid were purified for transfection into mammalian cells.

[0931] Strain Construction. The cell lines selected for experimentation are 2 transient lines from Invitrogen, FreeStyle™ CHO-S Cells (PN 51-4448) and FreeStyle™ 293F Cells (PN 51-0029). Cell lines were received from Invitrogen and stored in liquid nitrogen until sub-culturing was initiated. For sub-culturing prior to transfection, cells were thawed into specific media: CHO-S cells were thawed into 30 mL of FreeStyle™ CHO Expression Media (Invitrogen PN 12651-014) supplemented with 8 mM GlutaMAX™ (Invitrogen PN 35050-061) and 1×HT (Invitrogen PN11067-030). 293F cells were thawed into 30 mL FreeStyle™ 293 Expression Medium (Invitrogen PN 12338-018). Cells were allowed to recover in suspension for 72 hrs under 80% humidity, 8% Carbon Dioxide, 36.5° C., shaking at 110 rotations per minute. Cells were passed from viable cell densities (VCD) not exceeding 2.0×10 6 cells/mL to 0.2×10 6 cells/mL. Sub-culturing continued for 5 passages prior to transfection.

[0932] At 26 hrs prior to transfection the cultures were passed back to 0.6×10 6 viable cells/mL in a volume of 60 mL. Each nutritive polypeptide was transfected in duplicate with 2 mock transfections performed as control for each cell line. On the day of transfection cells were counted and determined to be at 1.1×10 6 cells/mL with greater than 98% viability.

[0933] Transfection Procedure. Preparation of DNA-lipid complexes for 120 mL total volume (60 mL/250 mL shake flask) transfections.

[0934] The following procedure was performed in a Laminar Flow Hood. 150 μg of plasmid DNA were diluted into OptiPRO™ SFM Reduced Serum Medium (Invitrogen PN: 12307-050 to a total volume of 2.4 mL. This solution was mixed gently and 0.2 μm filter sterilized. Diluted 150 uL of FreeStyle™ MAX Reagent (Invitrogen PN 16447-100) in OptiPRO™ SFM Reduced Serum Medium to a total volume of 2.4 mL, mixed gently and incubated for 5 minutes at room temperature. After 5-minute incubation, the 2.4 mL of diluted DNA was added to the 2.4 mL of the diluted reagent, gently mixed and incubated for 20 min at room temperature to form the DNA-lipid complex. After 20-minute incubation, 2.4 mL of complex was added to each duplicate flask. Control Flask received 2.4 mL of OptiPRO™ SFM reduced serum medium. Transfected flasks were placed back in incubated shaker under 80% humidity, 8% Carbon Dioxide 36.5° C., shaking at 110 rotations per minute. Cultures were monitored for % Viability and VCD. All flasks were supplemented on Day 3 with a 20% Phytone Peptone Feed made in the media specific to each cell line. The final concentration of Phytone Peptone in the flask equaled 2%. Cultures were harvested on Day 4 via centrifugation and 0.2 um filtration of the supernatant. Supernatants were run on a non-reducing SDS-PAGE 12% Bis-Tris Gel to confirm expression of nutritive polypeptides at molecular weights. [[SEQID]]SEQ ID NO:−00001, [[SEQID]]SEQ ID NO:−00103, [[SEQID]]SEQ ID NO:−00105, and [[SEQID]]SEQ ID NO:−00298 were confirmed as being expressed from 293F cells but no visible bands could be detected in any of the CHO-S cultures. [[SEQID]]SEQ ID NO:−00363 could not be visualized on the gel from either 293F or CHO-S cultures. Supernatants from 293F cultures for [[SEQID]]SEQ ID NO:−00001, [[SEQID]]SEQ ID NO:−00103, [[SEQID]]SEQ ID NO:−00105, [[SEQID]]SEQ ID NO:−00298, and [[SEQID]]SEQ ID NO:−00363 as well as CHO-S supernatants for [[SEQID]]SEQ ID NO:−00103 and [[SEQID]]SEQ ID NO:−00105 were purified via IMAC. [[SEQID]]SEQ ID NO:−00103, [[SEQID]]SEQ ID NO:−00105, and [[SEQID]]SEQ ID NO:−00298 were scaled up to 190 mL transfection volume in a 1 L shake flask using 293F cells. Transfection procedure was also scaled accordingly. 4×190 mL cultures for both [[SEQID]]SEQ ID NO:−00103 and [[SEQID]]SEQ ID NO:−00105 and 2×190 mL cultures for [[SEQID]]SEQ ID NO:−00298 were run. On Day 2 these cultures were fed with the 20% Phytone Peptone feed to a final concentration of 2% in culture and were harvested on Day 5.

### Example 17: Nutritive Polypeptide Expression Analysis

[0935] Nutritive polypeptides intracellularly expressed and/or secreted were detected using a variety of methods. These methods include electrophoresis, western blot, dot-blot, ELISA, and quantitative LC/MS/MS.

[0936] Electrophoresis Analysis. Extracellular and/or intracellular expressed proteins were analyzed by chip electrophoresis (Labchip GXII) or SDS-PAGE analysis to evaluate expression level.

[0937] For SDS-PAGE, 10 μl sample in Invitrogen LDS Sample Buffer mixed with 5% β-mercaptoethanol was boiled and loaded onto either: 1) a Novex® NuPAGE® 12% Bis-Tris gel (Life Technologies), or 2) a Novex®16% Tricine gel (Life Technologies), and run using standard manufacturer's protocols. Gels were stained using SimplyBlue™ SafeStain (Life Technologies) using the standard manufacturer's protocol and imaged using the Molecular Imager® Gel Doc™ XR+ System (Bio-Rad). Over-expressed heterologous proteins were identified by comparison against a molecular weight marker and control cultures.

[0938] For chip electrophoresis (Labchip GX II) samples were analyzed using a HT Low MW Protein Express LabChip® Kit (following the manufacturer's protocol) by adding 2 μl of sample to 7 μl sample buffer. A protein ladder was loaded every 12 samples for molecular weight determination and quantification (molecular weight in kDa).

[0939] LC-MS/MS analysis. Whole cell, cell lysate and secreted samples can be analyzed for protein expression using LC-MS/MS. To analyze samples, 10 μg of sample were loaded onto a 10% SDS-PAGE gel (Invitrogen) and separated approximately 2 cm. The gel was excised into ten segments and the gel slices were processed by washing with 25 mM ammonium bicarbonate, followed by acetonitrile. Gel slices were then reduced with 10 mM dithiothreitol at 60° C., followed by alkylation with 50 mM iodoacetamide at room temperature. Finally, the samples were digested with trypsin (Promega) at 37° C. for 4 h and the digestions were quenched with the addition of formic acid. The supernatant samples were then analyzed by nano LC/MS/MS with a Waters NanoAcquity HPLC system interfaced to a ThermoFisher Q Exactive™ Mass Spectrometer. Peptides were loaded on a trapping column and eluted over a 75 μm analytical column at 350 nL/min; both columns were packed with Jupiter® Proteo resin (Phenomenex). A 1 h gradient was employed. The mass spectrometer was operated in data-dependent mode, with MS and MS/MS performed in the Orbitrap at 70,000 FWHM resolution and 17,500 FWHM resolution, respectively. The fifteen most abundant ions were selected for MS/MS. Data were searched against an appropriate database using Mascot to identify peptides. Mascot DAT files were parsed into the Scaffold software for validation, filtering and to create a nonredundant list per sample. Data were filtered at 1% protein and peptide false discovery rate (FDR) and requiring at least two unique peptides per protein.

[0940] Anti-FLAG Western Blot. Extracellular and/or intracellular protein was analyzed using western blot to evaluate expression level.

[0941] For SDS-PAGE, 10 μl sample in Invitrogen LDS Sample Buffer mixed with 5% β-mercaptoethanol was boiled and loaded onto a Novex® NuPAGE® 12% Bis-Tris gel (Life Technologies). For standards, 0.5 μg to 2 μg Amino-terminal FLAG-BAP™ Fusion Protein (Sigma) were loaded as a positive control. Gel electrophoresis was performed according to manufacturer's protocol. Once run, the gel was transferred onto an iBlot® Mini Transfer Stack nitrocellulose 0.2 μm pore size membrane (Life Technologies) according to manufacturer protocol. Next, the nitrocellulose membrane was removed from the stack and assembled into a Millipore SNAP I.d.® 2.0 Protein Detection Apparatus. 30 ml of Millipore Blok CH Noise Cancelling reagent was placed into an assembled reservoir tray and vacuumed through. 3 ml of antibody solution was prepared by diluting 2 μl of Sigma Monoclonal ANTI-FLAG® M2-Peroxidase (HRP) antibody into 3 ml of Millipore Blok CH Noise Cancelling Reagent. Antibody solution was added to reservoir tray and allowed to incubate for 10 minutes without vacuum. After incubation, the reservoir tray was filled with 90 ml of 1×PBS+0.1% TWEEN® 20 detergent and vacuumed through as the final wash step. After wash, the nitrocellulose membrane was removed and placed into a reagent tray. 20 ml of Millipore Luminata Classico Western HRP substrate was added and allowed to incubate for 1 minute. After incubation, the membrane was placed into imaging tray of Gel Doc™ XR+ System (Bio-rad) and imaged using a chemiluminescent protocol.

[0942] Anti-FLAG® Dot Blot. Extracellular and/or intracellular proteins were analyzed using dot blot to evaluate expression level.

[0943] 110 μl of 0.2 μm filtered sample was mixed with 110 μl 8.0M Guanidine Hydrochloride, 0.1M Sodium Phosphate (Denaturing Buffer) to allow for even protein binding. A standard curve of Amino-terminal FLAG-BAP™ Fusion Protein (Sigma) was prepared in the same matrix as the samples, starting at 2 μg, diluting 2× serially to 0.0313 Invitrogen 0.45 μm nitrocellulose membrane was pre-wet in 1×PBS buffer for 5 minutes and then loaded onto Bio-Rad Dot Blot Apparatus. 300 μl of PBS was vacuumed through to further wet the membrane. Next, 200 μl the 1:1 Sample:Denaturing Buffer mixture was loaded into each well and allowed to drain through the dot blot apparatus by gravity for 30 minutes. Next, a 300 μl PBS is wash was performed on all wells by vacuum followed by loading 300 μl of Millipore Blok CH Noise Cancelling reagent and incubating for 60 minutes. After blocking, membrane was washed with 300 μl of 1×PBS+0.1% TWEEN® 20 detergent. Next, antibody solution was prepared by adding 2.4 μl of Sigma Monoclonal ANTI-FLAG® M2-Peroxidase (HRP) antibody to 12 ml of Millipore Blok CH Noise Cancelling reagent (1:5000 dilution). 100 μl of the resulting antibody solution was added to each well and allowed to incubate for 30 minutes by gravity. After antibody incubation, three final washes were performed with 300 μl 1×PBS+0.1% TWEEN® 20 detergent by vacuum. After washes, nitrocellulose membrane was removed and placed into a reagent tray. 20 ml of Millipore Luminata Classico Western HRP substrate was added and allowed to incubate for 1 minute. After incubation, membrane was placed into imaging tray of Gel Doc™ XR+ System (Bio-rad) and imaged using a chemiluminescent protocol.

[0944] Anti-FLAG® ELISA. Protein expression was detected by direct ELISA using an anti-FLAG® antibody. Briefly, a dilution series (0.005-10 μg/mL) of FLAG fusion protein (Sigma) was prepared in 0.1 M NaHCO3 (pH 9.5). A dilution series (0.01-20 μg/mL) of FLAG fusion protein was also prepared in spent medium from an empty fungus culture diluted 10-fold in 0.1 M NaHCO3 (pH 9.5). Experimental cultured medium samples were diluted 10-fold in 0.1 M NaHCO3 (pH 9.5). The FLAG fusion protein dilution series and the experimental samples were then transferred (0.2 mL) to the wells of a Nunc-Immuno™ Maxisorp™ (Thermo) 96-well plate and incubated overnight at 2-8° C. to facilitate protein adsorption. The following morning, plates were rinsed three times with Tris-buffered saline (TBS) containing 0.05% TWEEN® 80 (TBST) detergent. The wells were blocked from non-specific protein binding by incubation with 0.2 mL of 1% non-fat dried milk dissolved in TBST for 1 h at room temperature. The plates were rinsed three more times with TBST and then incubated at room temperature for 1 h with 0.2 mL of the monoclonal antibody anti-FLAG® M2-HRP (Sigma) diluted 1:2000 in blocking buffer. The plates were again rinsed three more times with TBST before incubation with 0.2 mL/well of SIGMAFAST™ o-phenylenediamine dihydrocholride (OPD) (Sigma) for 30 min at room temperature. The reaction was terminated with the addition of 0.05 mL/well of 1 M HCl and the absorbance of samples was measured at 492 nm on a spectrophotometer equipped with a plate reader.

### Example 18. Therapeutic Liquid Formulations of Nutritive Polypeptides

[0945] Nutritive polypeptide sequences were administered for therapeutic purposes in a variety of liquid formulations. For example, the formulations utilized differ by protein concentration, solution pH, presence or absence of particulates, minerals, tastants, and/or excipient additives. In therapeutic liquid formulations, the concentration of protein ranges from 0.1% to 60% w/w in solution. In certain instances, a lower concentration is preferable. For example, [[SEQID]]SEQ ID NO:−00105 has been dosed as low as 10%. In some cases a higher concentration is preferable. For example, [[SEQID]]SEQ ID NO:−00105 and [[SEQID]]SEQ ID NO:−00363 were dosed as 35% solutions. In some cases a nutritive polypeptide sequence is dosed at its maximum solubility, which varies by protein and is generally in the range of 0.1% to 60% w/w. Both [[SEQID]]SEQ ID NO:−00105 and [[SEQID]]SEQ ID NO:−00363 were shown to be a soluble liquid at 50% w/w in solution. In therapeutic liquid formulations, the solution pH generally ranges from 2 to 11. Protein solubility is known to be a strong function of solution pH (C. Tanford, Physical Chemistry of Macromolecules, p. 242, Wiley, New York, 1961.) In most cases, nutritive polypeptide sequences are least soluble at their isoelectric point (pI), and thus solution pH is often adjusted to be above or below the pI of the nutritive polypeptide sequence. This modulation of pH allows control over protein solubility. For example, [[SEQID]]SEQ ID NO:−00105 and [[SEQID]]SEQ ID NO:−00363 have isoelectric points near 4. These nutritive polypeptide sequences were purposely formulated at pH 8-9, so they would be above their pI. For example, [[SEQID]]SEQ ID NO:−00587 has a pI of 9.7 and was purposely formulated at pH 7, so that it would be below its pI. Nutritive polypeptides that are soluble at their pI, can be formulated at their pI so that the liquid formulation does not require an additional buffering species to maintain the solution pH. In this case, the protein itself acts to buffer the solution pH, as its own amino acids are protonated and deprotonated. A protein solution formulated at the pI of the protein shows resistance to changes in pH when acid or base are added, indicating that the solution is, in fact, buffered by the protein itself. In some therapeutic liquid formulations, a nutritive polypeptide includes particulate matter. Particulate matter is visible to the eye, and/or it contains subvisible particulates (example soluble aggregates). Particulate matter is product-related, and/or it is foreign. Particulate matter occurs in suspension, as a slurry, and/or settles at the bottom of the solution. In some embodiments, particulate matter is desirable because wherein it is indigestible or slowly digestible in the stomach, it acts as a carrier delivering the nutritive polypeptide to the intestine. In some embodiments, particulate matter is desirable in a liquid formulation because it allows dosing the nutritive polypeptide above its limit of solubility. In the case of [[SEQID]]SEQ ID NO:−00105, there is no visible particulate matter. [[SEQID]]SEQ ID NO:−00424 was dosed with suspended particulate matter.

[0946] In therapeutic liquid formulations, a nutritive polypeptide sequence is typically formulated with one or more excipients dissolved in the formulation. Each excipient is included for a specific purpose. Buffers (examples: Tris, phosphate, ammonium bicarbonate, sodium carbonate, acetate, citrate, arginine) are added to control the solution pH. Sugars are added to control aggregation and solubility (examples: trehalose, glucose, sucrose, and mannitol). Detergents are added to control solubility and aggregation (examples TWEEN® detergent, triton, CHAPS, and deoxycholate). Polyalcohols are added to control solubility and aggregation (glycerol, PEG). Chaotropes are added to increase protein solubility (example thiocyanate and urea). Antioxidants are added to prevent protein oxidation (examples ascorbic acid and methionine). Salts are added to increase protein solubility and/or are added to achieve a desired osmolality (example sodium chloride). [[SEQID]]SEQ ID NO:−00105, [[SEQID]]SEQ ID NO:−00363, [[SEQID]]SEQ ID NO:−00426 were formulated in sodium phosphate and sodium chloride and dosed orally. [[SEQID]]SEQ ID NO:−00587 and [[SEQID]]SEQ ID NO:−00559 were formulated in ammonium bicarbonate and dosed orally. [[SEQID]]SEQ ID NO:−00240 was formulated in sodium carbonate and dosed orally. Tastants were added to nutritive polypeptides to enhance the gustatory experience of the user, with successful result. Vanilla extract was added in combination with sucralose according to Tang et al. (Tang J E, Moore D R, Kujbida G W, Tarnopolsky M A, Phillips S M. J Appl Physiol (1985). 2009 September; 107(3):987-92). The qualitative benefit of enhanced flavor was documented by users as being “quite pleasant.”

[0947] The two tables Table E18A and Table E18B summarize a number of administrations of nutritive polypeptides to humans and to rats.

TABLE E18A
Therapeutic liquid formulations of nutritive polypeptides used for human administration.
Human Administration

| [[SEQID]]SEQ | Conc | Protein | | | | |
|---|---|---|---|---|---|---|
| ID NO.: | (g/L) | dosed (g) | pH | Buffer | NaCl | Tastants |
| [[SEQID]]SEQ | 350 | 35 | 8.7 | 2 mM | 6 mM | Each formulation |
| ID NO.: -00105 | | | | phosphate | | contained 8 mL of |
| [[SEQID]]SEQ | 350 | 35 | 7 | 3 mM | 14 mM | vanilla extract per |
| ID NO.: -00363 | | | | phosphate | | liter and 4 grams |
| [[SEQID]]SEQ | 117 | 20 | 8.7 | 2 mM | 6 mM | of sucralose per |
| ID NO.: -00105 | | | | phosphate | | liter, according to |
| [[SEQID]]SEQ | 117 | 20 | 8.7 | 2 mM | 6 mM | Tang, et al. |
| ID NO.: -00105 | | | | phosphate | | |
| [[SEQID]]SEQ | 117 | 20 | 7 | 3 mM | 14 mM | |
| ID NO.: -00363 | | | | phosphate | | |
| [[SEQID]]SEQ | 117 | 20 | 7 | none | none | |
| ID NO.: -00426 | | | | | | |

TABLE E18B
Therapeutic liquid formulations of nutritive polypeptides used for
human administration.
Rat Administration

| | | dosage | | | |
|---|---|---|---|---|---|
| | | (mg protein | | | |
| [[SEQID]]SEQ ID | Conc | per kg body | | | |
| NO: | (g/L) | weight) | pH | Buffer | NaCl |
| [[SEQID]]SEQ ID | 250 | 2,850 | 8.7 | 2 mM phosphate | 6 mM |
| NO:-00105 | | | | | |
| [[SEQID]]SEQ ID | 250 | 2,850 | 8.7 | 2 mM phosphate | 6 mM |
| NO:-00105 | | | | | |
| [[SEQID]]SEQ ID | 250 | 2,850 | 8.7 | 2 mM phosphate | 6 mM |
| NO:-00338 | | | | | |
| [[SEQID]]SEQ ID | 250 | 2,850 | 8.7 | 2 mM phosphate | 6 mM |
| NO:-00338 | | | | | |
| [[SEQID]]SEQ ID | 98 | 1,113 | 8.7 | 2 mM phosphate | 6 mM |
| NO:-00105 | | | | | |
| [[SEQID]]SEQ ID | 135 | 1,539 | 10.8 | 25 mM Na2CO3 | 0 mM |
| NO:-00240 | | | | | |
| [[SEQID]]SEQ ID | 156 | 1,781 | 8.7 | 2 mM phosphate | 6 mM |
| NO:-00105 | | | | | |
| [[SEQID]]SEQ ID | 229 | 2,850 | 7 | 3 mM phosphate | 14 mM |
| NO:-00363 | | | | | |
| (a-mannosidase | | | | | |
| treated) | | | | | |
| [[SEQID]]SEQ ID | 250 | 2,850 | 7 | 3 mM phosphate | 14 mM |
| NO:-00363 | | | | | |
| (hydrolyzed) | | | | | |
| [[SEQID]]SEQ ID | 250 | 2,850 | 8.7 | 2 mM phosphate | 6 mM |
| NO:-00105 | | | | | |
| [[SEQID]]SEQ ID | 250 | 2,850 | 8.7 | 2 mM phosphate | 6 mM |
| NO:-00105 | | | | | |
| [[SEQID]]SEQ ID | 250 | 2,850 | 8.7 | 2 mM phosphate | 6 mM |
| NO:-00105 | | | | | |
| [[SEQID]]SEQ ID | 250 | 2,850 | 8.7 | 2 mM phosphate | 6 mM |
| NO:-00105 | | | | | |
| [[SEQID]]SEQ ID | 250 | 2,850 | 8.7 | 2 mM phosphate | 6 mM |
| NO:-00105 | | | | | |
| [[SEQID]]SEQ ID | 250 | 2,850 | 8.7 | 2 mM phosphate | 6 mM |
| NO:-00338 | | | | | |
| [[SEQID]]SEQ ID | 250 | 2,850 | 7 | 3 mM phosphate | 14 mM |
| NO:-00352 | | | | | |
| [[SEQID]]SEQ ID | 250 | 2,850 | 7 | 3 mM phosphate | 14 mM |
| NO:-00363 | | | | | |
| [[SEQID]]SEQ ID | 250 | 2,850 | 7 | 3 mM phosphate | 14 mM |
| NO:-00363 | | | | | |
| [[SEQID]]SEQ ID | 250 | 2,850 | 7 | 3 mM phosphate | 14 mM |
| NO:-00423 | | | | | |
| [[SEQID]]SEQ ID | 250 | 2,850 | 7 | 3 mM phosphate | 14 mM |
| NO:-00424 | | | | | |
| [[SEQID]]SEQ ID | 250 | 2,850 | 7 | 3 mM phosphate | 14 mM |
| NO:-00425 | | | | | |
| [[SEQID]]SEQ ID | 250 | 2,850 | 7 | none | 0 mM |
| NO:-00426 | | | | | |
| [[SEQID]]SEQ ID | 250 | 2,850 | 7 | none | 0 mM |
| NO:-00426 | | | | | |
| [[SEQID]]SEQ ID | 250 | 2,850 | 7 | 3 mM phosphate | 14 mM |
| NO:-00429 | | | | | |
| [[SEQID]]SEQ ID | 250 | 2,850 | 7.7 | 25 mM NH4HCO3 | 0 mM |
| NO:-00559 | | | | | |
| [[SEQID]]SEQ ID | 250 | 2,850 | 7.7 | 25 mM NH4HCO3 | 0 mM |
| NO:-00587 | | | | | |

### Example 19. Therapeutic Formulations of Nutritive Polypeptides

[0948] Alternative to soluble, homogenous, liquid formulations, nutritive polypeptides can be prepared alternatively. This example describes alternative nutritive polypeptide formulations such as slurries, gels, tablets and food ingredients.

[0949] Slurry formulations. Slurries are semiliquid mixtures that contain both soluble and insoluble material which generally appear as fine granules in solution. Nutritive polypeptide slurries are prepared when a nutritive polypeptide is either concentrated above its maximum solubility, or, when a lyophilized or freeze dried preparation of a nutritive polypeptide is resuspended above its maximum solubility. Optionally, addition of an emulsifier such as soy lecithin is added at a concentration between 0.1-1% to stabilize the homogeneity of a slurry (van Nieuwenhuyzen et al., 1999 Eur. Journal of Lipid Sci. and Tech.).

[0950] Gel formulations. Alternatively, nutritive polypeptides are formulated as gels. Gels are solid, jelly-like formulations that are generally formed through molecular cross linking. Nutritive polypeptides are formulated as gels through treatment with transglutaminase (EC Number 2.3.2.13). Transglutaminase can catalyze the cross linking of nutritive polypeptides between g-carboxamide groups of peptide bound glutamine residues and the e-amino groups of nutritive polypeptide bound lysine residues. This formation of a g-glutamyl-e-lysine cross links proteins in solution; thus, promoting gel formation.

[0951] Human transglutaminase is a calcium (Ca2+) dependent enzyme with a Kd for calcium in the range of 0.3-3 uM (Ahvazi et al., 2003 Journal of Biological Chemistry). Due to the precipitave effects of calcium in preparations of nutritive polypeptides, a microbial (Streptomyces mobaraensis) orthologue of transglutaminase has been identified that acts in a calcium-independent manner (Ando et al, 1989 Agric Biol Chem). To prepare a gelatinous preparation of nutritive polypeptides, nutritive polypeptides are solubly formulated at 250 g/L at neutral pH. Transglutaminase is spiked into the preparation at 10 EU per g nutritive polypeptide and allowed to react at 35° C. until adequate gel formation has occurred (Chen et al., 2003 Biomaterials).

[0952] Tablet formulations. Preparation of solid tablets of nutritive polypeptides is accomplished according to Sakarkar et al. 2009 (International Journal of Applied Pharmaceutics). Tablets are formulated as a mixture of nutritive polypeptides, excipients and binding agents. Tablets are composed of 50% why nutritive polypeptide, 26% w/w microcrystalline cellulose, 7.5w/w sodium bicarbonate-citric acid mixture (70:30), 6.5% w/w lactose, 5.5% w/w magnesium stearate and bound by 4.5% w/w polyvinyl pyrrolidone solution in isopropanol. Tablets are dehumidified and granulated prior to compression into 100 mg tablets. Tablets are coated with 12.5% w/w ethyl cellulose solution in dichloromethane and diethyl phthalate as a plasticizer.

[0953] Inhalable dry powder. Nutritive polypeptides are formulated to be administered as an inhalable dry powder as described in Lucas et al., 1998 Pharm Res. Nutritive proteins are co-processed with malto-dextrin by spray-drying to produce model protein particles. Aerosol formulations are then prepared by tumble mixing protein powders with α-lactose monohydrate (63-90 μm) or modified lactoses containing between 2.5 and 10% w/w fine particle lactose (FPL) or micronised polyethylene glycol 6000. Powder blends are then characterized in terms of particle size distribution, morphology and powder flow.

[0954] Conventional food formulations. Nutritive polypeptides are formulated as a food ingredients as dry, solid formulations. For example, nutritive polypeptides are incorporated into pasta dough by mixing dry nutritive polypeptide formulations into water, durum semolina, Arabica gum, mono- and diglycerides, fiber, yeast and citric acid. Dough is cut to shape, dried and packaged.

### Example 20: In Vitro Screening of Amino Acids and Nutritive Polypeptides for GLP-1 Production

[0955] Glucagon-like peptide-1 (GLP-1) is a peptide hormone produced by L-cells of the intestine in response to multiple nutrient stimuli. GLP-1 is an incretin that decreases blood glucose levels by increasing insulin release from the pancreas. GLP-1 acts on other peripheral tissues increasing glucose uptake and storage in skeletal muscle and adipose tissue, decreasing the rate of gastric emptying, and decreasing hepatic glucose production (Baggio L L & D J Drucker. 2007. Biology of incretins: GLP-1 and GIP. Gastroenterology. 132:2131-2157). GLP-1 is a product of the post-translational cleavage of proglucagon to generate active GLP-1 (7-36) this is rapidly degraded after secretion by dipeptidyl peptidase IV (DPPIV) to GLP-1 (9-36).

[0956] Several mammalian gastrointestinal cell lines are used as models for L-cell secretion of GLP-1 (IEC-6 from rats, NCI-H716 and FHs74Int from Humans, and STC-1 and GLUTag from mice). The purpose of these experiments is to determine which amino acid combinations, nutritive protein digests, and/or full length nutritive proteins induce GLP-1 secretion in vitro.

[0957] The NCI-H716 cell line is obtained from the American Type Culture Collection (Catalog number ATCC® CCL-251™, Manassas, Va.). RPMI-1640, Dulbecco's Modified Eagle Medium (DMEM) and Dulbecco's Phosphate Buffered Saline (DPBS) are obtained from Life Technologies (Catalog numbers 11875, 11965 and 14190, respectively; Carlsbad, Calif.). Penicillin-Streptomycin Solution is obtained from ATCC (Catalog number 30-2300, Manassas, Va.). Antibiotic-Antimycotic Solution (100×) is obtained from Sigma-Aldrich (Catalog number A5955, St. Louis, Mo.). Fetal bovine serum is obtained from GE Healthcare (Catalog number SH3007103HI, Wilmington, Mass.). Bovine serum albumin is obtained from Fisher Scientific (Catalog number BP1600-100, Pittsburgh, Pa.). Fatty-acid free bovine serum albumin is obtained from Sigma-Aldrich (Catalog number A7030, St. Louis, Mo.). Phenylmethyl sulfonyl fluoride (PMSF), a protease inhibitor, is obtained from Thermo Scientific (Catalog number 36978, Waltham, Mass.). Diprotin A, a DPPIV inhibitor, is obtained from Sigma-Aldrich (Catalog number 19759, St. Louis, Mo.). Tissue Protein Extraction Reagent (T-PER) is obtained from Thermo Scientific (Catalog number 78510, Waltham, Mass.). Active GLP-1 concentration is determined using the AlphaLisa GLP-1 (7-36 amide) Immunoassay Research Kit (Catalog number AL215, PerkinElmer, Waltham, Mass.) and read on an EnSpire® Alpha plate reader (PerkinElmer, Waltham, Mass.). Data are analyzed using Microsoft Excel version 14.0.7128.5000 (Microsoft Corporation, Redmond, Wash.) and GraphPad Prism version 6.03 for Windows (GraphPad Software, La Jolla, Calif.). Krebs Ringer Buffer (KRB) is prepared and the AlphaLISA GLP-1 (7-36 amide) Immunoassay Research Kit is obtained from PerkinElmer (Catalog number AL215, Waltham, Mass.).

[0958] Ninety-six well plates are pre-coated with MatriGel™. 80 μL of MatriGel™ is added to 5 mL Dulbecco's Modified Eagle Medium (DMEM) without glucose. 50 μL are added per well and the plate incubated at 37° C., 5% CO2 for 30 minutes. MatriGel™ solution is aspirated prior to addition of cells.

[0959] NCI-H716 cells are maintained in RPMI-1640 medium supplemented with 10% fetal bovine serum (FBS) and 1% Antibiotic-Antimycotic Solution and incubated in T-75 tissue culture flasks at 37° C., 5% CO2. Cells are passaged 1:3 or 1:6 every 2 to 3 days.

[0960] Cells are detached with 0.25% trypsin-EDTA incubated at 37° C., 5% CO2 and centrifuged at 750 rpm for 10 minutes to pellet cells. Cell pellet is washed twice with 1× Dulbecco's Phosphate Buffered Saline (DPBS) supplemented with 1% FBS and centrifuged at 750 rpm for 10 minutes to pellet cells. The cells are resuspended in Dulbecco's Modified Eagle Medium (DMEM) supplemented with 10% FBS and 1% penicillin/streptomycin and counted on a hemocytometer. Cells are diluted to 1.8×106 cells/mL and 200 μL added to each well of a 96 well plate pre-coated with Matri-Gel. Cells are incubated for 2 days at 37° C., 5% CO2.

[0961] Screening of GLP-1 Secretion to Amino Acid Treatments in NCI-H716 Cells

[0962] Following two day incubation, medium is aspirated and replaced with 200 μL Starvation Buffer [i.e. Krebs-Ringer Buffer (KRB) containing 50 μg/mL PMSF, 34 μg/mL Diprotin A, and 0.2% fatty-acid free bovine serum albumin (BSA)] and incubated for 30 minutes at 37° C., 5% CO₂. Starvation buffer is then aspirated and replaced with 100 μL/well of treatment article in Starvation Buffer. Cells are stimulated with treatment article for 2 hours then medium is removed and frozen at −80° C. Treatment articles include individual amino acids, amino acid blends, nutritive protein digests, and/or full length nutritive proteins.

[0963] Determination of Active GLP-1 Concentration from Supernatant.

[0964] Supernatant is assayed for the active form of GLP-1 (7-36)NH2 using the AlphaLISA GLP-1 (7-36 amide) Immunoassay Research Kit (PerkinElmer, AL215) in accordance with the manufacturer's instructions. The standard is assayed in Assay Buffer supplemented to an equivalent concentration of Starvation Buffer. Alternatively, the active form of GLP-1 is measured using an enzyme-linked immunosorbent assay (ELISA) as described herein. Luminescence data from the AlphaLISA GLP-1 (7-36 amide) Immunoassay or GLP-1 ELISA is analyzed on Microsoft Excel and GraphPad Prism.

[0965] Duplicate sample concentrations are determined by non-linear regression using a 4 parameter logistic model of the standard following an x=log(x) transformation of the active GLP-1 concentration in GraphPad Prism 6. ANOVA and multiple comparison tests are conducted on GraphPad Prism 6.

[0966] Comparisons of the GLP-1 content from samples collected after test article treatment to those collected after vehicle control treatment describe the degree of GLP-1 secretion due to a test article over time. Comparison of this difference across treatments describes the differential effects of each amino acid, amino acid blend, nutritive protein digest, and nutritive protein treatment relative to the other, and provides a means of ranking their efficacy.

[0967] GLP-1 Secretion by Amino Acids

[0968] Cells were starved of amino acids as described herein and stimulated with stimulation buffer alone, 19 amino acids, 17 amino acids (without leucine, isoleucine or valine), 20 amino acids or leucine alone at their concentration in DME/F12 medium (see Table E20C) for two hours. Supernatant was harvested and frozen at −80° C. GLP-1 (7-36) amide concentration was assayed subsequently. FIG. 6 shows supernatant concentration of GLP-1 (7-36) detected in the supernatant following stimulation, error bars are the standard deviation of the technical replicates. Fourteen compositions increased the concentration of GLP-1 above 10% greater than that observed in the larger buffer only stimulation (those lacking either Asn, Met, Gln, Tyr, His, Gly, Cys, Phe, Trp, Ala, Glu, Leu, Ile and Val). Two compositions, amino acids lacking Arg & Leu only treatment, showed decreased concentration of GLP-1 (7-36) below 10% below the lower buffer only stimulation.

TABLE E20A

| Amino Acids | μM | Amino Acids | μM |
|---|---|---|---|
| Glycine | 250 | L-Leucine | 451 |
| L-Alanine | 50 | L-Lysine | 500 |
| L-Arginine | 700 | L-Methionine | 116 |
| L-Asparagine | 57 | L-Phenylalanine | 215 |
| L-Aspartic Acid | 50 | L-Proline | 150 |
| L-Cysteine | 100 | L-Serine | 250 |
| L-Glutamic Acid | 100 | L-Threonine | 449 |
| L-Glutamine | 2500 | L-Tryptophan | 44 |
| L-Histidine | 150 | L-Tyrosine | 214 |
| L-Isoleucine | 416 | L-Valine | 452 |

### Example 21. Use of Nutritive Polypeptides to Improve Glycemic Control in Healthy, Fasted Rats

[0969] Glucose tolerance tests are a common method of measuring glycemic control in both clinical and preclinical settings. During the test, a large dose of glucose is given and blood samples are taken at subsequent time points to determine how quickly blood glucose levels renormalize. In an oral glucose tolerance test (OGTT), a dose of glucose is ingested by mouth. Such tests are clinically used to identify individuals with poor glucose control (Cobelli et al., 2014), and pre-clinically to assess the therapeutic efficacy of anti-diabetes medications (Wagman & Nuss, 2001)(Moller, 2001). Glucose levels are modulated by a number of different gastrointestinal hormones, including insulin, glucagon, somatostatin, glucose-dependent insulinotropic peptide (GIP), and glucagon-like peptide 1 (GLP-1), which both directly and indirectly modulate glucose levels. Combined measurements of glucose and gastrointestinal hormones are used to assess glucose intolerance, insulin resistance, and the severity of metabolic disease (Ferrannini & Mari, 2014).

[0970] An OGTT was performed on twenty five healthy, fasted, male Sprague-Dawley rats with indwelling jugular vein catheters (JVC) to assess the acute effects of nutritive polypeptide dosing on glycemic control as well as insulin and GLP-1 levels.

[0971] Oral Glucose Tolerance Test. All rodents were approximately 10-12 weeks old, weighed average of approximately 350 g and acclimated for 4 days prior to testing. Animals were housed singly with bedding and fed a regular rodent chow diet (Lab Diet 5001) prior to the study. Housing temperature was at kept at 22±2° C., humidity at 50±20%, and a 12 hour light/12 hour dark cycle was implemented. Air circulation was ten or more air changes per hour with 100% fresh air. Prior to treatment, all rats were fasted overnight for fourteen hours. Fasted animals were treated with formulations of nutritive polypeptides dissolved in water by oral gavage (see Table E21A), and fifteen minutes after treatment gavage were then challenged with an oral gavage of glucose (2 g/kg). Blood glucose was measured and blood was collected at seven time points (−15, 0, 15, 30, 60, 90, 120 minutes relative to the glucose challenge). Blood was collected in an EDTA collection tube containing plasma stabilizers (a DPP4 inhibitor and a protease cocktail inhibitor). One additional rat was sacrificed at and bled out to provide nave blood for analytical standards. Glucose was measured using small drops of blood collected via the JVC using a glucometer (AlphaTrak 2, Abbott).

TABLE E21A

| | | | Dose | Average | Total | Glucose | Glucose | Glucose |
|---|---|---|---|---|---|---|---|---|
| | Dose | Conc. | Volume | BW | Protein | Volume | Dose | Conc. |
| Group | (mg/kg) | (mg/mL) | (mL/kg) | (kg) | (mg) | (mL/kg) | (g/kg) | (mg/mL) |
| Vehicle | NA | NA | 11.4 | 0.35 | NA | 4 | 2 | 500 |
| [[SEQID]]SEQ | 2850 | 250 | 11.4 | 0.35 | 5,985 | 4 | 2 | 500 |
| ID NO.: -00105 | | | | | | | | |
| Arginine HCl | 1000 | 87.7 | 11.4 | 0.35 | 2,100 | 4 | 2 | 500 |
| [[SEQID]]SEQ | 2850 | 250 | 11.4 | 0.35 | 5,985* | 4 | 2 | 500 |
| ID NO.: -00338 | | | | | | | | |

[0972] Approximately 300 μL of blood was collected from the JVC of all rats in Group 1-4 at six time points (−15, 0, 15, 30, 60, and 120 minutes). Glucose gavages and blood collections were timed to take the same amount of time per animal so that sample times were accurate for each animal. All time points were collected within 5% of the target time. Blood was collected into pre-chilled (0-4° C.) K2EDTA blood collection tubes containing Protease Inhibitor Cocktail (Catalog number D8340, Sigma-Aldrich, St. Louis, Mo.) and DPPIV inhibitor (Millipore, Billerica, Mass.) added to the tubes at 1:100 prior to collection. After blood collection, blood samples were maintained chilled (2-6° C.) and centrifuged within 30 minutes. The collected plasma was placed in sample tubes and immediately stored at −80° C.

[0973] Prior to immunoassay analysis samples were thawed on ice for 1 hour, mixed thoroughly by pipette, rearrayed to 96 well microplates. Separate aliquots were prepared for insulin immunoassay and GLP-1 immunoassay. Master plate and aliquots were stored frozen at −80° C.

[0974] FIG. 7 shows the average blood glucose values during the OGTT described herein. The error bars shown are the standard errors of the mean. All groups showed significant differences in blood glucose from fasting at times t=15, and t=30 min after the glucose challenge (p<0.05, Dunnett multiple comparison test). The groups that received [[SEQID]]SEQ ID NO:−00105 and [[SEQID]]SEQ ID NO:−00338 showed a significant difference in blood glucose relative to vehicle at times t=15, and t=30 after the glucose challenge (p<0.05, Tukey-Kramer multiple comparison test, comparing treatment group to each other at each time point). These data indicated that acute ingestion of [[SEQID]]SEQ ID NO:−00105 and [[SEQID]]SEQ ID NO:−00338 can significantly improve glycemic control after a glucose challenge in outbred male Sprague-Dawley rats.

[0975] The area under curve for blood glucose was calculated using the Linear-Log Trapezoidal Method in Microsoft Excel, and statistical analysis was conducted on GraphPad Prism 6.

[0976] The area under curve for blood glucose integrated from 0-120 minutes and from 0-60 minutes (FIG. 8) show that acute dosing of [[SEQID]]SEQ ID NO:−00105 and [[SEQID]]SEQ ID NO:−00338 improves blood glucose control by reducing blood glucose excursion in the context of an oral glucose tolerance test. Between 0 and 60 minutes both [[SEQID]]SEQ ID NO:−00105 and [[SEQID]]SEQ ID NO:−00338 have significantly smaller change in blood glucose in comparison to vehicle (P<0.05, Dunnett's multiple comparisons test).

[0977] Rat Insulin Enzyme Linked Immunosorbent Assay (ELISA). An Ultra-Sensitive Rat Insulin ELISA Kit was obtained from Crystal Chem, Inc. (Catalog number 90060, Downers Grove, Ill.). Plates were washed using a BioTek ELx50 microplate strip washer (BioTek, Winooski, Vt.). Absorbance was read on a Synergy™ Mx monochromator-based microplate reader (BioTek, Winooski, Vt.). Data was analyzed using Microsoft Excel version 14.0.7128.5000 (Microsoft Corporation, Redmond, Wash.) and GraphPad Prism version 6.03 for Windows (GraphPad Software, La Jolla, Calif.).

[0978] The ELISA kit was prewarmed to room temperature for 30 minutes prior to beginning the assay set up. The standard curve dilutions were prepared in accordance with the manufacturer's instructions for running the assay in Wide Range format.

[0979] Plasma matrix from the nave group and sample plasma were thawed on ice and then centrifuged at approximately 1000×rcf for 10 minutes at 4° C. to pellet any insoluble material.

[0980] Matrix Assay Buffer for running the insulin standard was prepared using plasma matrix from the nave group to a concentration of 5.26% in 95 μL. 95 μL of Assay Buffer was added to all sample wells, and 95 μL of Matrix Assay Buffer was added to all standard wells. 5 μL of each sample and standard were added in duplicate. The plates were incubated at 4° C. for 2 hours. The plates were then washed five times with 300 μL/well 1× Wash Buffer. The plates were tapped sharply several times on paper towels to remove any residual wash buffer.

[0981] Anti-Insulin Enzyme Conjugate Working Solution was prepared by combining 2 volumes Anti-Insulin Enzyme Conjugate Stock with 1 volume Enzyme Conjugate Diluent, and mixing by pipetting up and down and gently vortexing. 100 μL/well of Anti-Insulin Enzyme Conjugate Working Solution was added to all wells. The plates were sealed and incubated at room temperature for 30 minutes and then washed seven times with 300 μL/well 1× Wash Buffer. The plates were tapped sharply several times on paper towels to remove any residual wash buffer. 100 μL/well Enzyme Substrate Solution was then added to each well and incubated in the dark at room temperature for 40 minutes. 100 μL/well Stop Solution was added to all wells.

[0982] The absorbance was read on the Synergy™ Mx plate reader at 450 nm and 630 nm. Final values obtained were the A450 nm-A630 nm values.

[0983] The insulin standard curve was corrected for matrix concentration of insulin by subtracting the mean of the 0 ng/mL insulin standard from each of the standard well A450 nm-A630 nm values in Excel. Duplicate sample concentrations were determined by non-linear regression using a 4 parameter logistic model of the background corrected standard following an x=log(x) transformation of insulin concentration in GraphPad Prism 6. ANOVA and multiple comparison tests were conducted on GraphPad Prism 6. The area under curve was integrated using the Linear-Log Trapezoidal Method on Microsoft Excel, with post hoc testing conducted in GraphPad.

[0984] FIG. 9 shows the average plasma insulin concentration for n=6 rats per treatment group over the course of the experiment. The error bars show the standard error of the mean. All treatment groups had statistically significant increases in plasma insulin relative to their treatment or vehicle gavage at 15, 30 and 60 minutes following the glucose challenge (Dunnett's multiple comparisons test). Only [[SEQID]]SEQ ID NO:−00105 had a statistically significant increase in plasma insulin concentration at the time of the glucose challenge (0) relative to the plasma insulin at the time of the treatment gavage (P<0.0001, Dunnett's multiple comparisons test). Both [[SEQID]]SEQ ID NO:−00105 and [[SEQID]]SEQ ID NO:−00338 had statistically significant greater insulin concentrations at 120 minutes following the glucose challenge (P<0.05 and P<0.01, respectively; Dunnett's multiple comparisons test).

[0985] In comparison to the vehicle, only [[SEQID]]SEQ ID NO:−00105 showed a statistically significantly greater increase in plasma insulin concentration at the time of the glucose challenge (P<0.001, Dunnett's multiple comparisons test).

[0986] These data indicated that an acute ingestion of [[SEQID]]SEQ ID NO:−00105 can stimulate insulin release within 15 minutes of ingestion in outbred male Sprague-Dawley rats.

[0987] FIG. 10 shows the area under curve integrated between 0-240 and 0-60 minutes for all treatment groups. No treatment group was statistically significantly greater than vehicle.

[0988] Total GLP-1 Enzyme Linked Immunosorbent Assay (ELISA). A rat GLP-1 ELISA Kit was obtained from Crystal Chem, Inc. (Catalog number 81507, Downers Grove, Ill.). Plates were washed using a BioTek ELx50 microplate strip washer (BioTek, Winooski, Vt.). Absorbance was read on a Synergy™ Mx monochromator-based microplate reader (BioTek, Winooski, Vt.). Data was analyzed using Microsoft Excel version 14.0.7128.5000 (Microsoft Corporation, Redmond, Wash.) and GraphPad Prism version 6.03 for Windows (GraphPad Software, La Jolla, Calif.).

[0989] The ELISA kit was prewarmed to room temperature for 30 minutes prior to beginning the assay set up. The standard curve dilutions were prepared in accordance with the manufacturer's instructions.

[0990] Plasma matrix from Group 5 and sample plasma were thawed on ice and then centrifuged at approximately 1000×rcf for 10 minutes at 4° C. to pellet any insoluble material.

[0991] Matrix Assay Buffer for running the GLP-1 standard was prepared using plasma matrix from the nave group to a concentration of 25% in 100 μL. The ELISA microplates were washed three times with 350 μL/well 1× Wash Buffer and tapped sharply on paper towels to remove residual wash buffer. 100 μL of Assay Buffer was added to all sample wells, and 100 μL of Matrix Assay Buffer was added to all standard wells. 25 μL of each sample and standard were added in duplicate. Wells were mixed by pipetting. The plates were covered with adhesive foil and incubated for 18 hours at room temperature on a horizontal plate shaker at 100 rpm. The plates were then washed three times with 350 μL/well 1× Wash Buffer then tapped sharply several times on paper towels to remove any residual wash buffer. 100 μL/well of Biotin Labeled Antibody Solution was added to all wells. The plates were then sealed and incubated at room temperature for 1 hour on a horizontal plate shaker at 100 rpm. The plates were then washed three times with 350 μL/well 1× Wash Buffer then tapped sharply several times on paper towels to remove any residual wash buffer. 100 μL/well SA-HRP Solution was added to all wells. The plates were then sealed and incubated at room temperature for 30 minutes on a horizontal plate shaker at 100 rpm. The plates were then washed three times with 350 μL/well 1× Wash Buffer then tapped sharply several times on paper towels to remove any residual wash buffer. 100 μL/well Enzyme Substrate Solution was added to all wells. The plates were then sealed and incubated in the dark, without shaking, for 30 minutes at room temperature. Following substrate incubation, 100 μL Stop Solution was added to all wells.

[0992] The absorbance values were read on the Synergy™ Mx plate reader at 450 nm and 630 nm. Final values obtained were the A450 nm-A630 nm values.

[0993] The standard curve was corrected for matrix concentration of total GLP-1 by subtracting the mean of the 0 pM GLP-1 standard from each of the standard well A450 nm-A630 nm values in Excel. Duplicate sample concentrations were determined by non-linear regression using a 4 parameter logistic model of the background corrected standard following an x=log(x) transformation of GLP-1 concentration. ANOVA and multiple comparison tests were conducted using GraphPad Prism 6. The area under curve was integrated using the Linear-Log Trapezoidal Method on Microsoft Excel, with post hoc testing conducted in GraphPad.

[0994] FIG. 11 shows average plasma GLP-1 concentration for n=6 rats per treatment group over the course of the experiment. The error bars shown here correspond to the standard error of the mean. The [[SEQID]]SEQ ID NO:−00338 treatment group shows a statistically significant greater concentration of GLP-1 at the time of the glucose challenge than vehicle (p<0.0005, Dunnett's multiple comparisons test).

### Example 22: Use of Nutritive Polypeptides to Improve Glycemic Control in Zucker Fatty (fa/fa) Rats

[0995] An OGTT was performed in 18, fasted, male Zucker fatty rats with indwelling jugular vein catheters (JVC) to assess the acute effects of nutritive polypeptide dosing on glycemic control as well as insulin and GLP-1 levels.

[0996] Oral Glucose Tolerance Test. All rodents were approximately 10-11 weeks old, weighed average of approximately 450 g and acclimated for 4 days prior to testing. Animals were housed singly with bedding and fed a regular rodent chow diet (Lab Diet 5001) prior to the study. Housing temperature was at kept at 22±2° C., humidity at 50±20%, and a 12 hour light/12 hour dark cycle was implemented. Air circulation was ten or more air changes per hour with 100% fresh air. Prior to treatment, all rats were fasted overnight for fourteen hours. Fasted animals were treated with formulations of nutritive polypeptides dissolved in water by oral gavage (see Table E22A), and fifteen minutes after treatment gavage were then challenged with an oral gavage of glucose (5 g/kg). Blood glucose was measured and blood was collected at seven time points (−15, 0, 15, 30, 60, 90, 120 minutes relative to the glucose challenge). Blood was collected in an EDTA collection tube containing plasma stabilizers (a DPP4 inhibitor and a protease cocktail inhibitor). One additional rat was sacrificed at and bled out to provide naïve blood for analytical standards. Glucose was measured using small drops of blood collected via the JVC using a glucometer (AlphaTrak 2, Abbott).

TABLE E22A

| | Body | | | | |
|---|---|---|---|---|---|
| | weight | Polypeptides | | | Glucose |
| | (average, | [[SEQID]]SEQ | Dose | Volume | Dose |
| Group | g) | ID NO: | (mg/kg) | (ml/kg) | (g/kg) |
| 1 | 450 | Vehicle | 0 | 11.4 | 5 |
| 2 | 450 | 00105 | 2850 | 11.4 | 5 |
| 3 | 450 | 00338 | 2850 | 11.4 | 5 |

[0997] Approximately 300 μL of blood was collected from the JVC of all rats in Group 1-3 at six time points (−15, 0, 15, 30, 60, 90, and 120 minutes). Glucose gavages and blood collections were timed to take the same amount of time per animal so that sample times were accurate for each animal. All time points were collected within 5% of the target time. Blood was collected into pre-chilled (0-4° C.) K2EDTA blood collection tubes containing Protease Inhibitor Cocktail (Catalog number D8340, Sigma-Aldrich, St. Louis, Mo.) and DPPIV inhibitor (Millipore, Billerica, Mass.) added to the tubes at 1:100 prior to collection. After blood collection, blood samples were maintained chilled (2-6° C.) and centrifuged within 30 minutes. The collected plasma was placed in sample tubes and immediately stored at −80° C.

[0998] Prior to immunoassay analysis samples were thawed on ice for 1 hour, mixed thoroughly by pipette, rearrayed to 96 well microplates. Separate aliquots were prepared for insulin immunoassay and GLP-1 immunoassay. Master plate and aliquots were stored frozen at −80° C.

[0999] FIG. 12 shows the average blood glucose values during the OGTT described herein. The error bars shown are the standard errors of the mean.

[1000] The integrated area under curve (AUC) was calculated on Microsoft Excel using the Linear-Log Trapezoidal Method and statistical testing was conducted on GraphPad Prism 6.03.

[1001] FIG. 13 shows the integrated AUC for each treatment group between the time of glucose challenge (0 min.) and 60 minutes, and between time 0 and 120 minutes. No treatment showed statistically significant difference from vehicle between time 0 and 60 minutes. Between time 0 and 120 minutes [[SEQID]]SEQ ID NO:−00105 but not [[SEQID]]SEQ ID NO:−00338 shows a statistically significant decrease in integrated area under curve compared to vehicle (P<0.005, Dunnett's multiple comparisons test). These data show that acute dosing of [[SEQID]]SEQ ID NO:−00105 can reduce glucose excursion due to an oral glucose challenge in a Zucker Fatty (fa/fa) model rodent model.

[1002] Rat Insulin Enzyme Linked Immunosorbent Assay (ELISA). An Ultra-Sensitive Rat Insulin ELISA Kit was obtained from Crystal Chem, Inc. (Catalog number 90060, Downers Grove, Ill.). Plates were washed using a BioTek ELx50 microplate strip washer (BioTek, Winooski, Vt.). Absorbance was read on a Synergy Mx monochromator-based microplate reader (BioTek, Winooski, Vt.). Data was analyzed using Microsoft Excel version 14.0.7128.5000 (Microsoft Corporation, Redmond, Wash.) and GraphPad Prism version 6.03 for Windows (GraphPad Software, La Jolla, Calif.).

[1003] The ELISA kit was prewarmed to room temperature for 30 minutes prior to beginning the assay set up. The standard curve dilutions were prepared in accordance with the manufacturer's instructions for running the assay in Wide Range format.

[1004] Plasma matrix from the nave group and sample plasma were thawed on ice and then centrifuged at approximately 1000×rcf for 10 minutes at 4° C. to pellet any insoluble material.

[1005] Matrix Assay Buffer for running the insulin standard was prepared using plasma matrix from the nave group to a concentration of 5.26% in 95 μL. 95 μL of Assay Buffer was added to all sample wells, and 95 μL of Matrix Assay Buffer was added to all standard wells. 5 μL of each sample and standard were added in duplicate. The plates were incubated at 4° C. for 2 hours. The plates were then washed five times with 300 μL/well 1× Wash Buffer. The plates were tapped sharply several times on paper towels to remove any residual wash buffer.

[1006] Anti-Insulin Enzyme Conjugate Working Solution was prepared by combining 2 volumes Anti-Insulin Enzyme Conjugate Stock with 1 volume Enzyme Conjugate Diluent, and mixing by pipetting up and down and gently vortexing. 100 μL/well of Anti-Insulin Enzyme Conjugate Working Solution was added to all wells. The plates were sealed and incubated at room temperature for 30 minutes and then washed seven times with 300 μL/well 1× Wash Buffer. The plates were tapped sharply several times on paper towels to remove any residual wash buffer. 100 μL/well Enzyme Substrate Solution was then added to each well and incubated in the dark at room temperature for 40 minutes. 100 μL/well Stop Solution was added to all wells.

[1007] The absorbance was read on the Synergy™ Mx plate reader at 450 nm and 630 nm. Final values obtained were the A450 nm-A630 nm values. Samples in which the value exceeded the standard curve were rerun at 1:1 dilution against a 2.5% matrix standard

[1008] The insulin standard curve was corrected for matrix concentration of insulin by subtracting the mean of the 0 ng/mL insulin standard from each of the standard well A450 nm-A630 nm values in Excel. Duplicate sample concentrations were determined by non-linear regression using a 4 parameter logistic model of the background corrected standard following an x=log(x) transformation of insulin concentration in GraphPad Prism 6. ANOVA and multiple comparison tests were conducted on GraphPad Prism 6. The area under curve was integrated using the Linear-Log Trapezoidal Method on Microsoft Excel, with post hoc testing conducted in GraphPad.

[1009] FIG. 14 shows the average plasma insulin concentration for n=6 rats per treatment group in Vehicle &[[SEQID]]SEQ ID NO:−00105 and n=5 rats per treatment group in the case of [[SEQID]]SEQ ID NO:−00338 over the course of the experiment. One-way ANOVA with Dunnett's multiple comparisons tests were used to compare within each treatment to time 0 and between treatments at the same time point to vehicle. Vehicle had no statistically significant change in plasma insulin compared to the time of vehicle gavage. [[SEQID]]SEQ ID NO:−00105 had statistically significantly greater plasma insulin compared to the time of treatment gavage (time −15) at the time of the glucose challenge (time 0) and at 15 minutes and 90 minutes following glucose challenge (P=0.0002, P<0.05 and P<0.05, respectively). [[SEQID]]SEQ ID NO:−00338 had statistically significantly greater plasma insulin concentration compared to the time of treatment gavage at all subsequent sampled time points (P<0.0001, P<0.05, P<0.005, P<0.005, and P=0.0005, respectively).

[1010] In comparisons between treatments, neither [[SEQID]]SEQ ID NO:−00105 nor [[SEQID]]SEQ ID NO:−00338 was significantly different from Vehicle at the time of treatment or vehicle gavage. At the time of the glucose challenges and all subsequent time points sampled (0, 15, 30, 60 and 90 minutes) both [[SEQID]]SEQ ID NO:−00105 and [[SEQID]]SEQ ID NO:−00338 had a significantly greater plasma insulin concentration than vehicle. This shows that both treatments stimulate insulin secretion in the Zucker Fatty (fa/fa) model.

[1011] FIG. 15 shows the integrated area under the curve for each group. Only [[SEQID]]SEQ ID NO:−00338 treatment integrated between 0 and 90 minutes was statistically significantly greater than vehicle (P<0.005).

[1012] Active GLP-1 Enzyme Linked Immunosorbent Assay (ELISA). A rat active GLP-1 ELISA Kit was obtained from Eagle Biosciences (Catalog number GP121-K01, Nashua, N.H.). Plates were washed using a BioTek ELx50 microplate strip washer (BioTek, Winooski, Vt.). Absorbance was read on a Synergy™ Mx monochromator-based microplate reader (BioTek, Winooski, Vt.). Data was analyzed using Microsoft Excel version 14.0.7128.5000 (Microsoft Corporation, Redmond, Wash.) and GraphPad Prism version 6.03 for Windows (GraphPad Software, La Jolla, Calif.).

[1013] The ELISA kit was prewarmed to room temperature for at least 30 minutes prior to beginning the assay set up. The standard curve dilutions were prepared in accordance with the manufacturer's instructions.

[1014] Plasma matrix from Group 5 and sample plasma were thawed on ice and then centrifuged at approximately 1000×rcf for 10 minutes at 4° C. to pellet any insoluble material.

[1015] Matrix Assay Buffer for running the active GLP-1 standard was prepared using plasma matrix from the nave group to a concentration of 10% in 100 μL for samples tested at 1:1 dilution or 20% in 100 μL for samples tested undiluted. 20 μL of standards and samples were added to the pre-coated microplate and 100 μL appropriate assay buffer added to the standard and sample wells. The plates were covered with adhesive foil and incubated for 24 hours at 4° C. protected from light. The plates were then washed five times with 350 μL/well 1× Wash Buffer then tapped sharply several times on paper towels to remove any residual wash buffer. 100 μL/well of ELISA HRP Substrate was added to all wells. The plates were then sealed and incubated at room temperature for 20 minutes protected from light. 100 μL/well ELISA Stop Solution was added to all wells and gently mixed.

[1016] The absorbance values were read on the Synergy™ Mx plate reader at 450 nm and 620 nm. Final values obtained were the A450 nm-A620 nm values.

[1017] The standard curve was corrected for matrix concentration of active GLP-1 by subtracting the mean of the 0 pM GLP-1 standard from each of the standard well A450 nm-A620 nm values in Excel. Duplicate sample concentrations were determined by non-linear regression using a 4 parameter logistic model of the background corrected standard following an x=log(x) transformation of GLP-1 concentration. ANOVA and multiple comparison tests were conducted using GraphPad Prism 6. The area under curve was integrated using the Linear-Log Trapezoidal Method on Microsoft Excel, with post hoc testing conducted in GraphPad.

[1018] FIG. 16 shows average plasma GLP-1 concentration for n=6 rats per vehicle and [[SEQID]]SEQ ID NO:−00105, and n=5 rats per [[SEQID]]SEQ ID NO:−00338 treatment group, over the course of the experiment. One-way ANOVA with Dunnett's multiple comparisons tests were used to compare within each treatment to time 0 and between treatments at the same time point to vehicle. Vehicle showed no significant difference in GLP-1 (7-36) concentration at any time point after vehicle gavage. [[SEQID]]SEQ ID NO:−00105 showed significantly greater GLP-1 (7-36) concentration at 15 minutes and 30 minutes after glucose challenge (P<0.0001 and P<0.05, respectively). [[SEQID]]SEQ ID NO:−00338 had a significantly greater GLP-1 concentration at 15 minutes following glucose challenge (P<0.005).

[1019] When compared to vehicle at each time point only [[SEQID]]SEQ ID NO:−00105 had a significantly greater GLP-1 (7-36) concentration than vehicle at 15 minutes following glucose challenge (P<0.005).

[1020] FIG. 17 shows the area under curve for GLP-1 (7-36) for each treatment group integrated to 0-90 and 0-60 minutes. No treatment had a significantly different GLP-1 (7-36) integrated AUC compared to vehicle at either 0-90 or 0-60 minutes.

[1021] In another experiment, an OGTT was performed in 24, fasted, male Zucker fatty rats with indwelling jugular vein catheters (JVC) to assess the acute effects of nutritive protein dosing on glycemic control as well as insulin and GLP-1 levels. The capacity of [[SEQID]]SEQ ID NO:−00105 to improve glucose control was tested by comparing the blood glucose excursion of [[SEQID]]SEQ ID NO:−00105 to alogliptin to [[SEQID]]SEQ ID NO:−00105+alogliptin to vehicle in the context of an oral glucose tolerance test. All rodents were approximately 10-11 weeks old, weighed average of approximately 430 g and acclimated for 4-5 days prior to testing. Prior to treatment, all rats were fasted overnight for fourteen hours. Fasted animals were treated with formulations of nutritive proteins dissolved in water by oral gavage (see table E22B), and fifteen minutes after treatment gavage were then challenged with an oral gavage of glucose (2 g/kg). Blood glucose was measured and blood was collected at nine time points (−15, 0, 15, 30, 60, 90, 120, 180 and 240 minutes relative to the glucose challenge).

TABLE E22B

| | | | Polypeptides | | DPP IV | Glucose |
|---|---|---|---|---|---|---|
| | Body weight | Treatment | Dose | Volume | Inhibitor | Dose |
| Group | (average, g) | ID | (mg/kg) | (ml/kg) | Dose (mg/kg) | (g/kg) |
| 1 | 430.5 | Vehicle | 0 | 11.4 | 0 | 2 |
| 2 | 432.3 | [[SEQID]]SEQ | 2850 | 11.4 | 0 | 2 |
| | | ID NO.: -00105 | | | | |
| 3 | 431.7 | Alogliptin | 0 | 11.4 | 0.3 | 2 |
| 4 | 435.5 | [[SEQID]]SEQ | 2850 | 11.4 | 0.3 | 2 |
| | | ID NO. -00105 + | | | | |
| | | Alogliptin | | | | |

[1022] FIG. 18 shows the average blood glucose values during the OGTT described herein. N=6 rats per treatment group. The error bars shown are the standard errors of the mean. Each group was compared post hoc on GraphPad Prism 6, two-way ANOVA, Dunnett's multiple comparisons test first comparing within each group to the fasting glucose concentration, followed by a comparison of each time point to vehicle. No treatment group blood glucose was significantly different from fasting at the time of the glucose challenge.

[1023] Fasting glucose and blood glucose at the time of the glucose challenge was not significantly different between each group and vehicle. At 15 minutes following glucose challenge, [[SEQID]]SEQ ID NO:−00105 only and [[SEQID]]SEQ ID NO:−00105+Alogliptin had significantly lower blood glucose compare to vehicle (P=0.0003 & P<0.0001, respectively). At 30 minutes following the glucose challenge Alogliptin alone and [[SEQID]]SEQ ID NO:−00105+Alogliptin had significantly lower blood glucose than vehicle (P=0.0424 & P=0.0021, respectively). At 60 minutes following the glucose challenge, only Alogliptin alone was significantly lower than vehicle (P<0.0001). No group after 60 minutes had significantly different blood glucose than vehicle.

[1024] The integrated area under curve (AUC) was calculated on Microsoft Excel using the Linear-Log Trapezoidal Method and two-way ANOVA and Dunnett's multiple comparisons tests was conducted on GraphPad Prism 6.03. No treatment showed statistically significant difference in glucose AUC from vehicle between time 0 and 60 minutes. Between time 0 and 120 minutes and between time 0 and 240 minutes only the alogliptin alone treatment was significantly less than vehicle (P=0.0051 & P=0.0054, respectively).

### Example 23: Use of Nutritive Polypeptides to Improve Glycemic Control and Fasting Glucose in Diet Induced Obese Mice

[1025] The effects of chronic dosing of therapeutic nutritive polypeptides described herein are evaluated by oral glucose tolerance tests in diet induced obese (DIO) mice. In particular, chronic dosing in this animal model of metabolic disease can affect glycemic control, insulin resistance, fasting glucose and insulin levels, and comparison of fasting levels as well as glucose area under the curve (AUC) during an OGTT before and after a period of daily dosing provides a measure of compound efficacy.

[1026] Four groups of 10 male C57BL/6 mice are fed a high fat diet ad libitum for 14 weeks to ensure that they develop elevated fasting glucose levels (hyperglycemia), elevated fasting insulin levels (hyperinsulinemia), and impaired glucose control (Xu. H. et al. Chronic inflammation in fat plays a crucial role in the development of obesity-related insulin resistance. J. Clin. Invest. (2003) 112: 1821-1830). A single group of 10 male C57BL/6 mice (group 1) is fed a normal diet for comparison of treatment arms on HFD to normal diet at the same age, handling, and housing conditions. All mice are housed and acclimated for three days prior to the start of the study.

[1027] All Mice are fasted overnight for fourteen hours before OGTT treatment, and a blood sample is collected the morning of the study prior to dosing for analysis of fasting glucose and hormone levels. Fasted animals are treated with formulation of provided nutritive polypeptides by oral gavage fifteen minutes before glucose challenge. Glucose (2 g/kg) is orally administered at time zero. Blood glucose is measured at seven time points (−15, 0, 15, 30, 60, 90, 120 minutes). Age-matched normal mice under regular diet are used as an internal standard for the analytics. In groups 2-5, mice receive daily dose of provided therapeutic nutritive polypeptides (2.85 g/kg) (groups 4 and 5) or vehicle control (groups 2 and 3) for 15-30 days via daily gavage or formulation into chow. All blood is collected in an EDTA collection tube containing plasma stabilizers (a DPP4 inhibitor and a protease cocktail inhibitor), processed for plasma, and stored frozen at −80 C.

[1028] An OGTT as described above is performed again on the final day of the study with either vehicle (groups 2 and 4) or test article (groups 1, 3, and 5). Prior to the final test article or vehicle dose, a blood sample is collected for analysis of fasting glucose and hormone levels. At the completion of the final OGTT, all mice are sacrificed and entire blood volume is collected via cardiac puncture. Analysis of insulin levels are performed using an ELISA method described herein.

[1029] Comparisons of end of study OGTT glucose AUC across groups 2 and 4 describe the effect of chronic test article administration without the acute effects of test article administration on the OGTT. Comparisons of end of study OGTT glucose AUC across groups 3 and 5 describe the effect of chronic test article administration and include the acute effects of test article administration on the OGTT. Comparisons of fasting glucose and insulin levels at the beginning and end of the study within group 4 or within group 5 describe the effect of chronic dosing on fasting glucose and insulin levels.

### Example 24: Use of Nutritive Polypeptides to Induce Insulin Secretion in Rodents

[1030] Ingested amino acids have been shown to have the capacity to induce insulin secretion (Gannon M. C. and F. Q. 2010. Nuttall. Amino Acid Ingestion and Glucose Metabolism—A Review. IUBMB Life, 62(9): 660-668). Protein ingestion increases plasma insulin significantly in comparison to ingestion of glucose alone (Nuttall, et al. 1984. Effect of protein ingestion on the glucose and insulin response to a standardized oral glucose load. Diabetes Care. 7(5):465-470). Ingested protein increases insulin secretion in part via the action of incretin hormones, i.e., glucagon-like peptide-1 (GLP-1) and glucose-dependent insulinotropic peptide (GIP), which are secreted by endocrine cells upon luminal exposure to nutrients (Baggio L L & D J Drucker. 2007. Biology of incretins: GLP-1 and GIP. Gastroenterology. 132:2131-2157). Amino acids such as leucine and arginine have also been shown to directly stimulate insulin release (Newsholme P. et al. New insights into amino acid metabolism, B-cell function and diabetes. Clin. Sci. (2005) 108: 185-194). In these studies, the insulin response after acute dosing of various nutritive proteins was measured in rodents.

[1031] Animals were treated and acutely dosed with various test articles as part of pharmacokinetic rodent experiments according to methods described herein. Unless otherwise stated all dosing was at 2.85 g/kg body weight. All treatment groups except for [[SEQID]]SEQ ID NO:−00240 which had n=5 rats, and [[SEQID]]SEQ ID NO:−00587 which had n=3, contained n=4 rats.

[1032] Quantification of Plasma Insulin Using AlphaLISA® Insulin Immunoassay

[1033] Plasma samples were thawed on ice and centrifuged for 10 minutes at 1109×g to pellet insoluble material. AlphaLISA® Insulin Immunoassay Kit (PerkinElmer, AL204C) was removed from 4° C. cold room and kept on ice during assay set up. 1× Assay Buffer was prepared by diluting 10× Assay Buffer with milliQ water.

[1034] Standard buffer for dilution of insulin was prepared at 25.9% fasted rat plasma in 1× Assay Buffer and used to prepare a 16 point standard curve. Plasma samples were prepared by diluting 7:20 in 1× Assay Buffer in a 96-well PCR microplate.

[1035] Acceptor bead mix was prepared by diluting Acceptor Beads and Biotinylated Anti-Insulin Antibody 1/400 in 1× Assay Buffer. Acceptor bead mix was pipetted, 20 4/well, into a white opaque 384 well microplate (PerkinElmer, OptiPlate-384), to this mixture was added 10 4/well of insulin standard in fasted rat plasma or sample rat plasma in duplicate. The plate was sealed with a foil plate seal and incubated on a horizontal shaker at 600 rpm for 60 minutes at room temperature.

[1036] It was necessary to protect the Streptavidin Coated Donor Beads from light; as such, in a darkened room, donor bead mix was prepared by diluting the streptavidin coated donor beads 1/125 in 1× Assay Buffer. After the first incubation step, 20 μL/well donor bead mix was added to the standard and samples. The assay plate was sealed and returned to the horizontal shaker at ˜600 rpm, for 30 minutes at room temperature. Following the donor bead incubation, luminescence was read on the EnSpire® Alpha plate reader.

[1037] Data were analyzed with Microsoft Excel version 14.0.7128.5000 (32-bit) and GraphPad Prism version 6.03. A standard curve was generated to log(Insulin (μIU)). Rat plasma insulin concentrations were interpolated using a sigmoidal, four parameter logistic equation. The mean of duplicate concentration of insulin in the technical replicates for each rat were plotted against time. Area under curve was integrated for 0-240 minutes and 0-60 minutes using the Linear-Log Linear Method in Microsoft Excel.

[1038] Quantification of Plasma Insulin Using a Rat Insulin Enzyme Linked Immunosorbent Assay (ELISA).

[1039] An Ultra-Sensitive Rat Insulin ELISA Kit was obtained from Crystal Chem, Inc. (Catalog number 90060, Downers Grove, Ill.). Plates were washed using a BioTek ELx50 microplate strip washer (BioTek, Winooski, Vt.). Absorbance was read on a Synergy™ Mx monochromator-based microplate reader (BioTek, Winooski, Vt.). Data was analyzed using Microsoft Excel version 14.0.7128.5000 (Microsoft Corporation, Redmond, Wash.) and GraphPad Prism version 6.03 for Windows (GraphPad Software, La Jolla, Calif.).

[1040] The ELISA kit was pre-warmed to room temperature for 30 minutes prior to beginning the assay set up. The standard curve dilutions were prepared in accordance with the manufacturer's instructions for running the assay in Wide Range format.

[1041] Plasma matrix from the nave group and sample plasma were thawed on ice and then centrifuged at approximately 1000×rcf for 10 minutes at 4° C. to pellet any insoluble material.

[1042] Matrix Assay Buffer for running the insulin standard was prepared using plasma matrix from the nave group to a concentration of 5.26% in 95 μL. 95 μL of Assay Buffer was added to all sample wells, and 95 μL of Matrix Assay Buffer was added to all standard wells. 5 μL of each sample and standard were added in duplicate. The plates were incubated at 4° C. for 2 hours. The plates were then washed five times with 300 μL/well 1× Wash Buffer. The plates were tapped sharply several times on paper towels to remove any residual wash buffer.

[1043] Anti-Insulin Enzyme Conjugate Working Solution was prepared by combining 2 volumes Anti-Insulin Enzyme Conjugate Stock with 1 volume Enzyme Conjugate Diluent, and mixing by pipetting up and down and gently vortexing. 100 μL/well of Anti-Insulin Enzyme Conjugate Working Solution was added to all wells. The plates were sealed and incubated at room temperature for 30 minutes and then washed seven times with 300 μL/well 1× Wash Buffer. The plates were tapped sharply several times on paper towels to remove any residual wash buffer. 100 μL/well Enzyme Substrate Solution was then added to each well and incubated in the dark at room temperature for 40 minutes. 100 μL/well Stop Solution was added to all wells. The absorbance was read on the Synergy™ Mx plate reader at 450 nm and 630 nm. Final values obtained were the A450 nm-A630 nm values.

[1044] The insulin standard curve was corrected for matrix concentration of insulin by subtracting the mean of the 0 ng/mL insulin standard from each of the standard well A₄₅₀ₙₘ-A₆₃₀ₙₘ values in Excel. Duplicate sample concentrations were determined by non-linear regression using a 4 parameter logistic model of the background corrected standard following an x=log(x) transformation of insulin concentration in GraphPad Prism 6. ANOVA and multiple comparison tests were conducted on GraphPad Prism 6. Area under curve was integrated for 0-240 minutes and 0-60 minutes using the Linear-Log Linear Method in Microsoft Excel.

[1045] In Vivo Plasma Insulin Concentrations

[1046] FIGS. 19 and 20 show the combined biological replicate data for a study of vehicle and [[SEQID]]SEQ ID NO:−00105 administered at three different doses and [[SEQID]]SEQ ID NO:−00426, [[SEQID]]SEQ ID NO:−00338, [[SEQID]]SEQ ID NO:−00341 administered at one dose, where plasma insulin was measured using the AlphaLISA Insulin kit. All error bars represent the standard error of the mean. A one-way ANOVA with Dunnett's multiple comparisons tests were used to compare within each treatment to time 0 and between treatments at the same time point to vehicle.

[1047] In FIG. 19, [[SEQID]]SEQ ID NO:−00105 at 2.85 g/kg had a statistically significant increase in plasma insulin concentration at 15, 30 and 60 minutes following gavage (P<0.0001, P<0.0001, and P<0.05, respectively); [[SEQID]]SEQ ID NO:−00105 at 1.78 g/kg had a statistically significant increase in plasma insulin concentration at 15 and 30 minutes following gavage (P=0.0005 and P<0.05, respectively); at the lowest [[SEQID]]SEQ ID NO:−00105 dose plasma insulin concentration over the time course was not significantly different from time 0. When compared to the plasma insulin concentration of the vehicle control at each time point, [[SEQID]]SEQ ID NO:−00105 at 2.85 g/kg showed statistically significant greater plasma insulin than vehicle at 15 minutes and 30 minutes following oral gavage (P<0.0001 and P<0.001, respectively), [[SEQID]]SEQ ID NO:−00105 at 1.78 g/kg showed a statistically significant increase in plasma insulin concentration at 15 minutes following oral gavage (P=0.0005). In FIG. 20, only [[SEQID]]SEQ ID NO:−00338 had a statistically significant increase in plasma insulin concentration from 0 at 15 and 30 minutes following oral gavage (P=0.005 and P<0.05, respectively). When compared to vehicle plasma insulin concentration at each concentration [[SEQID]]SEQ ID NO:−00338 was significantly greater than vehicle at 15 minutes following oral gavage (P<0.01).

[1048] FIGS. 21 and 22 show the integrated area under curves for plasma insulin concentrations measured for vehicle of [[SEQID]]SEQ ID NO:−00105, [[SEQID]]SEQ ID NO:−00426, [[SEQID]]SEQ ID NO:−00338, [[SEQID]]SEQ ID NO:−00341, error bars are the standard error of the mean. One-way ANOVA with Dunnett's multiple comparisons tests were used to compare the AUCs to vehicle. [[SEQID]]SEQ ID NO:−00105 at 2.85 g/kg had a statistically significantly greater plasma insulin AUC than vehicle when integrated from 0-240 minutes and 0-60 minutes (P=0.0005 and P<0.05, respectively).

[1049] FIGS. 23 and 24 show the combined biological replicate data for a study of vehicle and [[SEQID]]SEQ ID NO:−00423, [[SEQID]]SEQ ID NO:−00587, [[SEQID]]SEQ ID NO:−00105, [[SEQID]]SEQ ID NO:−00424, [[SEQID]]SEQ ID NO:−00425, and [[SEQID]]SEQ ID NO:−00429, where plasma insulin was measured using the AlphaLISA Insulin kit. All error bars represent the standard error of the mean. One-way ANOVA with Dunnett's multiple comparisons tests were used to compare within each treatment to time 0 and between treatments at the same time point to vehicle.

[1050] FIGS. 25 and 26 shows the integrated area under curves for plasma insulin concentrations shown in FIGS. 23 and 24. One-way ANOVA with Dunnett's multiple comparisons tests were used to compare the AUCs to vehicle. [[SEQID]]SEQ ID NO:−00587 had a significantly greater plasma insulin AUC when integrated at 0-240 minutes (P<0.005).

[1051] FIG. 27 shows the combined biological replicate data for a study of vehicle and [[SEQID]]SEQ ID NO:−00105, [[SEQID]]SEQ ID NO:−00240, and [[SEQID]]SEQ ID NO:−00559, where plasma insulin was measured using the Rat Insulin ELISA kit. All error bars represent the standard error of the mean. One-way ANOVA with Dunnett's multiple comparisons tests were used to compare within each treatment to time 0. [[SEQID]]SEQ ID NO:−00105, and [[SEQID]]SEQ ID NO:−00559 both had a statistically significant increase in plasma insulin concentration at 15 minutes post gavage compared to time 0 (P<0.05, both). [[SEQID]]SEQ ID NO:−00240 had statistically significant increase in plasma insulin at 15 and 30 minutes post gavage compared to time 0 (P<0.05 & P<0.01, respectively). The vehicle had no statistically significant change in plasma insulin concentration compared to time 0.

[1052] FIG. 28 shows the integrated area under curve from 0-240 and 0-60 minutes post gavage for each treatment, error bars are the standard error of the mean. No treatment showed a significantly greater AUC compared to vehicle at 0-60 or 0-240 minutes by a Dunnett's multiple comparisons test.

### Example 25: Nutritive Polypeptide Stimulation of Glucagon Like Peptide 2 Secretion in Healthy, Fasted Rats

[1053] Glucagon-like peptide-2 (GLP-2) is a thirty three amino acid peptide produced by the post-translational cleavage of proglucagon. GLP-2 is secreted by the intestinal enteroendocrine L-cells of humans and rodents along with GLP-1 in response to exposure to nutrients in the gut lumen. GLP-2 has been shown previously to improve outcomes in the treatment of short bowel syndrome (Brinkman A S, Murali S G, Hitt S, Solverson P M, Holst J J, Ney D M. 2012. Enteral nutrients potentiate glucagon-like peptide-2 action and reduce dependence on parenteral nutrition in a rat model of human intestinal failure. Am. J. Physiol. Gastrointest. Liver Physiol. 303(5):G610-G622) by supporting intestinal growth (Liu X, Murali S G, Holst J J, Ney D M. 2008. Enteral nutrients potentiate the intestinotrophic action of glucagon-like peptide-2 in association with increased insulin-like growth factor-I responses in rats. Am. J. Physiol. Gastrointest. Liver Physiol. 295(6):R1794-R1802).

[1054] Animals were treated and acutely dosed with test articles as part of pharmacokinetic rodent experiments according to methods described herein. In this experiment, two test articles were analyzed, vehicle and a nutritive formulation of [[SEQID]]SEQ ID NO:−240, dosed at 1.54 g/kg.

[1055] Total GLP-2 Enzyme-Linked Immunosorbent Assay (ELISA)

[1056] Total GLP-2 was measured with Millipore Total GLP-2 ELISA Kit (Millipore, EZGLP2-37K). The ELISA kit was equilibrated to room temperature for a minimum of 30 minutes prior to running the assay. The kit GLP-2 Standard, Quality Control 1 and Quality Control 2 were reconstituted with 500 μL MilliQ® water, inverted 5 times and incubated at room temperature for 5 minutes, then gently vortexed to mix. The standard curve was prepared by diluting the GLP-2 Standard serially 1:1 in kit Assay Buffer to generate an eight point standard curve including 0 ng/mL GLP-2. Plasma samples were thawed on ice and centrifuged for 10 minutes at approximately 1109×rcf to pellet insoluble material. Fasted plasma matrix from untreated, fasted rat was prepared for running the standard and quality controls in duplicate at 20% (2×).

[1057] 1× Wash Buffer was prepared in a clean 500 mL glass bottle by combining 50 mL 10× Wash Buffer with 450 mL MilliQ® water. Strips were prepared by washing 3 times with 300 μL 1× Wash Buffer applied with a 30-300 μL 8-channel pipette. Between washes the wash buffer was decanted into a waste receptacle and the plate tapped sharply on a stack of paper towels to remove remaining wash buffer.

[1058] Following the first wash, 90 μL of Assay Buffer was added to sample wells, and 50 μL of 20% matrix in Assay Buffer was added to all standard and quality control wells. 10 μL of sample was added to each sample well and 50 μL of standard and quality control were added to matrix containing wells. Samples, standards and quality control wells were run in duplicate, except for 0 ng/mL GLP-2 standard which was run in quadruplicate.

[1059] The plate was sealed with a plastic plate seal and incubated at room temperature on a horizontal plate shaker at 450 rpm for 2 hours. Following the first incubation, the plate was washed three times with 1× Wash Buffer, decanting into a waste receptacle and tapping the inverted plate sharply on a stack of paper towels to remove excess wash buffer after each wash.

[1060] 100 μL of Detection Antibody was added to each well and the plate was sealed with a plastic plate seal and incubated at room temperature on a horizontal plate shaker at 450 rpm for 1 hour. Following the second incubation, the plate was washed three times with 1× Wash Buffer, decanting into a waste receptacle and tapping the inverted plate sharply on a stack of paper towels to remove excess wash buffer after each wash.

[1061] 100 μL Enzyme Solution was added to each well and the plate was sealed with a plastic plate seal and incubated at room temperature on a horizontal plate shaker at 450 rpm for 30 minutes. Following the third incubation, the plate was washed three times with 1× Wash Buffer, decanting into a waste receptacle and tapping the inverted plate sharply on a stack of paper towels to remove excess wash buffer after each wash.

[1062] 100 μL Substrate was added to each well and the plate was sealed with a plastic plate seal and an opaque foil seal and incubated at room temperature on a horizontal plate shaker at 450 rpm for 20 minutes. Following substrate reaction, 100 μL of Stop Solution was added to each well and the plate gently shaken to mix.

[1063] Absorbance was measured on a Synergy™ MX Plate Reader at 450 nm and 590 nm. Measured values were the difference between 450 nm and 590 nm absorbance values.

[1064] Data were analyzed with GraphPad Prism 6.03. A standard curve was generated to log(Total GLP-2 (ng/mL)) after subtracting the 0 ng/mL background value. Rat plasma GLP-2 concentrations were interpolated using a sigmoidal, four parameter logistic equation. The mean of duplicate concentration of GLP-2 in the technical replicates for each rat were plotted against time. The integrated area under curve was calculated on Microsoft Excel where the area between each time point was calculated for each biological replicate as the sum of the areas using the Linear-Log Trapezoidal Method.

[1065] FIG. 29 shows the calculated total GLP-2 concentration over a 4 hour time course for [[SEQID]]SEQ ID NO:−00240 and vehicle control. Vehicle GLP-2 concentration did not change significantly at any of the time points sampled compared to time 0, whereas [[SEQID]]SEQ ID NO:−00240 showed a statistically significant increase in GLP-2 concentration relative to time 0 at 15 (P<0.00), 30 (P<0.0001) and 60 minutes (P<0.01) following [[SEQID]]SEQ ID NO:−00240 gavage (Dunnett's multiple comparison test). [[SEQID]]SEQ ID NO:−00240 was compared to vehicle at each time point by ordinary One-Way ANOVA with a Dunnett's multiple comparisons test post hoc analysis. GLP-2 concentration was not significantly different between treatments at time 0. GLP-2 concentrations were statistically significantly greater than vehicle at 15 (P<0.001), 30 (P<0.0001), 60 (P<0.0001) and 120 minutes (P<0.05) following treatment. These data show that an acute dose of [[SEQID]]SEQ ID NO:−00240 but not vehicle induces secretion of GLP-2 in healthy fasted rodents.

[1066] FIG. 30 shows the integrated GLP-2 area under the curve over the first hour and the full 4 hours. The area under curve for GLP-2 was significantly greater in the [[SEQID]]SEQ ID NO:−00240 treatment compared to vehicle when integrated over 0-60 minutes and over 0-240 minutes (P<0.005 & P<0.01, respectively, unpaired 2-tailed Student's t-test). This data indicated that acute dosing of [[SEQID]]SEQ ID NO:−00240 significantly stimulated GLP-2 secretion in comparison to vehicle within the first hour of acute dosing in healthy fasted rodents.

### Example 26: Effect of Orally Delivered Nutritive Polypeptides on Plasma Insulin and Incretin Levels in Humans

[1067] The insulin and incretin response to protein ingestion is predicated on the delivery of amino acids. The purpose of this study was to examine the changes in plasma insulin concentrations in response to [[SEQID]]SEQ ID NO:−00426 and [[SEQID]]SEQ ID NO:−00105 over a period of 240 minutes. Two groups of four apparently healthy subjects between the ages of 18 and 50 received 20 grams of the nutritive polypeptide formulations orally. All subjects were fasted overnight (>8 hrs) before starting the study. Venous blood samples were collected at specified time points (i.e. 0, 15, 30, 60, 90, 120, 150, 180, 210 and 240 minutes) following the oral ingestion of nutritive polypeptide to assess changes in plasma insulin and incretin concentrations. FIG. 31 shows the average insulin response of all subjects to [[SEQID]]SEQ ID NO:−00105, and FIG. 32 shows the average fold response over baseline (time 0 min), measured as described herein. The error bars on all figures correspond to the standard error of the mean. The first phase insulin response occurs between time 0 min and 90 min. The second phase insulin response occurs between 90 min and 210 min. A 1-way ANOVA comparison across time indicates that there is a significant change in plasma insulin over time (p=0.003). A Dunnett multicomparison test indicates that the insulin values at 15 and 30 min time points are significantly different from that at time 0 min (p<0.05).

[1068] FIG. 33 shows the average insulin response of all patients to [[SEQID]]SEQ ID NO:−00426, and FIG. 34 shows the average fold response over baseline (time 0 min), measured as described herein. The error bars on all figures correspond to the standard error of the mean.

[1069] FIG. 35 shows the average total Gastric Inhibitory Polypeptide (GIP) response of all patients to [[SEQID]]SEQ ID NO:−00426, and FIG. 36 shows the average fold response over baseline (time 0 min), measured as described herein. The error bars on all figures correspond to the standard error of the mean.

### Example 27. In Vitro Demonstration of Skeletal Muscle Cell Growth and Signaling Using Nutritive Polypeptide Amino Acid Compositions Containing Tyrosine, Arginine, and/or Leucine

[1070] The mammalian target of rapamycin (mTOR) is a protein kinase an a key regulator of cell growth, notably via protein synthesis. mTOR acts as a master regulator of cellular metabolism that nucleates two complexes, mTORC1 and mTORC2 that have different kinase specificity and distinct protein partners (citations from ESS-020).

[1071] mTOR drives protein synthesis across tissues. mTORC1 mediated response to growth signaling is gated by amino acids. The localization of the response to lysosomes couples mTOR activation to muscle protein catabolism. mTORC1 can be gated by essential amino acids (EAAs), leucine, and glutamine. Amino acids must be present for any upstream signal, including growth factors, to activate mTORC1 (citations from ESS-020).

[1072] These experiments demonstrated the capacity of arginine, tyrosine as well as leucine to modulate mTORC1 activation by measuring downstream phosphorylation of the ribosomal protein S6 (rps6) in response to stimulation by single amino acids in vitro.

[1073] Primary Rat Skeletal Muscle Cell (RSKMC) culture medium was purchased from Cell Applications (Catalog number: R150-500, San Diego, Calif.). Starvation medium DMEM/F12 was bought from Sigma (Catalog number: D9785, St. Louis, Mo.). Customized starvation medium Mod.4 was purchased from Life Technologies (Catalog number: 12500062, Grand Island, N.Y.), which does not contain any amino acids, phenol red, or glucose. Fetal bovine serum (FBS) and other growth factors were obtained from Cell Applications (Catalog number: R151-GS, San Diego, Calif.). Tissue culture flasks and clear bottom 96-well tissue culture plates were purchased from Corning Incorporated (Catalog number: 430641 and 353072, respectively, Corning, N.Y.). Trypsin/EDTA was obtained from Life Technology (Catalog number: 25200, Grand Island, N.Y.). DPBS and HBSS were also purchased from Life Technologies (Catalog number: 14190, 14175, respectively). AlphaScreen® SureFire® Ribosomal Protein S6 Assay Kits was obtained from Perkin Elmer (Catalog number: TGRS6P2S10K).

[1074] Primary Rat Skeletal Muscle Cell (RSKMC) culture. RSKMC were isolated using protocol described herein and cryopreserved in liquid nitrogen. The cells were also maintained in RSKMC medium (Cell Applications) in T75 tissue flask in a 37° C., 5% CO2 tissue culture incubator (Model 3110, Thermo Fisher Scientific). The cells were split every three day when they reached 90% confluency. RSKMC cells were cultured in RSKMC medium in T75 tissue flask to 100% confluency. The culture medium was aspirated from the culture flask and rinsed once with 10 ml of DPBS, and then 1.5 ml of 0.25% trypsin/EDTA was added to the cells. After the cells were detached from the flask, 10 ml of culture medium were added. The medium was pipetted up and down with a 10 ml pipet to detach the cells from the flask. The cells were then seeded into clear bottom 96-well tissue culture plates at a density of 50,000 cells per well. Following overnight culture in a 37° C., 5% CO2 incubator, the cells were starved over a period of 4 hours with starvation DME/F12 medium without FBS and leucine in a 37° C., 5% CO2 tissue culture incubator, then starved for another hour incubation with Hank's Buffered Salt Solution (HBSS). The cells were stimulated with different concentrations of leucine in starvation medium for 15 and 30 minutes. The cells were also treated with 5 nM of Rapamycin (R0395, Sigma) or 100 nM of Insulin (19278, Sigma) for 15 and 30 minutes. The cells were lysed in 20 μL of Lysis Buffer (Perkin Elmer) for 10 minutes at room temperature with shaking at 725 rpm. The cell lysates were stored at −80° C. and AlphaScreen® assay was performed the next day. AlphaScreen® SureFire® Ribosomal Protein S6 Assay was performed according to manufacturer's manual.

[1075] FIG. 37 shows the relative alphascreen signal (y-axis) measured at different Leucine concentrations, demonstrating that leucine stimulates phosphorylation of rps6 in primary RSkMC in a dose-dependent manner. This stimulation was inhibited in a dose dependent manner by the mTOR inhibitor, rapamycin.

[1076] FIG. 38 shows that leucine stimulates phosphorylation of rps6 in primary RSkMC in a dose-dependent manner in both a complete amino acid medium (Arg, His, Lys, Asp, Glu, Ser, Thr, Asn, Gln, Cys, Gly, Pro, Ala Val, Ile, Met, Phe, Tyr, Trp), as well as a minimal 12 amino acid mixture containing only (Arg, His, Lys, Thr, Gln, Cys, Val, Ile, Met, Phe, Tyr, and Trp) at their DME/F12 concentrations (see table E27B).

[1077] Primary skeletal muscle cells obtained from the Soleus (Sol), gastrocnemius (GS) and extensor digitorum longus (EDL) of two Sprague-Dawley rats. FIGS. 39, 40, and 41 shows that leucine stimulates mTOR RPS6 pathway using isolated primary cells in a dose dependent manner.

[1078] Arginine, tyrosine and leucine are required to fully stimulate the mTOR pathway. Cells were starved as described above in Mod.4 medium without fetal bovine serum and then stimulated in Mod.4 medium lacking each of the respective single amino acids (see table E27A and E27B for composition of Mod.4 medium and DME/F12 amino acid levels, respectively).

TABLE E27A

| Vitamins | μM | Other | mM | Inorganic Salts | mM |
|---|---|---|---|---|---|
| Choline chloride | 64.1 | D-Glucose | 17.5 | Calcium chloride, | 1.05 |
| | | (Dextrose) | | anhydrous | |
| D-Calcium | 4.7 | Sodium Pyruvate | 0.5 | Copper (II) Sulfate | 5.21E−06 |
| pantothenate | | | | Pentahydrate | |
| Folic Add | 6.01 | HEPES | 15 | Magnesium Sulfate | 0.407 |
| | | | | (anhyd.) | |
| Niacinamide | 16.56 | Hypoxanthine | 0.018 | Magnesium Chloride | 0.301 |
| Pyrodoxine | 9.88 | Linoleic Acid | 1.50E−04 | Potassium Chloride | 4.157 |
| hydrochloride | | | | | |
| Riboflavin | 0.58 | Putrescine | 5.03E−04 | Sodium Bicarbonate | 0.014 |
| | | Hydrochloride | | | |
| Thiamine | 6.44 | Thioctic Acid | 5.10E−04 | Sodium Chloride | 120.6 |
| hydrochloride | | | | | |
| i-inositol | 70 | Thymidine | 1.51E−03 | Sodium Phosphate | 0.521 |
| | | | | Monobasic | |
| D-biotin | 1.43E−02 | Phenol Red | 5.00 × 10\hat{ }−4 | Sodium Phosphate | 0.5 |
| | | | (%) | Dibasic | |
| Vitamin B-12 | 0.5 | | | Iron (III) Nitrate | 1.24E−04 |
| | | | | Nonahydrate | |
| | | | | Iron (II) Sulfate | 1.50E−03 |
| | | | | Heptahydrate | |
| | | | | Zinc Sulfate | 1.50E−03 |
| | | | | heptahydrate | |

TABLE E27B

| Amino Acids | μM | Amino Acids | μM |
|---|---|---|---|
| Glycine | 250 | L-Leucine | 451 |
| L-Alanine | 50 | L-Lysine | 500 |
| L-Arginine | 700 | L-Methionine | 116 |
| L-Asparagine | 57 | L-Phenylalanine | 215 |
| L-Aspartic Acid | 50 | L-Proline | 150 |
| L-Cysteine | 100 | L-Serine | 250 |
| L-Glutamic Acid | 100 | L-Threonine | 449 |
| L-Glutamine | 2500 | L-Tryptophan | 44 |
| L-Histidine | 150 | L-Tyrosine | 214 |
| L-Isoleucine | 416 | L-Valine | 452 |

[1079] Primary muscle cells were starved for 2 hours, and then stimulated with 0 μM or 500 04 single amino acid in 37 C, 5% CO2 tissue culture incubator for 30 minutes. The treatment was performed in triplicate. FIG. 42 demonstrates that the combination of leucine, arginine, and tyrosine are necessary and sufficient to activate the mTOR pathway in RMSKC to the same degree as a full complement of all 20 amino acids at their DME/F12 concentrations, and that none of the individual or paired treatments of Leu, Arg, or Tyr were capable of a similar response.

[1080] FIGS. 43, 44, and 45 show the effect of a dose response of each amino acid (Leu, Arg, Tyr) in the background of all other 19 amino acids vs the other 2 amino acids (e.g. dose response of Arg in a background of Tyr and Leu) on rps6 phosphorylation. These data indicate the synergy between Leu, Arg, and Tyr is dose dependent. Comparing the 20 amino acids response at low doses of Arg to that in a comparable high Leu and Tyr background, there is a reduction in the degree of stimulation caused by the other 17 amino acids. At high doses of Arg, the response in both backgrounds equalizes. Comparing the 20 amino acids response at low doses of Leu to that in a comparable high Arg and Tyr background, there is no difference in rps6 phosphorylation response. Comparing the 20 amino acid response at low doses of Tyr to that in a comparable high Leu and Arg background, the other 17 amino acids can further potentiate the mTOR response.

### Example 28. Determination of Safety and Lack of Toxicity of Leucine-Enriched Nutritive Polypeptides Following Oral Consumption by Rodents

[1081] An acute toxicology study was completed to confirm the expected safety of nutritive polypeptides [[SEQID]]SEQ ID NO:−00105, [[SEQID]]SEQ ID NO:−00363, and [[SEQID]]SEQ ID NO:−00426 in rodents.

[1082] Each study group contained 5 male rats and 5 female rats (10 Wistar, 6-7 weeks old, Males 220-250 g, Females 180-200 g). Test formulations were 350 g/L nutritive polypeptide and aqueous buffer as a control. Animals were acclimated for 1 week upon arrival and given a diet of regular chow always available. Before dosing, animals were weighed and pre-bleeds were taken. Single dosage of 10 ml/kg was completed via oral gavage. On days 2, 6 and 7, body and food weights were taken. On day 6 animals were bled in EDTA and Sodium Heparin tubes. On day 7 weights were taken and animals were euthanized followed by immediate necropsies. Eight organs (heart, liver, lung, spleen, kidney, brain, bladder, and small intestine) were removed, weighed and stored in 10% formaldehyde. During the study clinical observations for signs of stress, pain, and abnormal activity were performed daily.

[1083] For all three tested nutritive polypeptides the protein and buffer were well tolerated as no abnormalities were seen in the animals. All activity from the animals was normal and no other signs of pain or distress were observed.

### Example 29: Analytical Demonstration of Nutritive Polypeptide Digestibility

[1084] The digestion of nutritive polypeptides was analyzed via in vitro simulated digestion assays. In vitro digestion systems are used to simulate the breakdown of polypeptides into bioaccessible peptides and amino acids, as occurs in vivo while passing through the stomach and intestine (Kopf-Bolanz, K. A. et al., The Journal of nutrition 2012; 142: 245-250, Hur, S. J. et al., Food Chemistry 2011; 125: 1-12). Simulated gastrointestinal digestion is also predictive of potential protein allergenicity, since digestion-resistant polypeptides may be absorbed and cause sensitization (Astwood et al., Nature Biotechnology 1996; 14: 1269-1273).

[1085] Nutritive polypeptide half-life during simulated digestion. One metric for quantifying the breakdown of polypeptides from an intact form to smaller peptides is the intact half-life. In this experiment the nutritive polypeptide was exposed to a series of proteases that are active in the stomach (pepsin) and intestine (trypsin and chymotrypsin), and the presence of intact protein was measured over time. Specifically, the nutritive polypeptide was first treated at a concentration of 2 g/L with simulated gastric fluid (SGF) (0.03 M NaCl, titrated with HCl to pH 1.5 with a final pepsin:polypeptide ratio of 1:20 w/w) at 37° C. Time points were sampled from the reaction and quenched by addition of 0.2 M Na2CO3. After 120 min in SGF, the remaining reaction was mixed 50:50 with simulated intestinal fluid (SIF) (18.4 mM CaCl2, 50 mM MES pH 6.5 with a final trypsin:chymotrypsin:substrate ratio of 1:4:400 w/w) and neutralized with NaOH to pH 6.5. Time points were sampled from the reaction and quenched by addition of Trypsin/Chymotrypsin Inhibitor (Sigma) solution until 240 min.

[1086] Time point samples were analyzed for intact protein by chip electrophoresis, polyacrylamide gel electrophoresis, or western blot. For chip electrophoresis (Labchip GX II), samples were analyzed using a HT Low MW Protein Express LabChip® Kit (following the manufacturer's protocol). A protein ladder was loaded every 12 samples for molecular weight determination (kDa) and quantification. For polyacrylamide gel electrophoresis, samples (1 μg) were separated on a NuPAGE® Novex® Bis-Tris Precast gel (Life Technologies) according to the manufacturer's protocol. The gel was stained using SimplyBlue™ SafeStain (Invitrogen) and imaged using a Chemidoc XRS+ (BioRad) or transferred onto nitrocellulose membranes using the iBlot® Dry Blotting System (Life Technologies) and iBlot® Western Detection Kit (Life Technologies) according to the manufacturer's protocol. Proteins were detected by blotting with Anti-His [C-term]-HRP antibody diluted 3:5000 in Blok™-PO Blocking Buffer using the SNAP I.d.® Protein Detection System (Millipore) according to the manufacturer's protocol. Blots were treated with Luminata Classico Western HRP Substrate (Millipore) according to the manufacturer's protocol and imaged using chemiluminescent detection on the Molecular Imager® Gel Doc™ XR+ System (Bio-Rad). Quantification of intact protein was determined by densitometry using ImageLab (BioRad). For all analysis methods the relative concentration of the polypeptide at each time point (if detected) was plotted overtime and fit to an exponential curve to calculate the intact half-life.

[1087] Alternatively, samples were analyzed by determining the percentage of intact protein remaining at a single time point (eg. half-life less than 2 min). Specifically, the t=0 (enzyme-free control) and t=2 min samples from the SGF digest were analyzed for intact protein as described by chip electrophoresis, SDS-PAGE, western blot, and/or LC-MS/MS. Relative quantities of polypeptides at each time point were determined and the percentage of intact protein remaining at t=2 was determined. Intact half-life values determined using this method are reported as greater or less than 2 min to indicate more or less than 50% of the protein remained intact at t=2 min, respectively. Results for intact SGF half-life determined by either method are reported in Table E29A.

TABLE E29A
Intact half-lives calculated
from in vitro intact protein detection
during SGF treatment. All proteins were produced
in E. coli, unless otherwise noted.
SGF Half-life (t½) in min

| | |
|---|---|
| [[SEQID]]SEQ ID NO:-00001 | 5 |
| [[SEQID]]SEQ ID NO:-00001 (HEK293) | 8.6 |
| [[SEQID]]SEQ ID NO:-00008 | 0.9 |
| [[SEQID]]SEQ ID NO:-00009 | 3 |
| [[SEQID]]SEQ ID NO:-00076 | 0.3 |
| [[SEQID]]SEQ ID NO:-00085 | 0.9 |
| [[SEQID]]SEQ ID NO:-00087 | 0.3 |
| [[SEQID]]SEQ ID NO:-00098 | 0.4 |
| [[SEQID]]SEQ ID NO:-00099 | 1 |
| [[SEQID]]SEQ ID NO:-00100 | 2 |
| [[SEQID]]SEQ ID NO:-00102 | 0.6 |
| [[SEQID]]SEQ ID NO:-00103 | 0.3 |
| [[SEQID]]SEQ ID NO:-00103 (HEK293) | <2 |
| [[SEQID]]SEQ ID NO:-00104 | 0.3 |
| [[SEQID]]SEQ ID NO:-00105 | 0.2 |
| [[SEQID]]SEQ ID NO:-00105 (BS) | 0.5 |
| [[SEQID]]SEQ ID NO:-00105 (HEK293) | <2 |
| [[SEQID]]SEQ ID NO:-00143 | 0.3 |
| [[SEQID]]SEQ ID NO:-00212 | 0.3 |
| [[SEQID]]SEQ ID NO:-00215 | 2 |
| [[SEQID]]SEQ ID NO:-00218 | 6 |
| [[SEQID]]SEQ ID NO:-00220 | 0.5 |
| [[SEQID]]SEQ ID NO:-00226 | 0.7 |
| [[SEQID]]SEQ ID NO:-00236 | 10 |
| [[SEQID]]SEQ ID NO:-00237 | 0.6 |
| [[SEQID]]SEQ ID NO:-00240 | 0.7 |
| [[SEQID]]SEQ ID NO:-00241 | 0.3 |
| [[SEQID]]SEQ ID NO:-00265 | 29 |
| [[SEQID]]SEQ ID NO:-00269 | 41 |
| [[SEQID]]SEQ ID NO:-00284 | 1 |
| [[SEQID]]SEQ ID NO:-00287 | 3 |
| [[SEQID]]SEQ ID NO:-00298 (AN) | 0.3 |
| [[SEQID]]SEQ ID NO:-00298 (BS) | 0.1 |
| [[SEQID]]SEQ ID NO:-00302 | 0.2 |
| [[SEQID]]SEQ ID NO:-00305 | 0.2 |
| [[SEQID]]SEQ ID NO:-00338 | 0.2 |
| [[SEQID]]SEQ ID NO:-00338 (BS) | 0.2 |
| [[SEQID]]SEQ ID NO:-00341 | 0.2 |
| [[SEQID]]SEQ ID NO:-00343 | 0.3 |
| [[SEQID]]SEQ ID NO:-00345 | 0.8 |
| [[SEQID]]SEQ ID NO:-00346 | 0.2 |
| [[SEQID]]SEQ ID NO:-00352 | 0.2 |
| [[SEQID]]SEQ ID NO:-00354 | 0.2 |
| [[SEQID]]SEQ ID NO:-00356 | 0.2 |
| [[SEQID]]SEQ ID NO:-00357 | 0.2 |
| [[SEQID]]SEQ ID NO:-00359 | 0.2 |
| [[SEQID]]SEQ ID NO:-00363 | 20 |
| [[SEQID]]SEQ ID NO:-00363 (E. coli) | <10 |
| [[SEQID]]SEQ ID NO:-00407 (BS) | 0.2 |
| [[SEQID]]SEQ ID NO:-00417 | 0.2 |
| [[SEQID]]SEQ ID NO:-00418 | 0.2 |
| [[SEQID]]SEQ ID NO:-00418 (E. coli) | 0.5 |
| [[SEQID]]SEQ ID NO:-00420 | 1.2 |
| [[SEQID]]SEQ ID NO:-00423 (BA) | 0.3 |
| [[SEQID]]SEQ ID NO:-00423 (BA) | 3 |
| [[SEQID]]SEQ ID NO:-00424 (AO) | 0.2 |
| [[SEQID]]SEQ ID NO: -00424 (AO) | 0.6 |
| [[SEQID]]SEQ ID NO: -00425 (KL) | 0.3 |
| [[SEQID]]SEQ ID NO: -00426 (TL) | 0.3 |
| [[SEQID]]SEQ ID NO: -00429 (BL) | 5 |
| [[SEQID]]SEQ ID NO:-00485 | 0.5 |
| [[SEQID]]SEQ ID NO:-00502 | 0.6 |
| [[SEQID]]SEQ ID NO:-00510 | 0.3 |
| [[SEQID]]SEQ ID NO:-00511 | 0.3 |
| [[SEQID]]SEQ ID NO:-00546 | <10 |
| [[SEQID]]SEQ ID NO:-00559 | 0.5 |
| [[SEQID]]SEQ ID NO:-00587 | 2.4 |
| [[SEQID]]SEQ ID NO:-00598 | 0.5 |
| [[SEQID]]SEQ ID NO:-00601 | 0.2 |
| [[SEQID]]SEQ ID NO:-00605 | 0.2 |
| [[SEQID]]SEQ ID NO:-00606 | 0.3 |
| [[SEQID]]SEQ ID NO:-00610 | 0.4 |
| [[SEQID]]SEQ ID NO:-00622 | 6.6 |
| [[SEQID]]SEQ ID NO:-00647 | 0.2 |
| [[SEQID]]SEQ ID NO:-00672 (BS) | 0.3 |
| [[SEQID]]SEQ ID NO:-00678 (BS) | 0.2 |
| [[SEQID]]SEQ ID NO:-00690 (BS) | 4.4 |

AN = Aspergillus niger, AO = Aspergillus oryzae, BS = Bacillus subtilis, BA = Bacillus amyloliquefaciens, KL = Kluyveromyces lactis, TL = Thermomyces lanuginosus, BL = Bacillus licheniformis.
Alpha-mannosidase-treated [[SEQID]]SEQ ID NO:-00363 and protein proteins originating from AO, BA, KL, TL, and BL were produced as described herein.

### Example 30: Viscosity of Nutritive Polypeptides

[1088] It has been demonstrated that the presence of strong attractive self-associating interactions results in higher viscosity solutions (Yadav, Sandeep, et al. Journal of pharmaceutical sciences 99.12 (2010): 4812-4829.). Specifically, electrostatic interactions of oppositely charged residues results in high viscosity solutions (Liu, Jim), et al. Journal of pharmaceutical sciences 94.9 (2005): 1928-1940.). A nutritive polypeptide with low viscosity can be selected using net charge or charge per amino acid calculations described herein, and selecting proteins with highly positive or highly negative charges. Proteins selected in this way would lack complementary electrostatic interactions and would instead have an overall repulsive force that limits the ability to self-associate thus reducing viscosity of the solutions.

[1089] Solutions of a nutritive polypeptide ([[SEQID]]SEQ ID NO:−00105) and whey were measured for relative viscosity. Both proteins were resuspended with water to the desired concentration for analysis. Viscosity was measured using a Brookfield LVDV-II+ PRO Cone/Plate with a CPE-40 spindle. All tests were performed at 4 C and 25 C. Sample volume was 0.5 ml. Temperature was maintained with a Brookfield TC-550AP-115 Programmable Temperature Bath. All samples were equilibrated for a minimum of two minutes at 4 C and one minute at 25 C. All readings were taken between 10% and 100% torque. FIG. 47 shows viscosity measured in centipoise for [[SEQID]]SEQ ID NO:−00105 at 4 C (closed circles) and 25 C (open circles) and whey at 4 C (closed squares) and 25 C (open squares).

[1090] [[SEQID]]SEQ ID NO:−00105 has been shown herein to have a negative net charge across a range of pH, and [[SEQID]]SEQ ID NO:−00105 is presently shown at multiple temperatures and polypeptide concentrations to be less viscous than whey, which is a disperse mixture of proteins without a dominant single charge.

[1091] To generate a solution with increased viscosity transglutaminase can be used to create a network consisting of enzyme-induced permanent covalent cross-links between nutritive polypeptides thereby generating additionally viscous solutions. This enzyme treatment can also be followed by thermal processing to make a viscous solution containing a nutritive polypeptide. To generate nutritive polypeptide samples containing crosslinks that increase viscosity, a sample is mixed with a transglutaminase solution at pH 7.0 to give an enzyme to protein weight ratio of 1:25. The enzyme-catalyzed cross-linking reaction is conducted at 40° C. in most of the experiments.

### Example 31: Analytical Demonstration of Nutritive Polypeptide Solubility and Thermostability

[1092] Solubility. The solubility of proteins was evaluated by determining the protein concentration of reconstituted lyophilized powder, centrifugal filtered, and/or ultrafiltered solutions (Carpenter et al. (2002) Rational Design of Stable Lyopholized Protein Formulations: Theorty and Practice, Kluwer Academic/Plenum publishers, New York, pp. 109-133; Millipore publication, Amicon Ultra: Centrifugal Filter Devices for the Concentration and Purification of Biological Samples (2001); Oss et al. (1969) A membrane for the rapid concentration of dilute protein samples in an ultrafilter, Clinical Chemistry, 15(8): 699-707). Protein samples were dried by lyophilization on a FreeZone Freeze Dry System (Labconco) using the manufacturer's standard protocol and then resuspended in buffer to the desired concentration. Centrifugal and tangential ultrafiltration were used to selectively remove buffer from the protein sample until the desired concentration was reached. Centrifugal ultrafiltration of protein solutions was performed by centrifugation (10,000×g) of 10 mg of protein in an Amicon centrifugal filter (Millipore) with a molecular weight cutoff of 3 kDa, 10 kDa, or 30 kDa, depending on the protein size, until the desired concentration was reached. Ultrafiltration of protein solutions was performed on Hydrosart ultrafiltration cassettes (Sartorius Stedim, Bohemia, N.Y.) with a molecular weight cutoff of 3 kDa, 10 kDa, or 30 kDa, depending on the protein size, at a cross flow rate of 12 L/m2/min. For most processes, transmembrane pressure was maintained at 20 psi and performed until the desired concentration was reached.

[1093] The protein concentration of the above samples was measured by one or a combination of the following methods: Coomassie Plus Protein Assay, absorbance at 280 nm (A280), and total amino acid analysis. Coomassie Plus Protein Assays (Pierce™) were performed according to the manufacturer's protocol. Absorbance at 280 nm was measured on a Nanodrop 2000 UV-Vis spectrophotometer. Protein concentration was determined using the A280 value and molar extinction coefficient, which was calculated by primary amino acid sequence using ProtParam (Gasteiger, Elisabeth, et al. The proteomics protocols handbook. Humana Press, 2005. 571-607.). Total amino acids were analyzed by HPLC after acid hydrolysis as described in Henderson, J. W., et al. Agilent Technologies (2010).

TABLE E31A
Solubility of proteins.
All proteins were produced in
E. coli, unless otherwise noted.

| | Solubility |
|---|---|
| Protein | (g/L) |
| [[SEQID]]SEQ ID NO:-00008 | 265 |
| [[SEQID]]SEQ ID NO:-00009 | 53 |
| [[SEQID]]SEQ ID NO:-00076 | 150 |
| [[SEQID]]SEQ ID NO:-00085 | 50 |
| [[SEQID]]SEQ ID NO:-00087 | 176 |
| [[SEQID]]SEQ ID NO:-00099 | 91 |
| [[SEQID]]SEQ ID NO:-00100 | 107 |
| [[SEQID]]SEQ ID NO:-00102 | 120 |
| [[SEQID]]SEQ ID NO:-00103 | 133 |
| [[SEQID]]SEQ ID NO:-00104 | 192 |
| [[SEQID]]SEQ ID NO:-00105 | 500 |
| [[SEQID]]SEQ ID NO:-00115 | 70 |
| [[SEQID]]SEQ ID NO:-00220 | 166 |
| [[SEQID]]SEQ ID NO:-00226 | 107 |
| [[SEQID]]SEQ ID NO:-00236 | 60 |
| [[SEQID]]SEQ ID NO:-00240 | 163 |
| [[SEQID]]SEQ ID NO:-00241 | 207 |
| [[SEQID]]SEQ ID NO:-00265 | 95 |
| [[SEQID]]SEQ ID NO:-00269 | 159 |
| [[SEQID]]SEQ ID NO:-00287 | 192 |
| [[SEQID]]SEQ ID NO:-00298 (BS) | 209 |
| [[SEQID]]SEQ ID NO:-00302 | 158 |
| [[SEQID]]SEQ ID NO:-00305 | 231 |
| [[SEQID]]SEQ ID NO:-00338 | 254 |
| [[SEQID]]SEQ ID NO:-00341 | 166 |
| [[SEQID]]SEQ ID NO:-00345 | 196 |
| [[SEQID]]SEQ ID NO:-00346 | 161 |
| [[SEQID]]SEQ ID NO:-00352 | 223 |
| [[SEQID]]SEQ ID NO:-00354 | 235 |
| [[SEQID]]SEQ ID NO:-00357 | 211 |
| [[SEQID]]SEQ ID NO:-00363 (AN) | 336 |
| [[SEQID]]SEQ ID NO:-00363 | 229 |
| a-mannosidase treated | |
| [[SEQID]]SEQ ID NO: -00423 (BA) | 193 |
| [[SEQID]]SEQ ID NO: -00424 (AO) | 205 |
| [[SEQID]]SEQ ID NO: -00425 (KL) | 190 |
| [[SEQID]]SEQ ID NO: -00426 (TL) | 138 |
| [[SEQID]]SEQ ID NO:-00429 (BL) | 214 |
| [[SEQID]]SEQ ID NO:-00485 | 99 |
| [[SEQID]]SEQ ID NO:-00510 | 135 |
| [[SEQID]]SEQ ID NO:-00511 | 135 |
| [[SEQID]]SEQ ID NO:-00546 | 149 |
| [[SEQID]]SEQ ID NO:-00559 | 156 |
| [[SEQID]]SEQ ID NO:-00587 | 223 |
| [[SEQID]]SEQ ID NO:-00598 | 150 |
| [[SEQID]]SEQ ID NO:-00605 | 128 |

AN = Aspergillus niger, AO = Aspergillus oryzae, BS = Bacillus subtilis, BA = Bacillus amyloliquefaciens, KL = Kluyveromyces lactis, TL = Thermomyces lanuginosus, BL = Bacillus licheniformis.
Alpha-mannosidase-treated [[SEQID]]SEQ ID NO:-00363 and protein originating from AO, BA, KL, TL, and BL were produced as described herein.

[1094] pH Solubility. The pH solubility of proteins was determined in a buffer cocktail of Citric Acid and Dibasic Sodium Phosphate over a pH range of 2.8 to 7.1. pH solutions were prepared as outlined in Table E31B. Protein was either lyophilized and then resuspended in buffer cocktail mixtures, or concentrated and then spiked into buffer cocktail mixtures at a final protein concentration of 5 to 30 mg/ml. As a control, protein was also dissolved in a solution of 8 M urea. Protein solutions were shaken for 10 min at room temperature. Turbidity of proteins was determined by measuring the absorbance of protein solutions at 650 nm. The protein solution was then centrifuged for 10 min at 1100×g to pellet undissolved or precipitated protein. The soluble protein fraction (supernatant) was sampled and protein concentration was measured by one or more of the following methods: Coomassie Plus Protein Assay (Pierce), Chip electrophoresis, gel electrophoresis, and/or absorbance at 280 nm. The pH range over which select proteins remained greater than 80% soluble as determined by Bradford and the A650 value are listed in Table E31C.

TABLE E31B
Buffer composition for pH solubility screen.

| | | Sodium | | mL of 42 mM | |
|---|---|---|---|---|---|
| | | Phosphate | | Sodium | mL of 42 mM |
| Buffer | | Dibasic | Citric Acid | Phosphate | Citric Acid |
| # | pH | (mM) | (mM) | (10 mL total) | (10 mL total) |
| 1 | 7.1 | 38 | 4 | 9 | 1 |
| 2 | 6.5 | 34 | 8 | 8.1 | 1.9 |
| 3 | 6 | 32 | 10 | 7.6 | 2.4 |
| 4 | 5.6 | 30 | 12 | 7.1 | 2.9 |
| 5 | 5 | 28 | 14 | 6.7 | 3.3 |
| 6 | 4.6 | 26 | 16 | 6.2 | 3.8 |
| 7 | 4.3 | 24 | 18 | 5.7 | 4.3 |
| 8 | 3.9 | 22 | 20 | 5.2 | 4.8 |
| 9 | 3.7 | 20 | 22 | 4.8 | 5.2 |
| 10 | 2.8 | 10 | 32 | 2.4 | 7.6 |

TABLE E31C
Solubility of proteins over a range of pHs.

| | pH Range where Protein is > 80% | | |
|---|---|---|---|
| | detected as Soluble and A650 < 1 OD | | |
| Protein | High | Low | Other |
| [[SEQID]]SEQ ID | 9.1 | 3.7 | |
| NO:-00009 | | | |
| [[SEQID]]SEQ ID | 7.1 | 4.6 | |
| NO:-00076 | | | |
| [[SEQID]]SEQ ID | 7.1 | 7.1 | |
| NO:-00085 | | | |
| [[SEQID]]SEQ ID | 7.1 | 4.3 | |
| NO:-00100 | | | |
| [[SEQID]]SEQ ID | 7.1 | 5.6 | |
| NO:-00103 | | | |
| [[SEQID]]SEQ ID | 7.1 | 5 | |
| NO:-00104 | | | |
| [[SEQID]]SEQ ID | 9.1 | 4.3 | |
| NO:-00105 | | | |
| [[SEQID]]SEQ ID | 9.1 | 2.6 | |
| NO:-00226 | | | |
| [[SEQID]]SEQ ID | 9.1 | 6.6 | 3.0-2.6 |
| NO:-00240 | | | |
| [[SEQID]]SEQ ID | 9.1 | 4.3 | |
| NO:-00241 | | | |
| [[SEQID]]SEQ ID | 9.1 | 5.1 | 3 |
| NO:-00265 | | | |
| [[SEQID]]SEQ ID | 9.1 | 7.2 | 3.0-2.6 |
| NO:-00269 | | | |
| [[SEQID]]SEQ ID | 9.1 | 6.2 | 2.6 |
| NO:-00287 | | | |
| [[SEQID]]SEQ ID | 7.1 | 2.8 | |
| NO:-00338 | | | |
| [[SEQID]]SEQ ID | 7.1 | 4.6 | 2.8 |
| NO:-00485 | | | |
| [[SEQID]]SEQ ID | | 7.1 | 2.8 |
| NO:-00502 | | | |
| [[SEQID]]SEQ ID | 7.1 | 6.5 | 2.8 |
| NO:-00510 | | | |
| [[SEQID]]SEQ ID | 7.1 | 5.6 | |
| NO:-00511 | | | |
| [[SEQID]]SEQ ID | 7.1 | 2.8 | |
| NO:-00587 | | | |
| [[SEQID]]SEQ ID | 7.1 | 5.6 | |
| NO:-00605 | | | |
| [[SEQID]]SEQ ID | 7.1 | 2.8 | |
| NO:-00622 | | | |

N/A: not applicable.

[1095] Thermostability. The thermostability of proteins in a buffer cocktail of Citric Acid and Dibasic Sodium Phosphate over a pH range of 2.8 to 7.1 (preparation described above in Table E31B) was determined using the ProteoStat® Thermal Shift Stability Kit (Enzo Life Sciences) according to the manufacturer's standard protocol. Briefly, protein solutions (˜10 mg/ml) containing 1× ProteoStat® TS Detection Reagent were heated from 25° C. to 95° C. at a rate of 0.5° C. per 30 sec using a real-time PCR (rtPCR) thermocycler (BioRad) equipped with a plate reader (Synergy™ Mx, Biotek) while monitoring the fluorescence with a Texas Red filter. The temperature of aggregation (Tagg) was identified as the temperature at which the steepest slope was observed in the trace of fluorescence intensity as a function of temperature. The temperature of aggregation at pH 7.1 for a subset of proteins is listed in Table E31D. The temperature of aggregation over a range of pHs for a subset of proteins is listed in Table E31E.

TABLE E31D
Temperature of aggregation (Tagg) at pH 7.1

| Protein | Tagg (pH 7.1) |
|---|---|
| [[SEQID]]SEQ ID | >95 |
| NO:-00008 | |
| [[SEQID]]SEQ ID | 56 |
| NO:-00009 | |
| [[SEQID]]SEQ ID | >95 |
| NO:-00087 | |
| [[SEQID]]SEQ ID | 64 |
| NO:-00099 | |
| [[SEQID]]SEQ ID | >95 |
| NO:-00102 | |
| [[SEQID]]SEQ ID | >95 |
| NO:-00220 | |
| [[SEQID]]SEQ ID | >95 |
| NO:-00226 | |
| [[SEQID]]SEQ ID | 45 |
| NO:-00237 | |
| [[SEQID]]SEQ ID | >95 |
| NO:-00240 | |
| [[SEQID]]SEQ ID | >95 |
| NO:-00241 | |
| [[SEQID]]SEQ ID | >95 |
| NO:-00265 | |
| [[SEQID]]SEQ ID | >95 |
| NO:-00269 | |
| [[SEQID]]SEQ ID | 46 |
| NO:-00302 | |
| [[SEQID]]SEQ ID | 48 |
| NO:-00305 | |
| [[SEQID]]SEQ ID | 57.5 |
| NO:-00510 | |
| [[SEQID]]SEQ ID | 95 |
| NO:-00606 | |
| [[SEQID]]SEQ ID | 54.5 |
| NO:-00610 | |

TABLE E31E
Temperature of aggregation (Tagg) as a function of pH. NS =
condition where protein was not soluble for thermal stability assay.

| | T_{agg} | | | | | | | | | |
|---|---|---|---|---|---|---|---|---|---|---|
| | pH | pH | pH | pH | pH | pH | pH | pH | pH | pH |
| Protein | 7.1 | 6.5 | 6.0 | 5.6 | 5.0 | 4.6 | 4.3 | 3.9 | 3.7 | 2.8 |
| [[SEQID]]SEQ | >95 | 95 | 95 | 73.5 | 75 | 34.5 | NS | NS | NS | NS |
| ID NO.: -00076 | | | | | | | | | | |
| [[SEQID]]SEQ | >95 | NS | NS | NS | NS | NS | NS | NS | NS | NS |
| ID NO.: -00098 | | | | | | | | | | |
| [[SEQID]]SEQ | >95 | 95 | 95 | 95 | 95 | 84 | 83 | 95 | 95 | 95 |
| ID NO.: -00100 | | | | | | | | | | |
| [[SEQID]]SEQ | >95 | 95 | 67.5 | 62 | 61 | 59.5 | 37.5 | 41.5 | 45.5 | NS |
| ID NO.: -00103 | | | | | | | | | | |
| [[SEQID]]SEQ | >95 | 95 | 95 | 80 | 66 | 59.5 | 60 | 74.5 | NS | NS |
| ID NO.: -00104 | | | | | | | | | | |
| [[SEQID]]SEQ | >95 | 95 | 95 | 70.5 | 75.5 | 61.5 | 36.5 | NS | NS | NS |
| ID NO.: -00105 | | | | | | | | | | |
| [[SEQID]]SEQ | 51.5 | 51 | 51.5 | 51 | 50.5 | 84.5 | 40.5 | 38 | 37 | 95 |
| ID NO.: -00338 | | | | | | | | | | |
| [[SEQID]]SEQ | 36 | 36.5 | 36 | 34.5 | 31.5 | NS | NS | NS | NS | NS |
| ID NO.: -00485 | | | | | | | | | | |
| [[SEQID]]SEQ | 95 | 78.5 | 76.5 | 77 | 77 | 95 | 95 | NT | 95 | 95 |
| ID NO.: -00502 | | | | | | | | | | |
| [[SEQID]]SEQ | 42 | 45.5 | 39.5 | NS | NS | NS | NS | NS | NS | NS |
| ID NO.: -00511 | | | | | | | | | | |
| [[SEQID]]SEQ | 64.5 | 64 | 62 | 59 | 57 | 57.5 | NS | NS | NS | NS |
| ID NO.: -00559 | | | | | | | | | | |
| [[SEQID]]SEQ | 95 | 95 | 95 | 69.5 | 67 | 63 | 58.5 | 54 | 50.5 | 50 |
| ID NO.: -00587 | | | | | | | | | | |
| [[SEQID]]SEQ | 48.5 | 45.5 | NS | NS | NS | NS | 95 | NT | 95 | 95 |
| ID NO.: -00601 | | | | | | | | | | |
| [[SEQID]]SEQ | 39 | 38.5 | 44.5 | 37 | 33.5 | 40.5 | NS | NS | NS | NS |
| ID NO.: -00605 | | | | | | | | | | |
| [[SEQID]]SEQ | 95 | 47 | 46 | 45.5 | 42.5 | 43.5 | 43.5 | 42 | 42 | 58.5 |
| ID NO.: -00622 | | | | | | | | | | |

[1096] Thermal unfolding. Thermal unfolding of proteins was monitored by circular dichroism on an Applied Photophysics CS/2 Chirascan™ spectrophotometer. Far-UV measurements (200-260 nm) of protein solutions (0.5 to 1.0 mg/mL) in buffer (20 mM potassium phosphate, pH 7.5) were recorded every 5° C. from 20 to 90° C. using a 0.1 cm optical path length cell. After collection of the spectrum at 90° C. the protein sample was immediately cooled to 20° C. and a final spectrum was recorded. The melting temperature (Tmelt) was calculated as the temperature with the strongest slope, and the final spectrum was compared to the initial 20° C. spectrum to determine if protein unfolding was reversible or if a permanent change in structure had occurred. FIG. 48 displays a representative CD spectra of [[SEQID]]SEQ ID NO:−00105, demonstrating the nutritive polypeptide does not completely unfold at even 90 C and returns to it's original fold when cooled to 20 C.

### Example 32: Nutritive Polypeptide Glycosylation

[1097] The glycans present on proteins often affect properties such as solubility, activity, and stability. Changing the pattern on glycosylation of nutritive peptides can also affect their bioavailability, nutritional quality, and product formulation attributes. Furthermore, specific sugar patterns on nutritive food peptides augment metabolic response to the ingestion of isolated nutritive food peptides based both the kinetics of amino acid absorption and the incorporation of exogenous glycans during human protein production.

[1098] Host selection for glycosylation state. As described herein nutritive polypeptides were produced in a variety of hosts. Choice of host has an impact on the glycosylation state of the nutritive polypeptide which has biophysical, digestion, and immunogenic implications. For example, hosts for expression include, E. coli, B. subtilis, B. licheniformis, Aspergillus niger, Aspergillus nidulans, human embryonic kidney (HEK), and chinese hamster ovary cells (CHO). E. coli, B. subtilis and Bacillus licheniformis are used as an expression host due to their ability to produce polypeptides with unglycated (or minimally glycated) backbones compared to eukaryotic hosts such as aspergillus, s. cerevisiae, and pichia. Aspergillus niger is selected as a protein secretion host due to its unique glycosylation machinery that drives the addition of mannose-rich glycans to the polypeptide backbone. Aspergillus nidulans is selected as a protein secretion host, due to the previously demonstrated ability (Kainz et. al. N-Glycan modification in aspergillus species, Appl. Environ. Microbiol., 2008) to engineer the host glycosylation machinery towards reduced glycan structure complexity in to place of extensive oligomannose polysaccharides. Chinese hamster ovarian (CHO) cells are selected as an expression host for their ability to glycosylate proteins in patterns similar to human cells. Differences include the Gal α1-3 Gal epitope and the N-glycolylneuraminic acid (Neu5gc) have both been found on glycoproteins produced by CHO cells but are not found in normal human glycans (Galili, Uri, et al. Journal of Biological Chemistry 263.33 (1988): 17755-17762). Also, certain proteins produced in CHO cells have more acidic isoforms suggesting higher content of sialic acid. Human Embryonic Kidney 293 (HEK293) cells are selected as an expression host for their ability to have human glycosylation of proteins.

[1099] Gel electrophoresis and protein transfer. To analyze glycosylation, western blot analysis was performed with antibodies or lectins that recognize specific glycan antigens to evaluate and compare the glycosylation profile of proteins produced in eukaryotes and prokaryotes. First, protein separation was performed by gel electrophoresis using Novex® NuPAGE® Bis-Tris Pre-cast gels (Life Technologies) according to the manufacturer's protocol. Proteins were transferred from the gel to a nitrocellulose membrane using the iBlot® Dry Blotting System (Life Technologies) and iBlot® Western Detection Kit (Life Technologies) according to the manufacturer's protocol. Protein brands were visualized by staining polyacrylamide gels with Coomassie® G-250 stain SimplyBlue™ SafeStain (Life Technologies) according to the manufacturer's protocol and imaged using the Molecular Imager® Gel Doc™ XR+ System (Bio-Rad).

[1100] Glycosylation profile of [[SEQID]]SEQ ID NO:−00363 expressed in E. coli and A. niger. The mannose content of proteins was examined using a glycoprotein detection kit (DIG Glycan Differentiation Kit, Roche) according to the manufacturer's standard protocol. To begin, whole cell extract (5 μg) and soluble cell lysate (5 μg) from E. coli transformed with an expression vector encoding the gene for [[SEQID]]SEQ ID NO:−00363 (as described herein), [[SEQID]]SEQ ID NO:−00363 expressed in A. niger (5 μg), and the DIG Glycan Differentiation Kit positive control carboxypeptidase Y (5 μg) were loaded onto a Novex® NuPAGE® 10% Bis-Tris gel (Life Technologies). Protein separation and transfer were performed as described herein. Briefly, nitrocellulose membranes were incubated with digoxifenin (DIG)-labeled Galanthus nivalis agglutinin (GNA), a lectin that binds terminal mannose. Membranes were then incubated with anti-Digoxidenin-alkaline phosphatase (AP), followed by incubation with an AP substrate solution (NBT/BCIP). The intensity of AP staining was qualitatively visualized by the naked eye and membranes were photographed. FIG. 49 displays a representative Coomassie®-stained gel (panel A) and a GNA probed western blot membrane (panel B) of [[SEQID]]SEQ ID NO:−00363 isolated from A. niger and [[SEQID]]SEQ ID NO:−00363 expressed recombinantly in E. coli. In lane 2, a prominent band around 120 kD is representative of glycosylated [[SEQID]]SEQ ID NO:−00363. In lane 3, a band around 80 kD is representative of non-glycosylated [[SEQID]]SEQ ID NO:−00363. These results demonstrate that [[SEQID]]SEQ ID NO:−00363 expressed in A. niger (FIG. 49B, Lane 2) is a terminally mannosylated protein (FIG. 49B, Lane 3), while [[SEQID]]SEQ ID NO:−00363 expressed in E. coli contains no terminal mannose residues on its glycans.

[1101] Protein extraction from food for glycan analysis. Flaxseed (Organic Brown Flaxseed, Farmers Direct Coop), chickpea (Garbanzo Beans, 365 Everyday Value Organic), corn (frozen, Super Sweet Bicolor Corn, 365 Everyday Value Organic), potato (conventional yellow potato), mushroom (organic white mushroom), broccoli (frozen, Broccoli Flortes, 365 Everyday Value), tomato (conventional Roma tomato), blueberry (Organic Blueberries, Little Buck Organics), grape (Organic Red Seedless Grapes, Anthony's Organic), beef (85% Lean Ground Beef), chicken (Ground Chicken Thighs, Boneless, Skinless, Airchilled), lamb (Ground New Zealand Lamb), turkey (Ground Turkey Thighs), cod (Wild Cod Fillet), and pork (Ground Pork) were purchased from Whole Foods. Venison was provided. Aliquots of each food source (50-2,500 mg) were frozen at −80° C. Proteins were extracted from the food source by grinding the sample with a mortar and pestle before adding 1.0 mL of extraction buffer (8.3 M urea, 2 M thiourea, 2% w/v CHAPS, 1% w/v DTT) and additional grinding with the pestle. The samples were transferred to microcentrifuge tubes and agitated for 30 min at room temperature, followed by addition of 500 μL of 100-μm zirconium beads (Ops Diagnostics) and further agitation for an additional 30 min. Samples were then lysed on a TissueLyser II (Qiagen) at 30 Hz for 3 min, centrifuged for 10 min at 21,130×g, and supernatants were collected. Yeast (Nutritional Yeast, Whole Foods), soy protein isolate (Soy Protein Powder, Whole Foods), and rice protein isolate (Organic Rice Protein, Growing Naturals) were prepared by solubilization in extraction buffer. The total protein concentration of samples was determined by Coomassie® Plus Protein Assays (Pierce) according to the manufacturer's standard protocol.

[1102] N-glycolylneuraminic acid (Neu5Gc) detection by western blot analysis. N-glycolylneuraminic acid (Neu5Gc) is a sialic acid found on most mammalian glycans, but is not present on human protein glycoproteins. Human biochemical pathways don't recognize the Neu5Gc sialic acid as foreign, leading to trace amounts found in human glycoproteins following uptake into golgi and incorporation onto newly synthesized proteins. Despite integrating biochemically, however, the immune system recognizes as foreign the adjusted surface conformation containing an externally-derived sialic acid, increasing the risk of many diseases. Anti-Neu5Gc antibodies, which have been detected in human plasma, cause chronic inflammation in response to the ingestion of Neu5Gc containing protein sources (Varki et. al. “Uniquely human evolution of sialic acid genetics and biology”, PNAS 2011). The main sources of Neu5Gc include lamb, beef, pork, and even dairy products, with trace amounts also found in fish (Tangvoranuntakul et al., 2003, PNAS, 100(21): 12045-12050).

[1103] Western blot analysis was performed with an anti-Neu5Gc antibody to characterize the Neu5Gc content of proteins extracted from food as well as proteins expressed recombinantly by bacterial hosts. Proteins were extracted from meat sources as described herein. Also, proteins were recombinantly expressed in E. coli and/or B. subtilis by transformation with individual expression vectors, as described herein, or by transformation with a library of expression vectors, as described in herein. Proteins originating from individual expression vectors, and in some cases protein originating from a library of expression vectors, were purified by IMAC purification, as described herein. A mixture (Protein Mixture 1) of purified proteins recombinantly expressed in E. coli was prepared to contain each protein at a final concentration of approximately 1 mg/mL. The proteins included in this mixture, as well as the species in which they are naturally produced, [[SEQID]]SEQ ID NO:−00076 Cow, [[SEQID]]SEQ ID NO:−00240 Cow, [[SEQID]]SEQ ID NO:−00298 Cow, [[SEQID]]SEQ ID NO:−00359 Sheep, and [[SEQID]]SEQ ID NO:−00510 Turkey.

[1104] A sample of each meat extract (beef, pork, deer, lamb, turkey, chicken, and cod), Protein Mixture 1, the 168 nutritive polypeptide library expressed in E. coli (IMAC-purified lysate) and B. subtilis (IMAC-purified lysate and unpurified supernatant and lysate,), and the cDNA Library expressed in E. coli (Rosetta, GamiB, and Gami2 soluble lysate and Rosetta whole cell) and B. subtilis (PH951 Grac lysate) were loaded onto a Novex® NuPAGE® 10% Bis-Tris gel (Life Technologies). Protein separation and transfer were performed as described herein. Neu5Gc was detected using the SNAP I.d.® Protein Detection System (Millipore) according to the standard manufacturer's protocol with chicken anti-Neu5Gc (IgY) primary antibody (BioLegend) and goat anti-chicken IgY-horseradish peroxidase (HRP) secondary antibody, both diluted 3:5,000 in Blok™-PO Blocking Buffer. Blots were treated with Luminata Classico Western HRP Substrate (Millipore) according to the manufacturer's protocol and imaged using chemiluminescent detection on the Molecular Imager® Gel Doc™ XR+ System (Bio-Rad). FIG. 50 displays representative Coomassie®-stained gels (panel A) and anti-Neu5Gc probed western blot membranes (panel B). These results demonstrate that while Neu5Gc is present in proteins extracted from cow, pig, sheep, turkey, and chicken meat, it is not present in proteins from these animals that have been recombinantly expressed in E. coli or B. subtilis.

[1105] Xylose and Fucose detection by western blot analysis. Xylose and fucose are sugars that are often present on plant glycoproteins and can be immunogenic to humans (Bardor et al., 2003, Glycobiology, 13(6): 427-434). The xylose and fucose content of proteins extracted from food sources and proteins recombinantly expressed by bacterial hosts was examined by western blot analysis using anti-Xylose and anti-Fucose antibodies. As described herein, protein samples were prepared either by extraction from food sources or by reconstitution of purchased protein isolates. Proteins were recombinantly expressed in E. coli and purified by IMAC purification, as described in herein. A mixture (Protein Mixture 2) of purified proteins recombinantly expressed in E. coli was prepared to contain each protein at a final concentration of approximately 1 mg/mL. The proteins included in this mixture, as well as the species in which they are naturally produced, are [[SEQID]]SEQ ID NO:−00103 Rice, [[SEQID]]SEQ ID NO:−00104 Corn, [[SEQID]]SEQ ID NO:−00352 Corn, [[SEQID]]SEQ ID NO:−00485 Chickpea, [[SEQID]]SEQ ID NO:−00559 Rice, [[SEQID]]SEQ ID NO:−00598 Flaxseed, and [[SEQID]]SEQ ID NO:−00605 Mushroom.

[1106] A sample of each plant and fungi extract (yeast, flaxseed, chickpea, corn, potato, mushroom, soy, rice, broccoli, tomato, blueberry, and grape), Protein Mixture 2, horseradish peroxidase (positive control), and fetuin (negative control) were loaded onto a Novex® NuPAGE® 10% Bis-Tris gel (Life Technologies). Protein separation and transfer were performed as described herein. Western blot analysis was performed using the SNAP I.d.® Protein Detection System (Millipore) according to the standard manufacturer's protocol. Xylose was detected by blotting with rabbit anti-xylose primary antibody (Agrisera) and donkey anti-rabbit IgG-HRP secondary antibody (abcam) diluted 3:5,000 and 3:2,500 in Blok™-PO Blocking Buffer, respectively. Fucose was detected by blotting with rabbit anti-fucose primary antibody (Agrisera) and donkey anti-rabbit IgG-HRP secondary antibody (abcam) diluted 3:10,000 and 3:3,000 in Blok™-PO Blocking Buffer, respectively. Blots were treated with Luminata Classico Western HRP Substrate (Millipore) according to the manufacturer's protocol and imaged using chemiluminescent detection on the Molecular Imager® Gel Doc™ XR+ System (Bio-Rad). FIG. 51 demonstrates a representative Coomassie®-stained gel, anti-xylose probed western blot membrane, and anti-fucose probed western blot membrane. These results demonstrate that while xylose and fucose are both present in plant proteins extracted from flaxseed, chickpea, corn, potato, soy, rice, broccoli, tomato, blueberry, and grape, they are not present in proteins from plant and fungi sources that have been recombinantly expressed in E. coli.

[1107] Selection of proteins with high Asparagine, Serine, and/or Threonine mass compositions to decrease nutritive polypeptide glycosylation. The glycosylation state of a nutritive polypeptide can be decreased by selecting sequences low in glycosylation sites. These sites include Asparagine, for N-linked glycosylation, and serine and threonine, for O-linked glycosylation. These isolated polypeptides contain a higher amino acid percentage by mass due to the reduced level of bound polysaccharide composition along the polypeptide, allowing a higher digestible amino acid dose per gram of nutritive polypeptide, and have reduced immune activity upon consumption. The N-linked glycosylation of available glycan acceptor sites along a nutritive polypeptide backbone occurs predominantly at Asparagine amino acid residues. Expression of heterologous polypeptides selected for their low levels of Asparagine allows for polypeptides to be isolated with decreased glycan structures. The O-linked glycosylation of available glycan acceptor sites along a nutritive polypeptide backbone occurs predominantly at Serine and Threonine amino acid residues. Expression of heterologous polypeptides selected for their low levels of either Serine or Threonine allows for polypeptides to be isolated with decreased glycan structures

[1108] Selection of proteins with high Asparagine, Serine, and/or Threonine mass compositions to increase nutritive polypeptide glycosylation. The glycosylation state of a nutritive polypeptide can be increased by selecting sequences rich in glycosylation sites. These sites include Asparagine, for N-linked glycosylation, and serine and threonine, for O-linked glycosylation. Increase in glycosylation can enable increased solubility and thermostability of the nutritive polypeptide. The N-linked glycosylation of available glycan acceptor sites along a nutritive polypeptide backbone occurs predominantly at Asparagine amino acid residues. Expression of heterologous polypeptides selected for their high levels of Asparagine allows for polypeptides to be isolated with increased glycan structures. The O-linked glycosylation of available glycan acceptor sites along a nutritive polypeptide backbone occurs predominantly at Serine and Threonine amino acid residues. Expression of heterologous polypeptides selected for their high levels of either Serine or Threonine allows for polypeptides to be isolated with increased glycan structures

[1109] Removal of glycans from isolated nutritive polypeptides. The glycosylation state of nutritive polypeptides can have an effect on structure and physical properties. As described herein, nutritive polypeptides expressed in recombinant hosts can have a different glycosylation than occurs naturally. If a nutritive polypeptide is produced with glycosylation, the glycans can be released to alter structural and physical properties using chemical or enzymatic methods. Common chemical methods of glycan release are hydrazinolysis and alkali/reducing conditions (β-elimination) (Takasaki, Seiichi, et al. Methods in enzymology 83 (1981): 263-268.). Glycans can be released from proteins using an Endoglycosidases such as PNGaseF, Endo-H, Endo F2, PNGaseA, or O-Glycanase or using an Exoglycosidases such as Sialidase, Alpha Galactosidase, Beta Galactosidase, Hexosaminidase, Galactosaminidase, Alpha Mannosidase, Beta Mannosidase, Alpha Fucosidase, exact enzymes are selected based on oligosaccharide composition and linkage (Merry, Tony, et al. Capillary Electrophoresis of Carbohydrates. Humana Press, 2003. 27-40.).

[1110] PNGase F is a very effective enzymatic method for removing almost all N-linked oligosaccharides from glycoproteins. PNGase F digestion deaminates the aspargine residue to aspartic acid, and leaves the oligosaccharide intact. To deglycosylate a protein using an Endoglycosidase, 500 ug of glycoprotein is resuspended in 50 ul of 50 mM sodium phosphate pH 7.5. PNGase F is added at 0.1 U/ml and the solution is incubated at 37 C for 24 hours. The reaction is monitored for completion by SDS-PAGE.

[1111] Screening for IgE-mediated allergic response due to glycan. A change in glycan modifications to a nutritive polypeptide affects the IgE binding interactions. About 20% or more of allergic patients generate specific anti-glycan IgE, which is often accompanied by IgG (Altmann, F. The role of protein glycosylation in allergy, Int Arch Allergy Immunol. 2007). For polypeptides which induce an IgE-mediated immune response, as is the case with allergens, a glycan modification as described herein may reduce the isolated polypeptide's allergenicity compared to in its native composition. In this example, polypeptides are screened for IgE binding in an in-vitro serum assay as well as for reactivity by skin prick test (as described in Mari, A et. al. IgE to Cross-Reactive Carbohydrate Determinants: Analysis of the Distribution and Appraisal of the in vivo and in vitro Reactivity, 2002).

[1112] Allergenic response due to the glycan (termed cross-reactive carbohydrate determinants), can be determined by comparing results of a skin prick test with an IgE serum binding assay. Unselected consecutive subjects presenting respiratory symptoms that suggest an allergic disease, and referred to an allergy unit, are enrolled. Demographical and clinical data are recorded for each patient. Patients with a clinical history of anaphylaxis are excluded from the study. Those patients who haven't previously received a specific immunotherapy (SIT) course are not excluded. All the treated patients receive alum-adsorbed extract of the nutritive polypeptide in both the isolated form and in the native composition. For statistical purposes, only pollen treated patients are evaluated. Patients undergo skin prick testing (SPT), with a standardized procedure and recording (Mari, A. et. al Specific IgE to cross-reactive carbohydrate determinants strongly affect the in vitro diagnosis of allergic diseases. J Allergy Clin Immunol 1999), using the allergenic extracts described above. Following the SPT, sera are obtained from patients who consent to blood sampling for an in vitro diagnostic procedure. Sera are stored at 20° C. until required. Informed consent for skin testing and blood sampling is obtained by patients or caregivers during the allergy consultation.

[1113] Total IgE is determined in all the sera (Radim, Pomezia, Italy). Allergen-specific IgE is detected by the CAP system following the manufacturer's instructions (Pharmacia, Uppsala, Sweden). Values 60.4 kUA/l is considered positive. As there is not a single test to detect CCD-IgE, discrepancy of the results between a positive in vitro test to the nutritive polypeptide bearing carbohydrate moieties recognized by IgE and a negative SPT to the same glycoprotein is assumed to be indicative of the presence of CCD-IgE. IgE detection is performed on the largest random samples of sera recorded negative in the SPT to the same allergenic extract. Modification in the glycan structure that mediates binding to IgE is observed by a shift in the distribution in patients for which a CCD-IgE is detected upon isolation of the nutritive polypeptide and confirmation of altered glycan structure.

### Example 33. In Animal Demonstration of Nutritive Polypeptide Amino Acid Pharmacokinetics

[1114] Pharmacokinetic (PK) studies may be performed to evaluate the plasma concentration of amino acids following oral administration of a nutritive polypeptide formulation. Such analyses provide information on the rate and extent of digestion of the protein in the gastrointestinal intact and the bioavailability of the free amino acids and/or peptides released during digestion. Growing rats, which have a similar small intestinal transit rat to adult humans (3-4 h), are accepted as a suitable model for pharmacokinetic studies with oral administration (DeSesso and Jacobson (2001) Anatomical and physiological parameters affecting gastrointestinal absorption in humans and rats, Food and Chemical Toxicology 39: 209-228).

[1115] Rat pharmacokinetic studies. Male Sprague Dawley rats with indwelling jugular vein cannula (JVC) were purchased from Harlan Laboratories and acclimated to the Test Facility (Agilux Laboratories) for at least two days prior to study initiation. Prior to dose administration animals were fasted overnight (11-13 h) and remained fasted until completion of the study. Test articles were orally administered via a bulb-tipped 18 gauge stainless steel gavage needle attached to a syringe. The weight of all dose syringes were recorded prior to and following dosing to more accurately determine the amount of solution dosed. Serial blood samples (˜300 μL) were collected from the JVC at time 0 (pre-dose) and 0.25, 0.5, 1, 2, and 4 h post-dose. Blood samples were collected into tubes containing the anti-coagulant K2EDTA, a general protease inhibitor cocktail (Sigma P8340, diluted 1:100 in whole blood), and a DPP IV inhibitor (Millipore DPP4, diluted 1:100 in whole blood). Immediately following blood collection tubes were vortexed and stored on wet ice until processing to plasma by centrifugation (3,500 rpm at 5° C.) within 1 h of collection. Plasma samples were then transferred into new tubes and stored at −80° C. In some cases, following the terminal blood collection animals were euthanized and the terminal ileum and its contents were collected and analyzed as described herein.

[1116] The concentration of Glu, Ser, His, Gly, Thr, Arg, Ala, Tyr, Val, Met, Phe, Ile, Leu, and Lys in the plasma samples was determined by HPLC amino acid analysis, as described herein. Prior to HPLC amino acid analysis, insoluble particles were removed from plasma samples by centrifugation (1100×g at 4° C.) for 10 min. A 25 μL sample of the soluble fraction was then transferred to a 96-well plate, for some samples an internal standard (Norvaline, Agilent) was added to each plasma sample at final concentration of 0.5 mM. Amino acids not measured in the current HPLC amino acid analysis, including Gln, Asn, Trp, Hydroxyproline (Hyp), and Sarcosine (Sar), are analyzed by using a standard mixture that includes the individual standard stocks provided in the supplemental amino acid kit (Agilent) and comparing the chromatographic profiles of the samples against that of the combined standards. Because solutions containing the supplemental standards are unstable at room temperature the supplemental amino acid standards are prepared immediately prior to use and used for no longer than 24 h.

[1117] FIG. 52 displays the change in average area under the curve (AUC) (±SD) of plasma amino acid concentrations (μM·h) measured in blood samples collected from rats over 4 h following oral administration of the indicated nutritive polypeptides at the doses listed in Table E33A. FIG. 53 shows [[SEQID]]SEQ ID NO:−00105 as an example of oral administration of nutritive polypeptides altering the concentration of amino acids in rat plasma. The profile of amino acids detected in the rat plasma after oral administration was dependent on the amino acid sequence of the nutritive polypeptide. For example, oral administration of the polypeptides [[SEQID]]SEQ ID NO:−00240, [[SEQID]]SEQ ID NO:−00338, and [[SEQID]]SEQ ID NO:−00352 increased the change in AUC0-4 h for plasma Lys, whereas administration of the polypeptides [[SEQID]]SEQ ID NO:−00363, [[SEQID]]SEQ ID NO:−00424, and [[SEQID]]SEQ ID NO:−00426 did not alter the change in AUC0-4 h for plasma Lys (FIG. 52). Additionally, the nutritive polypeptide [[SEQID]]SEQ ID NO:−00240 serves as an example of a polypeptide that is capable of delivering essential amino acids (EAAs) while causing no flux in plasma Phe concentration. FIG. 54 demonstrates representative plasma amino acid concentration time curves for oral administration of [[SEQID]]SEQ ID NO:−00105 (2.85 g/kg) to rats. FIG. 54 demonstrates a dose-response effect on plasma Leu concentrations following oral administration of [[SEQID]]SEQ ID NO:−00105 at the doses indicated in Table E33A. Taken together, these results demonstrate that oral administration of nutritive polypeptides can be used to deliver specific amino acid profiles to the systemic circulation in rats.

TABLE E33A
List of the nutritive polypeptides and doses used in rat
pharmacokinetic studies.

| Figure 52 and 53 | | |
|---|---|---|
| Symbol | [[SEQID]]SEQ ID NO: | Dose (g/kg) |
| 1 | Vehicle | NA |
| 2 | 105 | 2.85 |
| 3 | 240 | 1.54 |
| 4 | 338 | 2.85 |
| 5 | 352 | 2.85 |
| 6 | 363 | 2.85 |
| 7 | 423 | 2.85 |
| 8 | 424 | 2.85 |
| 9 | 425 | 2.85 |
| 10 | 426 | 2.85 |
| 11 | 429 | 2.85 |
| 12 | 559 | 2.85 |
| 13 | 587 | 2.85 |
| 14 | 105 | 2.85 |
| 15 | 105 | 1.78 |
| 16 | 105 | 1.11 |

NA: not applicable.

### Example 34: Modulation of Nutritive Polypeptide Digestibility

[1118] Multiple methods of protein modification were used to alter the structure of a model nutritive polypeptide, [[SEQID]]SEQ ID NO:−00363. These methods were performed to assess the relevance of specific structural features in regards to protein digestibility and bioavailability. These modifications include reduction of glycans, hydrolysis of the protein, reduction/alkylation of disulfide bonds, and thermal denaturing of protein structure. Resulting materials from these modifications were evaluated for improved digestion using in vitro digestion assays and, in some cases, in vivo assays. These methods or other means of producing similar structural changes end can be applied to other nutritive polypeptides.

[1119] Enzymatic deglycosylation. It is predicted that [[SEQID]]SEQ ID NO:−00363 contains high-mannose O-linked glycosylation (Goto et al., 2007 Biosci. Biotechnol. Biochem.). To assess the effect of glycosylation on the digestion of [[SEQID]]SEQ ID NO:−00363 the mannose glycans were significantly reduced enzymatically. A non-specific alpha mannosidase (M7257, Lot SLBC4303V, Sigma Aldrich, St. Louis, Mo.) was used to cleave all 1-3, 1-4 and 1-6 glycosidic linkages within the O-glycans. This alpha mannosidase does not cleave any non-mannose glycosidic linkages; it is predicted that this enzyme is ineffective against N-linked glycan release.

[1120] The deglycosylation reaction was adapted from Jafari-Aghdam et al., 2005 Biochimica et Biophysica Acta. The protein stock of [[SEQID]]SEQ ID NO:−00363 was resuspended from lyophilized powder to an enzyme concentration of 100 g/L into deglycosylation reaction buffer: 20 mM sodium acetate, 2 mM zinc chloride, 0.01% 2-mercaptoethanol, pH 4.3. Reagent stocks were diluted into the deglycosylation reaction to a final volume of 0.5 L. The reaction was performed at a [[SEQID]]SEQ ID NO:−00363 concentration of 10 g/L and an alpha mannosidase concentration of 0.5 EU per mg of [[SEQID]]SEQ ID NO:−00363. The reaction was sterile filtered through a 0.2 um filter directly into 7×70 mL 3.5 kD dialysis cassettes in 20 L of deglycosylation reaction buffer. The reaction was performed in dialysis in order to decrease proposed feedback inhibition of the alpha mannosidase by released (mono/poly)saccharides. The reaction was then stored at 37° C. for six days. Throughout the course of the reaction, approximately 10% of [[SEQID]]SEQ ID NO:−00363 was lost due to insoluble aggregate formation. At the terminal (6 day) time point, the reaction was collected from dialysis, sterile filtered, concentrated, and diafiltered into 10% phosphate buffered saline, pH 7.4. Successfully reduction of mannose glycans was monitored by a decrease in size by SDS-PAGE and anti-GNA western blot as described herein. In order to create a high protein concentration formulation of deglycosylated [[SEQID]]SEQ ID NO:−00363, the remaining pool was concentrated in an Amicon spin concentrator (EMD Millipore, Billerica, Mass.) until the final concentration approached 250 g/L. The high-concentration formulation remained soluble at 4° C., and was held at that temperature for long-term storage.

[1121] Protein hydrolysis. Another approach to increasing bioavailability relative to a preparation of native protein was hydrolysis into short peptides. Protein hydrolysates of commodity proteins, such as whey (Perea et al., 1993 Enzyme Microb. Technol.) and soy (Kong et al., 2008 Bioresource Technology) are generated enzymatically through subtilisin-mediated proteolysis.

[1122] Subtilisin is most active at pH 8.5 and 55° C. (Alder-Nissen, 1986). For the intent of this experiment, a lyophilized preparation of a model protein enzyme was resuspended to 275 g/L in 100 mM sodium carbonate in order to bring the pH of the resulting protein solution to approximately pH 8. Subtilisin (Alcalase 2.4 L, Sigma Aldrich, St. Louis, Mo.) was added to the protein solution at a concentration of 5.93×10-4 U per mg of model protein enzyme. The reaction was then diluted to 250 g/L model protein enzyme and transferred to 55° C. for 24 hours. Once completed, the hydrolyzed material was stored at 4° C.

[1123] Reaction progress was monitored by size exclusion chromatography (SEC) using a Superdex™ 75 (5×150 mm) column (GE Healthcare, Uppsala, Sweden) and also by SDS-PAGE analysis.

[1124] Protein reduction and alkylation. Disulfide containing proteins can be reduced and alkylated in order to break disulfide bonds and stabilize free thiols. This modification disrupts all disulfide bridge structure and furthermore prevents disulfide bridges from reforming both intramolecularly or extramolecularly. [[SEQID]]SEQ ID NO:−00363 contains 10 cysteines, and four disulfide bonds as predicted by SCRATCH Protein Predictor (Cheng et al., 2005 Nucleic Acids Res.).

[1125] [[SEQID]]SEQ ID NO:−00363 was reduced and alkylated at a final concentration of 6 g/L using Bio-Rad ready Prep Reduction/Alkylation Kit (Bio-Rad, Hercules, Calif.). The reduction/alkylation reaction was performed as recommended by the manufacturer's instructions. [[SEQID]]SEQ ID NO:−00363 was reduced and alkylated in 50 mM phosphate, pH 8.0. Samples were analyzed by non-reducing SDS-PAGE analysis.

[1126] Heat-induced protein destabilization. Denaturation of protein involves the disruption of ordered structure of the molecule; i.e., reduction of all quaternary, tertiary and secondary structure to primary structure. Denaturation disrupts all non-covalent intramolecular interactions; i.e., hydrogen bonding, ionic interaction, Vander Waals interaction and hydrophobic interaction. Heat can be used to disrupt these interactions, and reduce a native protein to its primary structure (with the exception of disulfide linkages).

[1127] [[SEQID]]SEQ ID NO:−00363 was diluted to 30 g/L in 10% PBS, pH 7.4 and rapidly heated to 95° C. Upon boiling, the protein was removed from heat treatment and immediately transferred to in vitro digestion analysis as described in herein.

[1128] In vitro digestibility of modified forms of [[SEQID]]SEQ ID NO:−00363. The digestibility of native [[SEQID]]SEQ ID NO:−00363 and modified forms (ie. deglycosylated, reduced and alkylated, and heat-denatured) of [[SEQID]]SEQ ID NO:−00363 was evaluated using the methods described herein. Briefly, native and modified forms of [[SEQID]]SEQ ID NO:−00363 were treated with simulated gastric fluid (SGF) and the presence of intact protein remaining at various time points was analyzed by gel electrophoresis as described herein. Additionally, the amount of free amino acids present after exposure to a Pancreatin-based simulated digestive system was analyzed by reverse phase HPLC amino acid analysis as described herein. Results from the SGF digest of native and modified forms of [[SEQID]]SEQ ID NO:−00363 demonstrate that modification of [[SEQID]]SEQ ID NO:−00363 via deglycosylation, reduction and alkylation, and heat-denaturation enhances the digestibility of the protein to varying degrees. Results from the Pancreatin digest of native and modified forms of [[SEQID]]SEQ ID NO:−00363 demonstrate that modification of [[SEQID]]SEQ ID NO:−00363 via deglycosylation and heat-denaturation, but not reduction and alkylation, enhanced the release of free Leu during digestion. Table E34A lists half-life values calculated from the exponential decay curves and free Leu (04) at 120 min time point.

TABLE E34A
SGF Half-life (t½) in min and Free Leu (μM) at 120 min time point
of Pancreatin digest of modified nutritive polypeptide

| | | Free Leu (μM) |
|---|---|---|
| | | at 120 min |
| | SGF Half-life | time point of |
| | (t½) in min | Pancreatin digest |
| [[SEQID]]SEQ ID NO:-00363 | 36 | 574.2 |
| Heat-denatured | 20.4 | 763.5 |
| [[SEQID]]SEQ ID NO:-00363 | | |
| Reduced and alkylated | 20.4 | 598.1 |
| [[SEQID]]SEQ ID NO:-00363 | | |
| Deglycosylated | 4.3 | 799.2 |
| [[SEQID]]SEQ ID NO:-00363 | | |

[1129] Bioavailability of modified forms of [[SEQID]]SEQ ID NO:−00363. The bioavailability of native and modified forms (ie. deglycosylated and hydrolyzed) of [[SEQID]]SEQ ID NO:−00363 was evaluated using the methods described in herein. Briefly, native and modified forms of [[SEQID]]SEQ ID NO:−00363 were orally administered to intrajugular-cannulated rats and concentration of free amino acids in plasma samples collected over a 4 h period was determined by HPLC amino acid analysis. Amino acid analysis of plasma samples collected in the rat pharmacokinetic study of native and modified forms of [[SEQID]]SEQ ID NO:−00363 are displayed in FIG. 55. These results demonstrate that hydrolysis of [[SEQID]]SEQ ID NO:−00363 increased the bioavailability of Leucine, Serine, Threonine, and in general essential amino acids (EAAs). While deglycosylation of [[SEQID]]SEQ ID NO:−00363 did not increase the bioavailability of Leucine or EAAs, it did increase the bioavailability of Serine and Threonine.

[1130] Deal digestibility of modified forms of [[SEQID]]SEQ ID NO:−00363. Protein quality is a function of amino acid composition, digestibility, and bioavailability. Ileal digestibility assays may be used to measure the difference between the contents (ie. amino acid, nitrogen, dry matter weight) of a protein and the contents of the digesta in the terminal ileum following ingestion of the protein. Results from ileal digestibility assays can be used to calculate amino acid, nitrogen, and dry matter ileal digestibility coefficients and provide knowledge about the protein's digestibility and amino acid bioavailability (Darragh and Hodgkinson, 2000, Journal of Nutrition, 130(7): 1850S-1856S). Fecal digestibility coefficients, determined over the entire digestive tract, tend to overestimate amino acid digestibility and bioavailability due to microbial metabolism in the large intestine. Since protein digestion and amino acid absorption occurs mainly in the upper small intestine and is effectively complete by the end of the ileum, ileal digestibility assays are now accepted as the method of choice for determining protein and amino acid digestibility in monogastric mammals. Growing rats, which have a similar small intestinal transit rate to adult humans (3-4 h), are accepted as a suitable model for ileal digestibility assays (Amidon et al., 1986, The Journal of Pharmacy and Pharmacology, 38(5): 363-368).

[1131] A rat pharmacokinetic study with oral administration of native and modified forms of [[SEQID]]SEQ ID NO:−00363 was performed as described herein. The indigestible marker Cobalt-EDTA was formulated at 50 mg/L in the dosed protein solutions to monitor differences in intestinal transit rate between treatment groups and individual rats. Following the final blood collection (at t=4 h) rats were euthanized and the terminal ileum (20 cm of small intestine prior to the cecum) and its contents (the digesta) were collected into a pre-weighed tube. The ileum was flushed with saline and pooled with the digesta. The pH of the digesta was adjusted to 3.0 with HCl in order to inactivate all enzymes. The ileum samples were placed into separate pre-weighed 15 mL conical tubes. All samples were flash frozen in liquid nitrogen, and stored at −80° C. until further analysis. Individual ileum and ileum content weights were calculated and recorded for each sample.

[1132] A sample of the digesta, which exists as a heterogenous solution containing insoluble particles, was used in the Coomassie® Plus Protein Assay, as described herein, to determine protein concentration. The average total protein concentration in digesta samples harvested from rats administered vehicle, native [[SEQID]]SEQ ID NO:−00363, deglycosylated[[SEQID]]SEQ ID NO:−00363, and hydrolyzed [[SEQID]]SEQ ID NO:−00363 was 0.1, 0.9, 0.9, and 0.3 mg/mL, respectively. Based on the volumes of collected digesta the total protein mass in digesta samples harvested from rats administered vehicle, native [[SEQID]]SEQ ID NO:−00363, deglycosylated[[SEQID]]SEQ ID NO:−00363, and hydrolyzed [[SEQID]]SEQ ID NO:−00363 was 1.2, 6.9, 7.7, and 2.2 mg, respectively. These results demonstrate that the concentration and total mass of protein is higher in the digesta of rats administered native and deglycosylated[[SEQID]]SEQ ID NO:−00363 than in rats administered either vehicle or hydrolyzed [[SEQID]]SEQ ID NO:−00363. Together these results suggest that hydrolyzed [[SEQID]]SEQ ID NO:−00363 is more completely digested in the rat gastrointestinal system than either native or deglycosylated[[SEQID]]SEQ ID NO:−00363.

[1133] To determine ileal digestibility coefficients an aliquot of the dosing sample and the ileal digesta sample are analyzed for total amino acid content by reverse phase HPLC amino acid analysis (Lookhart and Jones, 1985, Cereal Chemistry, 62(2):97-102), total nitrogen content by Kjeldhal analysis (Lynch and Barbano, 1999, JOURNAL OF AOAC INTERNATIONAL, 82(6): 1389-1398), and Cobalt content by Inductively Coupled Plasma Mass Spectrometry (ICP-MS) (Taylor, H. E., Inductively Coupled Plasma-mass Spectrometry: Practices and Techniques, Academic Press, 2001) to determine ileal amino acid and nitrogen digestibility coefficients.

### Example 35. Treatment of Nutritive Polypeptides for Reduced Activity

[1134] Modification of enzymatically active nutritive polypeptides can alter both the enzymatic activity, and the structural stability of the protein. It can be advantageous for an orally administered nutritive polypeptides to lack activity that is not required for delivery of amino acid nutrients. Furthermore, deactivation is indicative of destabilization that can be more digestible and bioavailable than its native counterpart. Enzyme modification was achieved through either chemical or heat treatment(s). Enzymatic activity was measured through an in vitro assay.

[1135] Activity assay. Inactivation of [[SEQID]]SEQ ID NO:−00363 was tested by a glucoamylase activity assay. Glucoamylase acts to hydrolyze p-nitrophenyl-α-D-glucopyranoside to p-nitrophenol (PNP) and glucose. The activity of the enzyme in units (U) per mL was determined by measuring the absorbance of release PNP at 400 nm (method adapted from Glucoamylase Activity Assay (U.S. Pharmacopeia. Food Chemicals Codex, 8th edition; 2012:1314-1315.)) PNP standards at 0.12, 0.06, 0.03, 0.015 and 0.0075 μmol/mL in 0.3 M sodium carbonate were used to determine the millimolar extinction coefficient (E) using the follow equation: ε=A400 nm/C where the average value considered where A400 nm is the absorbance at 400 nm measured using a spectrophotometer with a 10 mm light path and C is the standard concentration in μmol/mL. The samples were made at dilutions in 0.1 M sodium acetate pH 4.5 that fall in the absorbance range of the standards. 100 μL of sample was incubated at 50° C. for 5 minutes prior to addition of 100 μL of PNPG solution (100 mg PNPG, dilute to 100 mL in 0.1 M sodium acetate pH 4.5) that had been equilibrated at 50° C. for at least 15 minutes. The sample was then incubated at 50° C. and 100 μL of 0.3 M sodium carbonate added 10 minutes after PNPG addition to stop the reaction. The absorbance at 400 nm was then measured and the activity in U/mL calculated as follows: Activity=[(Asample−Ablank)×0.3 mL×Dilution Factor]/ε×10 min×0.10 μmol/min/unit×0.1 mL where Asample is the sample absorbance and Ablank is the blank absorbance at 400 nm, 0.3 mL is the volume of the reaction, 10 min is the reaction time, 0.10 μmol/min is the amount of PNP cleaved per unit of enzyme and 0.1 mL is the sample aliquot. 1:1:1: 0.1 M sodium acetate pH 4.5:0.3 M sodium carbonate: PNPG solution is used as a blank. Activity is reported as specific activity (U/mL or U/mg) or as a relative activity (i.e. compared to a control protein).

[1136] Protein modification for deactivation. Protein enzymes can be deactivated through chemical-induced destabilization of the enzymatic active site of the molecule. An experiment was performed that screened a subset of reagents that represented different chemical classes and mechanisms of action including: Oxidation (Bleach, H2O2, ethylene oxide); Reduction (DTT, bME, TCEP); Chaotrope (CaCl2, Urea, Gnd HCl, NaSCN); High pH (Na2CO3, Tris Base, Na2HPO4); Low pH (Na3Citrate, Tris HCl, Acetic acid, Boric acid); Neutral pH (Na-Citrate, MOPS Acid, MES Acid, Na-Acetate); Detergents (Tween 80, Triton-X-100, CHAPS, SDS, MPD); Chelation (EDTA, citrate).

[1137] [[SEQID]]SEQ ID NO:−00363 was formulated in water to 300 g/L and diluted 10× into an array of chemical deactivation conditions (final concentration=30 g/L). [[SEQID]]SEQ ID NO:−00363 was subsequently assayed for enzymatic activity after 10 minutes of deactivation and 4 days of deactivation Table E35A.

TABLE E35A
Chemical deactivation of [[SEQID]]SEQ ID NO:-00363.
Results of enzyme activity assay at 4 day time point. All
enzyme activities are normalized to the negative control (water).

| | Activity After 4 Days |
|---|---|
| Condition | (% of Water) |
| Water Control | 100% |
| 1% Triton-X-100 | 93% |
| 200 mM CaCl2 | 92% |
| 1% CHAPS | 85% |
| 50 mM CaCl2 | 84% |
| 400 mM CaCl2 | 79% |
| 100 mM CaCl2 | 78% |
| 5% BME | 77% |
| 250 mM EDTA | 76% |
| 0.1% H2O2 | 76% |
| 0.01% Bleach | 73% |
| 50 mM DTT | 73% |
| 0.3% H2O2 | 72% |
| 1% TWEEN80 | 66% |
| 1% SDS | 65% |
| 0.5 M Gnd HCl | 60% |
| 1 M Gnd HCl | 58% |
| 250 mM Tris Base | 56% |
| 100 mM Tris Base | 54% |
| 2 M Gnd HCl | 46% |
| 500 mM Tris Base | 41% |
| 5 M Urea | 41% |
| 0.1% Bleach | 21% |
| 50 mM Na2CO3 | 19% |
| 10 M Urea | 15% |
| 4 M Gnd HCl | 10% |
| 0.615% Bleach | 9% |
| 100 mM Na2CO3 | 6% |
| 200 mM Na2CO3 | 4% |
| 500 mM Na2CO3 | 0% |
| 6 M Gnd HCl | 0% |

[1138] Relative to a water deactivation negative control, [[SEQID]]SEQ ID NO:−00363 displayed greatest deactivation in strong chaotropes such as 6M Gnd.HCl and 4M urea; high pH formulations of sodium carbonate; and the strong oxidizer, sodium hypochlorite (household bleach). At t=4 days, these conditions all displayed less than 20% of relative enzymatic activity after four days of treatment. Due to the health risks associated with consumption of vigorous oxidizers and strong chaotropes, treatment of [[SEQID]]SEQ ID NO:−00363 with high pH was identified as the best condition for deactivation of the enzyme. Relative to the 10 minute time point, samples taken at the four day time point suggest that chemical deactivation at room temperature is not a fast-acting process. The kinetics of deactivation are likely not very fast in many of the assayed conditions.

[1139] An experiment measured deactivation of [[SEQID]]SEQ ID NO:−00363 by heat at multiple buffer conditions was tested. [[SEQID]]SEQ ID NO:−00363 was diluted to 3 g/L in 20 mM sodium phosphate pH 7, 20 mM sodium phosphate pH 9, 20 mM sodium carbonate pH 11 and water. 100 μL of sample was then treated at ambient temperature, 60° C., 70° C., 80° C. and 90° C. for each buffer for 5 minutes in a PCR thermocycler. The activity of each enzyme was tested by the glucoamylase activity assay and each activity normalized to the activity in water at ambient temperature (control). The results are shown below in Table E35B.

TABLE E35B
Chemical deactivation of [[SEQID]]SEQ ID NO:-00363.
Results of enzyme activity assay at 4 day time point. All enzyme
activities are normalized to the negative control (water).

| | Activity (% of Water, |
|---|---|
| Condition | Ambient) |
| Water, Ambient | 100% |
| Water, 60° C. | 84% |
| Water, 70° C. | 14% |
| Water, 80° C. | 3% |
| Water, 90° C. | 3% |
| 20 mM Sodium Phosphate pH 7, | 101% |
| Ambient | |
| 20 mM Sodium Phosphate pH 7, 60° C. | 53% |
| 20 mM Sodium Phosphate pH 7, 70° C. | 2% |
| 20 mM Sodium Phosphate pH 7, 80° C. | 1% |
| 20 mM Sodium Phosphate pH 7, 90° C. | 1% |
| 20 mM Sodium Phosphate pH 9, | 99% |
| Ambient | |
| 20 mM Sodium Phosphate pH 9, 60° C. | 27% |
| 20 mM Sodium Phosphate pH 9, 70° C. | 2% |
| 20 mM Sodium Phosphate pH 9, 80° C. | 1% |
| 20 mM Sodium Phosphate pH 9, 90° C. | 1% |
| 20 mM Sodium Carbonate pH 11, | 93% |
| Ambient | |
| 20 mM Sodium Carbonate pH 11, 60° C. | 0% |
| 20 mM Sodium Carbonate pH 11, 70° C. | 0% |
| 20 mM Sodium Carbonate pH 11, 80° C. | 0% |
| 20 mM Sodium Carbonate pH 11, 90° C. | 1% |

[1140] An additional multifactorial experiment was performed that assayed the effect of temperature and pH for varying exposure time on the enzymatic activity of [[SEQID]]SEQ ID NO:−00363. [[SEQID]]SEQ ID NO:−00363 was formulated to 100 g/L, and the effect of either a high pH spike, or a diafiltration into high pH buffers was tested against a gradient of temperatures across 25° C. to 70° C. over a time course of 0 hours to 24 hours. Upon analysis, samples were neutralized to pH 7 using a spike of 1M sodium acetate buffer.

[1141] [[SEQID]]SEQ ID NO:−00363 experimental overview and design was as follows. [[SEQID]]SEQ ID NO:−00363 was resuspended to 100 g/L and either spiked with 0.25M sodium carbonate pH 10, diafiltered into 50 mM sodium carbonate pH 10, or diafiltered into 10% phosphate buffered saline pH 9.0. Samples were incubated at either 40, 50, 60 or 70° C. across a time course that included sampling points at t=0, 1, 2, 4 and 24 h.

[1142] Inactivation of [[SEQID]]SEQ ID NO:−00363 was assayed using an activity assay as described herein. Samples were analyzed by specific activity (U/mg) and visual solubility, as either a gel, viscous or fluid. This study found [[SEQID]]SEQ ID NO:−00363 is enzymatically deactivated by both temperature and pH. Some treatments caused irreversible aggregation, and gel formation of the nutritive polypeptide; these samples were not analyzed for enzymatic activity. The results of this experiment suggest that [[SEQID]]SEQ ID NO:−00363 can be solubly deactivated at pH 10 at 25° C. As the temperature of the reaction increases, the protein remains deactivated, but becomes insoluble.

[1143] pH was therefore defined as a critical process variable in regard to [[SEQID]]SEQ ID NO:−00363 deactivation. A subsequent study was performed to explored [[SEQID]]SEQ ID NO:−00363 deactivation as a function of pH at room temperature. A process which can be performed at room temperature is less costly and easier to scale up than a heated process. [[SEQID]]SEQ ID NO:−00363 was formulated to 100 g/L at pH 3.6 and using an ultrafiltration membrane, the buffer was exchanged into a series of sodium carbonate buffers. The [[SEQID]]SEQ ID NO:−00363 solution pH increased from 3.6 to 11.0 during the course of buffer exchange. Samples of the protein were taken from the ultrafiltration system systematically during the course of buffer exchange, resulting in a set of samples across the pH range. These samples were held at room temperature and each sample was split in half. Half of each sample was neutralized into sodium acetate buffer after 2-5 hours. Neutralized samples were then assayed for enzyme activity as described and results are in the Table E35C.

TABLE E35C
Effect of 2-5 hour incubation over pH range on activity.

| | Relative activity |
|---|---|
| pH | (%) |
| 3.6 | 100 |
| 4 | 91 |
| 5 | 83 |
| 6 | 82 |
| 7 | 89 |
| 8 | 86 |
| 9 | 56 |
| 9.7 | 54 |
| 10 | 37 |
| 10.9 | 13 |

[1144] Deactivation by hydrolysis of [[SEQID]]SEQ ID NO:−00363 was also tested by glucoamylase activity assay. The procedure of protein hydrolysis is described herein. Hydrolysis was found to reduce activity to 7% relative to control.

[1145] Other amylase nutritive polypeptide deactivation was also tested. Deactivation of [[SEQID]]SEQ ID NO:−00424 was tested by the glucoamylase activity assay as described herein, but instead utilizing a pH 5.0 acetate buffer (recommended for Aspergillus oryzae derived enzymes). Samples were deactivated by hydrolysis or by boiling, as described herein. Boiling reduced activity to 0% and hydrolysis reduced activity to 51% relative to control.

### Example 36: Disruption of Nutritive Polypeptide Enzymatic Activity

[1146] Construction of Mutant Proteins. Multiple mutations were tested to determine the degree of enzymatic inactivation that could be achieved for a model protein known to have enzymatic activity ([[SEQID]]SEQ ID NO:−00338, UniProt ID: P07170). In this protein, the substrate binding sites includes positions 42, 134, 167, and 178. In addition, there is a magnesium ion binding site at position 91. Single amino acid mutations were made at several substrate-binding positions. The mutants were expressed and tested for enzymatic activity.

[1147] The single amino acid mutant proteins were constructed by PCR amplification of two pieces. The first piece is amplified using a forward primer that binds to the 5′-end of the gene (ATCACCACCATCACCATCATAGCAGCAGCGAAAGCATTCGTATG (SEQ ID NO: 4057)) with an overhang that is compatible with a His-tag and a reverse primer (Table E36A) containing the most common codon for the target amino acid in Escherichia coli and the 20-bp flanking region upstream and downstream of the mutation. The second piece amplifies the 3′-end of the protein immediately following the mutation site using a forward primer specific to the position of the mutation (Table E36A) and a reverse primer that binds to the 3′-end of the gene (TGTTAGCAGCCGGATCCTTAATCTTTGCCCAGTTTATTCAGAATATC (SEQ ID NO: 4058)). Standard PCR reaction conditions were used for all pieces, which contains 0.5 uM forward primer, 0.5 uM reverse primer, 1× Phusion® Polymerase Master Mix (New England Biolabs), and 1-100 ng template DNA in 50 ul final volume. The thermocycle conditions are initial denaturing at 98° C. for 30 sec, cycle 30 times with denaturing temperature at 98° C. for 10 sec, annealing temperature at 55-60° C. 15 sec, extension temperature at 72° C. for 15 sec/kb product. The template DNA are removed from the final products by adding 1 ul Dpn I (New England Biolabs) and 5 ul 10× CutSmart® buffer and incubating at 37° C. for 1 hour. Each PCR product is cleaned and concentrated following a Gel Recovery kit (Zymo Research) and eluted in 20 ul sterile water before proceeding to the next assembly step.

TABLE E36A
List of reverse primers used to amplify PCR piece 1 for the mutants.

| Mutation | Reverse Primer 1 |
|---|---|
| D91F | GGAATGGTACGCGGAAAACCAAACAGAATAAAGCCATTTTTGCATG |
| | CC (SEQ ID NO: 4059) |
| D91I | GGAATGGTACGCGGAAAACCAATCAGAATAAAGCCATTTTTGCATG |
| | CC (SEQ ID NO: 4060) |
| R134M | CCGCTTGCCGGATGAATCAGCATACCGGTAATACGTGCAACCAG |
| | (SEQ ID NO: 4061) |
| R134Y | CCGCTTGCCGGATGAATCAGATAACCGGTAATACGTGCAACCAG |
| | (SEQ ID NO: 4062) |
| R42A | GTACCTTTTGCAATCTGGCTTGCCAGCATATCACCGGTTGCCAG |
| | (SEQ ID NO: 4063) |
| R42C | GTACCTTTTGCAATCTGGCTACACAGCATATCACCGGTTGCCAG |
| | (SEQ ID NO: 4064) |
| R42G | GTACCTTTTGCAATCTGGCTACCCAGCATATCACCGGTTGCCAG |
| | (SEQ ID NO: 4065) |
| R42I | GTACCTTTTGCAATCTGGCTAATCAGCATATCACCGGTTGCCAG |
| | (SEQ ID NO: 4066) |
| R42K | GTACCTTTTGCAATCTGGCTTTTCAGCATATCACCGGTTGCCAG |
| | (SEQ ID NO: 4067) |
| R42L | GTACCTTTTGCAATCTGGCTCAGCAGCATATCACCGGTTGCCAG |
| | (SEQ ID NO: 4068) |
| R42Q | GTACCTTTTGCAATCTGGCTCTGCAGCATATCACCGGTTGCCAG |
| | (SEQ ID NO: 4069) |
| R42T | GTACCTTTTGCAATCTGGCTGGTCAGCATATCACCGGTTGCCAG |
| | (SEQ ID NO: 4070) |
| R42V | GTACCTTTTGCAATCTGGCTAACCAGCATATCACCGGTTGCCAG |
| | (SEQ ID NO: 4071) |
| Position | Forward Primer 2 |
| 91 | GGTTTTCCGCGTACCATTCC (SEQ ID NO: 4072) |
| 134 | CTGATTCATCCGGCAAGCG (SEQ ID NO: 4073) |
| 42 | AGCCAGATTGCAAAAGGTACAC (SEQ ID NO: 4074) |

[1148] Mutations are specified by original amino acid in its single letter abbreviation followed by the position and the final amino acid in its single letter abbreviation.

[1149] The PCR amplified pieces were inserted into the expression plasmid by Gibson assembly and transformed into T7 Express (New England Biolabs) cells for expression. The expression plasmid pET15b containing a T7 promoter, an 8×His-tag (SEQ ID NO: 3919), and a stop codon was amplified by PCR using primers GGATCCGGCTGCTAACAAAGCC (SEQ ID NO: 4075) and ATGATGGTGATGGTGGTGATGATGAC (SEQ ID NO: 4076) so that there will be 20 bp overlap between each PCR piece, so that they will be properly assembled by Gibson Assembly®. In Gibson Assembly®, 1 ul of each PCR piece is combined into 10 ul final volume with 1× Gibson Assembly® Master Mix (New England Biolabs) and incubated at 50° C. for 1 hour. The assembly reaction mixture was diluted 3× by adding 20 ul water. 3 ul of the diluted mixture was transformed into 30 ul T7 Express (New England Biolabs) cells. Single colonies were picked and plasmids extracted and sequence confirmed before moving on to expression studies.

[1150] Expression and Purification of Mutant Proteins. Single colonies were used to inoculate a 2 mL deep well block with 1 mL of LB medium with 100 mg/L carbenicillin in each well. Cultures were shaken at 37° C. and 900 rpm overnight in a deep well block shaker. The deep well block was used to inoculate another deep well block with 1 mL of BioSilta Enbase medium with 600 mU/L glucoamylase to an OD600 of 0.1. Cultures were shaken for 16 hours at 37° C. and 900 rpm, at which point 1 mM IPTG was added to induce the cultures, and additional Enbase supplemental media and another 600 mU/L of glucoamylase was added to supplement the cultures. Expression was carried out for another 6 hours at 37° C. and 900 rpm. Cultures were harvested by spinning the deep well block at 3,000×g for 10 minutes at RT. After centrifugation, the supernatant was carefully removed the cell pellets were frozen at −20° C. Frozen cell pellets were thawed and 0.3 g of 0.1 mm zirconium beads were added to each sample followed by 0.5 ml of PBS. The cells were lysed in the cold room (4° C.) by bead-beating for 5 min in a Qiagen TissuelyserII (Qiagen, Hilden, Germany) equipped with a 96-well plate adapter. Cell lysates were centrifuged at 3000 rpm for 10 min and the supernatant was removed, sampled, and analyzed for protein concentration by chip electrophoresis. Samples were prepared by adding 2 μl of sample to 7 μl sample buffer, heating at 95 C for 5 minutes, and then adding 35 μl of water. Analysis was completed using HT Low MW Protein Express LabChip® Kit or HT Protein Express LabChip® Kit (following the manufacturer's protocol). A protein ladder ran every 12 samples for molecular weight determination (kDa) and quantification (ng/μl).

[1151] The mutant proteins were purified using the His Multitrap™ HP (GE Healthcare) system according to manufacturer's protocol. The concentrations of the proteins were measured by SDS-PAGE stained by Coomasie® Blue and absorbance at 280 nm. The proteins were diluted in 40 mM Tris buffer for kinase activity assay.

[1152] Determination of the kinase activity of [[SEQID]]SEQ ID NO:−00338. The ADP-Glo™ Max Assay was obtained from Promega (Catalog number V7001, Madison, Wis.). Adenosine Monophosphate was obtained from Sigma-Aldrich (Catalog number A1752, St. Louis, Mo.). 5× Kinase Buffer was prepared w/ 1.211 g Tris Base (Catalog number BP152-2, Fisher Bioreagents, Pittsburgh, Pa.), 692 μL 12% hydrochloric acid solution (Catalog number BDH3026-500MLP, VWR, Radnor, Pa.), 10.0 mL 500 mM magnesium chloride (Catalog number BP214-500, Fisher Bioreagents, Pittsburgh, Pa.) and the volume brought to 50 mL with MilliQ water and filtered through 0.22 μm PES filter (Catalog number SCGP00525, Millipore, Billerica, Mass.) into a sterile 50 mL tube.

[1153] Twelve his-tag purified mutant proteins and the wild-type protein at 35 μg/mL in Tris buffer were serially diluted to 7.0 and 1.4 μg/mL. Prepared kinase reaction mix at 0.5 mM AMP/0.5 mM ATP to test for activity and at 0 mM AMP/0 mM ATP to assay background activity by diluting 5× Kinase Buffer with appropriate volumes of 10 mM AMP and 10 mM ATP in MilliQ® water. Duplicate reactions were prepared by mixing 9 μL of the reaction mixture with 6 μL of diluted [[SEQID]]SEQ ID NO:−00338, mixing by pipetting up and down and dispensing 5 μL into a 384-well white OptiPlate (PerkinElmer, Waltham, Mass.). An ADP standard curve was prepared by serially diluting 4 mM ADP in MilliQ water and adding kinase buffer to 1× for a standard at 0.0005, 0.001, 0.005, 0.01, 0.05, 0.1, 0.5, 1, 2, 3, and 4 mM ADP. The plate was covered with a foil plate seal and incubated at 30° C. for 30 min. Following the kinase reaction, 5 μL of ADP-Glo™ Reagent was added to each well. The plate was sealed with a foil plate seal and placed on a horizontal plate shaker at 450 rpm for 2 minutes at room temperature. The plate was removed from the plate shaker and incubated at room temperature for 40 minutes. The plate was then centrifuged for 15 seconds at 1109×rcf and 10 μL of ADP-Glo™ Max Detection Reagent was added. The plate was sealed with a foil plate seal and shaken on a horizontal plate shaker at 450 rpm at room temperature for 2 minutes. The plate was then removed from the plate shaker and incubated at room temperature for 60 minutes. The plate was centrifuged for 15 seconds at 1109×rcf and the luminescence read on an Enspire™ Alpha plate reader (PerkinElmer, Waltham, Mass.).

[1154] The ADP standard curve was used to determine the concentration of ADP in sample wells in the presence or absence of substrate. Concentrations were determined by performing a non-linear 4 parameter logistic on the X=log(X) transformed ADP standard luminescence values. Background ADP was found to be below the limit of detection in most samples. Where the background concentration of ADP in the absence of substrate was calculable the average of those values were subtracted from the calculated ADP concentration in the substrate incubated wells. Activity knock out was calculated by percentage activity relative to purified wild-type protein at the same concentration.

[1155] Table E36B lists the average percent activity of variants relative to purified wild-type protein. All of the variants have decreased activity compared to the wild-type protein. Kinase variants exhibit differences in activity at 7 μg/mL.

TABLE E36B
The proportion activity was calculated as the percentage
AMP + ATP→2ADP converted by [[SEQID]]SEQ ID NO:-00338
at 7 μg/mL during a 30 minute reaction at 30° C.

| KINASE | AVG | SD | N |
|---|---|---|---|
| Wild-type | 100.0% | 11.2% | 2 |
| D91F | 0.9% | 0.60% | 2 |
| D911 | 0.4% | 0.20% | 2 |
| R134M | 0.3% | 0.09% | 2 |
| R134Y | 0.2% | 0.08% | 2 |
| R42A | 0.9% | 0.08% | 2 |
| R42C | 1.8% | 0.14% | 2 |
| R42G | 1.2% | 0.06% | 2 |
| R42I | 1.5% | 0.07% | 2 |
| R42K | 2.2% | 0.14% | 2 |
| R42L | 1.7% | 0.08% | 2 |
| R42Q | 1.2% | 0.05% | 2 |
| R42T | 1.9% | 0.06% | 2 |

### Example 37. Engineering of Secreted Polypeptide for Reduced Enzymatic Activity

[1156] A mutant protein was constructed to reduce the enzymatic activity of a nutritive polypeptide. The active sites of [[SEQID]]SEQ ID NO:−00407 are predicted to be residues D217 and E249, which are acidic residues lying in the center of the catalytic domain. To produce a polypeptide free of enzymatic activity and enriched in amino acids important to nutrition and health, we mutated those two sites to disrupt the catalytic activity of [[SEQID]]SEQ ID NO:−00407. D217 and E249 in [[SEQID]]SEQ ID NO:−00407 may act as nucleophiles and proton donors or acceptors to form hydrogen bonds with their ligands.

[1157] To remove enzymatic activity from [[SEQID]]SEQ ID NO:−00407, we engineered a protein with a single amino acid mutation at E249, changing it from glutamic acid to phenylalanine. The mutant was constructed by assembling two PCR fragments. The first contains the 5′-end of the enzyme up to 20 bp downstream of the mutation site. The second contains the 3′-end of the enzyme starting immediately after the mutation site. In the first PCR fragment, specific PCR primers were designed to bind the targeted mutation site and incorporate the desired mutant amino acid codon. The TTT codon was selected because it is the most highly used codon for phenylalanine in Bacillus subtilis. The two PCR fragments were assembled and inserted into the plasmid vector using Gibson Assembly® method (NEB Gibson Assembly® Master Mix) at 50° C. for 1 hour. The constructs were built in E. coli and confirmed by DNA sequencing before transforming into Bacillus subtilis for secretion and enzymatic activity assays.

[1158] Secretion of nutritive polypeptides from Bacillus subtilis. Three separate colonies of B. subtilis expression strains were used to inoculate 1-ml of 2×L-Mal medium (20 g/l NaCl, 20 g/l tryptone, and 10 g/l yeast extract, 75 g/l maltose) with Cm5, in deep well blocks (96-square wells). Culture blocks were covered with porous adhesive plate seals and incubated overnight in a micro-expression chamber (Glas-Col, Terre Haute, Ind.) at 37° C. and 880 rpm. Overnight cultures were used to inoculate fresh, 2×L-Mal, Cm5 cultures, in deep well blocks, to a starting OD600=0.1. These expression cultures were incubated at 37° C., 880 rpm until the OD600=1.0 (approx. 4 hrs) at which time they were induced by adding isopropyl β-D-1-thiogalactopyranoside (IPTG) at a final concentration of 0.1 M and continuing incubation for 4 hrs. After 4 hrs, the cell densities of each culture was measured (OD600) and cells were harvested by centrifugation (3000 rpm, 10 min, RT). After centrifugation, culture supernatant was carefully removed and transferred to a new block and cell pellets were frozen at −80° C. To determine the levels of secreted protein, the supernatants were assayed to determine the levels of secreted protein of interest (POI) by chip electrophoresis. Briefly, samples were prepared by adding 2 μl of sample to 7 μl sample buffer, heating at 95 C for 5 minutes, and then adding 35 μl of water. Analysis was completed using HT Low MW Protein Express LabChip® Kit or HT Protein Express LabChip® Kit (following the manufacturer's protocol). A protein ladder ran every 12 samples for molecular weight determination (kDa) and quantification (ng/μl).

[1159] Amylase activity assay. [[SEQID]]SEQ ID NO:−00407 is an α-amylase in Bacillus subtilis that has the activity of breaking down polysaccharides, such as starch, into monosaccharides or disaccharides. To demonstrate that the specific mutants have removed enzymatic activity, Bacillus subtilis secreting the enzyme were plated onto agar plates containing starch. If there is enzymatic activity, the secreted enzyme will breakdown the starch and upon staining by iodine, there will be a halo surrounding the Bacillus subtilis colonies. 1% starch plates were made by combining 25 g Luria Broth-Miller, 10 g starch, 15 g bacteriological agar, and 1 L water. 10 mM IPTG was added to the starch plates after the agar has solidified. Single colonies of Bacillus subtilis strains expressing the mutant polypeptides were inoculated in 5 ml LB at 37° C. for 4 hours and 50 μl of the liquid culture were spotted at the center for the starch plates. After 20 hours of growth and induced secretion, 10% iodine was added to the starch plates to stain for starch. When the wild-type enzyme is secreted, it creates a large halo around the cells. However, when the engineered enzymes are secreted, the halo reduces in area, similar to the negative control strain, which expresses the empty vector without the enzyme. Table E37A quantifies the area of the halos relative to the area of the cells. It is shown that the difference in area between the halo and the cells is larger for the wild-type than engineered mutants. From the data shown, we demonstrated the engineering of secreted nutritive polypeptide with reduced enzymatic activity.

TABLE E37A
Quantified area of cells, halos, and their differences measured in in2.

| | Cell Area | Halo Area | Halo/ |
|---|---|---|---|
| Protein | (in²) | (in²) | Cell |
| No protein | 0.413 | 0.6 | 1.45 |
| control | | | |
| Wild-type | 1.27 | 2.246 | 1.77 |
| E249F | 0.331 | 0.496 | 1.50 |
| sample 1 | | | |
| E249F | 1.335 | 1.936 | 1.45 |
| sample 2 | | | |

### Example 38: Engineering of Nutritive Polypeptide Amino Acid Content to Modulate Polypeptide Activity and to Enrich Essential Amino Acid Content

[1160] To demonstrate the engineering of secreted polypeptides for enriched amino acid content, we chose a microorganism known to secrete protein at high levels Bacillus subtilis. [[SEQID]]SEQ ID NO:−00407 was identified a major secreted protein in Bacillus subtilis. Using sequence conservation and crystal structure data for [[SEQID]]SEQ ID NO:−00407, we identified contiguous regions within each protein that were predicted to be tolerant to mutations without negatively affecting the structural stability of the protein and/or the ability of the host organism to secrete the protein.

[1161] We analyzed the secondary structure of [[SEQID]]SEQ ID NO:−00407 reported in the structural protein databank entry 1UA7. We identified 19 loop regions within the sequence of the protein that are not part of an α-helix or a β-sheet. These loop regions are defined by the following amino acid residues: 73-76, 130-133, 147-152, 157-161, 189-192, 222-227, 239-244, 283-286, 291-298, 305-308, 318-323, 336-340, 356-360, 365-368, 387-392, 417-421, 428-432, 437-442, and 464-466. Loop regions less than 4 amino acids in length were not considered for mutation.

[1162] Conservation of sequence over evolutionary space was also considered for identifying positions amenable for engineering while maintaining structural stability and secretion competency. Positions that are less conserved within a family of homologous sequences are inherently variable and likely more amenable to mutation without affecting activity, which is intrinsically tied to structure. To find positions that are less conserved, we downloaded the alignment of the pfam00128 from the NCBI Conserved Domain Database, which contains 31 protein sequences including the [[SEQID]]SEQ ID NO:−00407 catalytic domain (Marchler-Bauer A., Zheng C., Chitsaz F., Derbyshire M. K., Geer L. Y., Geer R. C., Gonzales N. R., Gwadz M., Hurwitz D. I., Lanczycki C. J., Lu F., Lu S., Marchler G. H., Song J. S., Thanki N., Yamashita R. A., Zhang D., and S. H. Bryant. Nucleic Acids Res. (2013) 41:D348-52). We also performed a PSI-BLAST search of the NCBI protein reference sequence database (Pruitt K. D., Tatusova T., and D. R. Maglott. Nucleic Acids Res. (2005) 33:D501-504) using [[SEQID]]SEQ ID NO:−00407 and obtained 500 sequences homologous to [[SEQID]]SEQ ID NO:−00407. In both cases, a single iteration was performed using the BLOSUM62 position specific scoring matrix, a gap penalty of −11, a gap extension penalty of −1, and an alignment inclusion e-value cutoff of 0.005 (Altschul S. F., Nucleic Acids Res. (1997) 25:3389-3402). All protein sequence alignments were used to generate position-specific scoring matrices (PSSM) specific to each query sequence as part of the PSI-BLAST search. From the PSSMs, we identified regions predicted to be tolerant to mutation by counting the number of different amino acids associated with a positive PSSM score at each position within each loop as well as the sum and average of the PSSM scores for essential amino acid substitutions at each position Furthermore, from the multiple sequence alignments obtained from each PSI-BLAST search, we calculated the amino acid entropy at each position, as defined by Sⱼ=Σ_{i∈AA} pᵢ ln pᵢ, where Sj is the entropy at position j and pi is the probability of observing amino acid i at position j.

[1163] Using these measures of mutation tolerance, we identified four loop regions expected to be tolerant to mutations into essential amino acids. To enrich the identified regions in essential amino acids we used a combinatorial codon library where any selected position could be either a F, I, L, V, or M (denoted Z) or a R, K, T, I, or M (denoted X). In each of the loop regions selected for mutation into an essential amino acid, each variable position was assigned as a Z or X depending upon its relative tolerance of hydrophobic residues (based upon their respective PSSM values). Positions that were tolerant of hydrophobic residues were assigned as Z and genetically encoded using the codon NTN. Positions more tolerant of hydrophilic residues were assigned as an X and genetically encoded using the codon ANR. We note that in one of the identified variable regions of [[SEQID]]SEQ ID NO:−00407 (147-153), a glycine residue was inserted into the center of the loop in an attempt to enhance the conformational flexibility of this region. For [[SEQID]]SEQ ID NO:−00407 the sequences of the identified regions are summarized in Table E38A.

TABLE E38A

| Start | | |
|---|---|---|
| residue # | original | degenerate |
| 148 | YAM (SEQ | XXGXX |
| | ID NO: | |
| | 4130) | |
| 240 | NTSA (SEQ | ZXXZ |
| | ID NO: | |
| | 4131) | |
| 291 | SHYASD (SEQ | XZYXXZ |
| | ID NO: | |
| | 4132) | |
| 389 | QPEE (SEQ | XPZZ |
| | ID NO: | |
| | 4133) | |

X = NTN, codes for F, L, I, M, V
Z = ANR, codes for I, M, T, K, R

[1164] Library design and construction. Based on identification of variable regions, we designed primers that can amplify each variable region as explained herein. For example if there are four variable regions, we need four pair of primers to generate four variable fragments. In step 1 we used pES1205 as the template which contains [[SEQID]]SEQ ID NO:−00407 fused with N-terminal AmyQ signal peptide and downstream of pGrac promoter. pES1205 is a derivative of the vector, pHT43 (MoBiTec), containing a 1905-bp DNA fragment encoding the amyE gene from B. subtilis (minus the initial 93-bp encoding the AmyE signal peptide) plus a C-terminal 1×FLAG tag. The amyE::1×FL:AG sequence is cloned, in-frame with the SamyQ sequence encoded on pHT43. For fragment 1, 2, 3, 4, the forward PRIMERID-45053, PRIMERID-45054, PRIMERID-45055, and PRIMERID-45056 contain 25 bases of constant sequence before the variable region followed by degenerate sequences to represent the variable region and 25 bases of constant sequence downstream of the variable region. For fragment 1, 2, 3, the reverse primers PRIMERID-45061, PRIMERID-45062, and PRIMERID-45063 contain 25 bases of reverse complementary sequence upstream of next variable region respectively. For fragment 4, the reverse primer PRIMERID-45064 contains 25 bases of reverse complementary sequence at an arbitrary distance from variable region 4. Four separate PCR amplifications were run using Phusion DNA polymerase (New England Biolabs, Beverly, Mass.) and reaction parameters recommended by the manufacturer. As separate reactions, four wild type fragments, WT-frag-1, WT-frag-2, WT-frag-3 and WT-frag-4 were generated using PES1205 as template and primer pairs PRIMERID-45057 & PRIMERID-45061, PRIMERID-45058 & PRIMERID-45062, PRIMERID-45059 & PRIMERID-45063, and PRIMERID-45060 & PRIMERID-45064, respectively. All PCR fragments were gel purified. In step 2, two separate PCR reactions were set. The first PCR reaction contain fragment 1 and 2 in equimolar ratio as template and PRIMERID-45057 and PRIMERID-45062 as primers. The second PCR reaction contain fragment 3 and 4 in equimolar ratio and PRIMERID-45059 and PRIMERID-45064 as primers. In both the reactions, respective wild type fragments were added in a molar ratio of library members present in each variable fragments. Fragment 5 and 6 are gel purified and used as templates in equimolar ratio in step 3. The primers used in the PCR reaction include PRIMERID-45057 and PRIMERID-45064. The vector PCR product was generated using pES1205 and primer pairs, PRIMERID-45065 and PRIMERID-45066. Both fragment 7 and vector PCR product were gel purified and cloned together using the Gibson Assembly Master Mix (New England Biolabs, Beverly, Mass.) and transformed into the cloning host E. coli Turbo (New England Biolabs) according to manufacturer's instructions. 50 colonies were sequenced to determine the diversity of the library. The colonies on the agar plate were then suspended in LB media and harvested for plasmid purification. In a similar fashion, we generated 9 specific variants of [[SEQID]]SEQ ID NO:−00407 which were altered with 9 specific amino acids, F, L, I, M, V, T, K, R, W at every variable position identified in the mutant design. Specific variant primers are denoted by the single letter amino acid abbreviation in the name. All primers are listed in Table E38B.

TABLE E38B

| Primer sequence | SEQ ID NO: |
|---|---|
| GGTCATCAATCATACCACCAGTGATNTNNTNGGCNTNNTNTCCAATGAGGTTAAGAGTATTCCAAACTGG | 4077 |
| CAGTCAATTTTGGCCGAATATCACAANRNTNNTNANRGAGTTCCAATACGGAGAAATCCTGC | 4078 |
| TCGTAATCTGGGCGTGTCGAATATCNTNANRTATNTNNTNANRGTGTCTGCGGACAAGCTAGTGAC | 4079 |
| GATTTCACAATGTGATGGCTGGANTNCCTANRANRCTCTCGAACCCGAATGGAAAC | 4080 |
| GGTCATCAATCATACCACCAGTG | 4081 |
| CAGTCAATTTTGGCCGAATATCAC | 4082 |
| TCGTAATCTGGGCGTGTCG | 4083 |
| GATTTCACAATGTGATGGCTGG | 4084 |
| TGTGATATTCGGCCAAAATTGACTG | 4085 |
| GATATTCGACACGCCCAGATTACG | 4086 |
| TCCAGCCATCACATTGTGAAATC | 4087 |
| ATCTGCACGCAAGGTAATCGTCAG | 4088 |
| CTGACGATTACCTTGCGTGCAG | 4089 |
| CACTGGTGGTATGATTGATGACC | 4090 |
| GGTCATCAATCATACCACCAGTGATCTTCTGGGCCTTCTGTCCAATGAGGTTAAGAGTATTCCAAACTGG | 4091 |
| GGTCATCAATCATACCACCAGTGATATTATCGGCATTATCTCCAATGAGGTTAAGAGTATTCCAAACTGG | 4092 |
| GGTCATCAATCATACCACCAGTGATGTTGTGGGCGTTGTGTCCAATGAGGTTAAGAGTATTCCAAACTGG | 4093 |
| GGTCATCAATCATACCACCAGTGATTTTTTCGGCTTTTTCTCCAATGAGGTTAAGAGTATTCCAAACTGG | 4094 |
| GGTCATCAATCATACCACCAGTGATTGGTGGGGATGGTGGTCCAATGAGGTTAAGAGTATTCCAAACTGG | 4095 |
| GGTCATCAATCATACCACCAGTGATATGATGGGCATGATGTCCAATGAGGTTAAGAGTATTCCAAACTGG | 4096 |
| GGTCATCAATCATACCACCAGTGATACAACGGGCACAACGTCCAATGAGGTTAAGAGTATTCCAAACTGG | 4097 |
| GGTCATCAATCATACCACCAGTGATTATAAGAAAGGCAAGAAAAATGAGGTTAAGAGTATTCCAAACTGG | 4098 |
| GGTCATCAATCATACCACCAGTGATTATCATCATGGCCATCACAATGAGGTTAAGAGTATTCCAAACTGG | 4099 |
| CAGTCAATTTTGGCCGAATATCACAAAGCTTCTGGGCGAGTTCCAATACGGAGAAATCCTGC | 4100 |
| CAGTCAATTTTGGCCGAATATCACAAAGATTATCGGCGAGTTCCAATACGGAGAAATCCTGC | 4101 |
| CAGTCAATTTTGGCCGAATATCACAAAGGTTGTGGGCGAGTTCCAATACGGAGAAATCCTGC | 4102 |
| CAGTCAATTTTGGCCGAATATCACAAAGTTCTTTGGCGAGTTCCAATACGGAGAAATCCTGC | 4103 |
| CAGTCAATTTTGGCCGAATATCACAAAGTGGTGGGGCGAGTTCCAATACGGAGAAATCCTGC | 4104 |
| CAGTCAATTTTGGCCGAATATCACAAAGATGATGGGCGAGTTCCAATACGGAGAAATCCTGC | 4105 |
| CAGTCAATTTTGGCCGAATATCACAAAGACGACAGGCGAGTTCCAATACGGAGAAATCCTGC | 4106 |
| CAGTCAATTTTGGCCGAATATCACAAAGAAAGGAGCAGAGTTCCAATACGGAGAAATCCTGC | 4107 |
| CAGTCAATTTTGGCCGAATATCACACATCATGGAGCAGAGTTCCAATACGGAGAAATCCTGC | 4108 |
| TCGTAATCTGGGCGTGTCGAATATCCTTCACTATCTTCTGGATGTGTCTGCGGACAAGCTAGTGAC | 4109 |
| TCGTAATCTGGGCGTGTCGAATATCATTCACTATATCATTGATGTGTCTGCGGACAAGCTAGTGAC | 4110 |
| TCGTAATCTGGGCGTGTCGAATATCGTTCACTATGTTGTGGATGTGTCTGCGGACAAGCTAGTGAC | 4111 |
| TCGTAATCTGGGCGTGTCGAATATCTTCCACTATTTCTTTGATGTGTCTGCGGACAAGCTAGTGAC | 4112 |
| TCGTAATCTGGGCGTGTCGAATATCTGGCACTATTGGTGGGATGTGTCTGCGGACAAGCTAGTGAC | 4113 |
| TCGTAATCTGGGCGTGTCGAATATCATGCACTATATGATGGATGTGTCTGCGGACAAGCTAGTGAC | 4114 |
| TCGTAATCTGGGCGTGTCGAATATCACACACTATACAACGGATGTGTCTGCGGACAAGCTAGTGAC | 4115 |
| TCGTAATCTGGGCGTGTCGAATATCTCCAAGTATAAAGCAAAGGTGTCTGCGGACAAGCTAGTGAC | 4116 |
| TCGTAATCTGGGCGTGTCGAATATCTCCCATTATCACGCACATGTGTCTGCGGACAAGCTAGTGAC | 4117 |
| GATTTCACAATGTGATGGCTGGACTTCCTGAGGAACTCTCGAACCCGAATGGAAAC | 4118 |
| GATTTCACAATGTGATGGCTGGAATTCCTGAGGAACTCTCGAACCCGAATGGAAAC | 4119 |
| GATTTCACAATGTGATGGCTGGAGTTCCTGAGGAACTCTCGAACCCGAATGGAAAC | 4120 |
| GATTTCACAATGTGATGGCTGGATTCCCTGAGGAACTCTCGAACCCGAATGGAAAC | 4121 |
| GATTTCACAATGTGATGGCTGGATGGCCTGAGGAACTCTCGAACCCGAATGGAAAC | 4122 |
| GATTTCACAATGTGATGGCTGGAATGCCTGAGGAACTCTCGAACCCGAATGGAAAC | 4123 |
| GATTTCACAATGTGATGGCTGGAACACCTGAGGAACTCTCGAACCCGAATGGAAAC | 4124 |
| GATTTCACAATGTGATGGCTGGAAAGCCTGAGGAACTCTCGAACCCGAATGGAAAC | 4125 |
| GATTTCACAATGTGATGGCTGGACATCCTGAGGAACTCTCGAACCCGAATGGAAAC | 4126 |

[1165] Bacillus subtilis Strain Construction. B. subtilis strain WB800N (MoBiTec, Göttingen, Germany) and used as the expression host. WB800N is a derivative of a well-studied strain (B. subtilis 168) and it has been engineered to reduce protease degradation of secreted proteins by deletion of genes encoding 8 extracellular proteases (nprE, aprE, epr, bpr, mpr, nprB, vpr and wprA). B. subtilis transformations were performed according to the manufacturer's instructions. Approximately 5 μg of library for [[SEQID]]SEQ ID NO:−00407 variant constructs was transformed into WB800N and single colonies were selected at 37° C. by plating on LB agar containing 5.0 μg/ml chloramphenicol (Cm5). For 9 specific variants, 1 μg of specific [[SEQID]]SEQ ID NO:−00407 variant was transformed into WB800N and single colonies were selected at 37° C. by plating on LB agar containing 5.0 μg/ml chloramphenicol (Cm5).

[1166] Bacillus subtilis Library Screening. 800 individual transformants of the B. subtilis [[SEQID]]SEQ ID NO:−00407 library were used to inoculate individual, 1-ml cultures of 2×-MAL medium (20 g/l NaCl, 20 g/l tryptone, and 10 g/l yeast extract, 75 g/l maltose) with Cm5, in deep well blocks (96-square wells). In addition to the library strains, a strain containing plasmid with AmyE and the SamyQ leader peptide was inoculated as a positive control and a strain containing plasmid with no gene of interest was inoculated as negative control. Culture blocks were covered with porous adhesive plate seals and incubated overnight in a micro-expression chamber (Glas-Col, Terre Haute, Ind.) at 37° C. and 880 rpm. Overnight cultures were used to inoculate fresh, 2×-MAL, Cm5 cultures, in deep well blocks, to a starting OD600=0.1.

[1167] Expression cultures were incubated at 37° C., 880 rpm until the OD600=1.0 (approx. 4 hrs) at which time they were induced by adding isopropyl r3-D-1-thiogalactopyranoside (IPTG) at a final concentration of 1 mM and continuing incubation for 4 hrs. After 4 hrs, the cell densities of each culture was measured (0D600) and cells were harvested by centrifugation (3000 rpm, 10 min, RT). After centrifugation, culture supernatant was carefully removed and transferred to a new block and cell pellets were frozen at −80° C. To determine the levels of secreted protein, 0.5-ml aliquots of the culture supernatants were filtered first through a 0.45-μm filter followed by a 0.22 μm filter. The filtrates were then assayed to determine the levels of secreted protein of interest (POI) by chip electrophoresis system and compared with the level of secretion of base construct. Briefly, samples were prepared by adding 2 μl of sample to 7 μl sample buffer, heating at 95 C for 5 minutes, and then adding 35 μl of water. Analysis was completed using HT Low MW Protein Express LabChip® Kit or HT Protein Express LabChip® Kit (following the manufacturer's protocol). A protein ladder ran every 12 samples for molecular weight determination (kDa) and quantification (ng/μl).

[1168] [[SEQID]]SEQ ID NO:−00690 and [[SEQID]]SEQ ID NO:−00702 were confirmed by LC/MS/MS of the gel band of interest. Selected hits were mixed with Invitrogen LDS Sample Buffer containing 5% β-mercaptoethanol, boiled and loaded on a Novex® NuPAGE® 10% Bis-Tris gel (Life Technologies). After running, the gels were stained using SimplyBlue™ SafeStain (Life Technologies) and desired bands were excised and submitted for analysis. Gel bands were washed, reduced and alkylated, and then digested with Trypsin for 4 hours followed by quenching with formic acid. Digests were then analyzed by nano LC/MS/MS with a Waters NanoAcquity HPLC system interfaced to a ThermoFisher Q Exactive™. Peptides were loaded on a trapping column and eluted over a 75 μm analytical column at 350 nL/min; both columns were packed with Jupiter® Proteo resin (Phenomenex). The mass spectrometer was operated in data-dependent mode, with MS and MS/MS performed in the Orbitrap at 70,000 FWHM resolution and 17,500 FWHM resolution, respectively. The fifteen most abundant ions were selected for MS/MS. The resulting peptide data were searched using Mascot against the relevant host database with relevant variant protein sequence appended.

[1169] Diluted overnight cultures were used as inoculum for LB broth cultures containing Cm5. These cultures were grown at 37 C until they reached log phase. Aliquots of these cultures were mixed with glycerol (20% final concentration) and frozen at 80° C. The top 30 hits are then purified using Instagene matrix (Biorad, USA) and amplified using CTTGAAATTGGAAGGGAGATTC (SEQ ID NO: 4127) and GTATAAACTTTTCAGTTGCAGAC (SEQ ID NO: 4128), and sequenced using the same primers to identify the [[SEQID]]SEQ ID NO:−00407 variant sequence.

[1170] Bacillus subtilis Secretion Library Analysis. All the secreted variants of [[SEQID]]SEQ ID NO:−00407 ([[SEQID]]SEQ ID NOs: 45002-45028) were analyzed to determine if there were any position specific biases in the amino acids present in the secreted variants, relative to the expected position specific biases present in the initial genetic library. To this end, an exact binomial test was performed for each amino acid at each position to determine the likelihood that the observed number of each amino acid was significantly (p<0.05) more or less than expected by chance. Table E38C shows the p-values of this single tailed test, where those highlighted elements have p values <0.05. Note that aside from wild type values, which were all significantly higher than expected, all other significant different amino acid frequencies were less than expected. The expected position specific amino acid biases are shown in Table E38D, and were found by sequencing 47 randomly selected variants after the library had been constructed and transformed into E. coli. It was assumed that all positions designed to be an X effectively sampled from the same distribution of L, I, V, F, and M codons (i.e., for all X positions, there were no position specific amino acid biases). As such, the observed counts of each amino acid were aggregated across positions to determine the expected amino acid likelihoods for all X positions. A similar assumption was made for all positions designed to be a Z. As can be seen in Table E38C, in addition to the strong bias toward the wild type sequence at each position, there are a number of different amino acids that were observed significantly less than expected, indicating a bias away from those amino acids at that position in the secreted library. This data provides additional information for the design of specific, rationally designed variants with specific mutations at each position. As an example, to enrich a secreted variant in leucine, positions 241 and 291 may be less desired choices. Alternatively, to enrich a secreted variant in valine, positions 149, 241, 242, 291, 294, 295, and 389 may be less desired choices.

TABLE E38D
Position specific, expected amino acid likelihoods in the
constructed SEQID-450001 library

| | X | Z |
|---|---|---|
| L | 30.2% | — |
| I | 12.3% | 9.7% |
| V | 36.4% | — |
| F | 6.7% | — |
| M | 10.7% | 12.2% |
| T | — | 18.3% |
| K | — | 17.9% |
| R | — | 36.2% |
| Wt | 3.7% | 5.7% |

[1171] Bacillus subtilis Expression Testing of Specific Variants. Three separate colonies of B. subtilis expression strains were used to inoculate 1-ml of 2×-MAL medium (20 g/l NaCl, 20 g/l tryptone, and 10 g/l yeast extract, 75 g/l maltose) with Cm5, in deep well blocks (96-square wells). Culture blocks were covered with porous adhesive plate seals and incubated overnight in a micro-expression chamber (Glas-Col, Terre Haute, Ind.) at 37° C. and 880 rpm. Overnight cultures were used to inoculate fresh, 2×-MAL, Cm5 cultures, in deep well blocks, to a starting OD600=0.1. These expression cultures were incubated at 37° C., 880 rpm until the OD600=1.0 (approx. 4 hrs) at which time they were induced by adding isopropyl 0-D-1-thiogalactopyranoside (IPTG) at a final concentration of 0.1 M and continuing incubation for 4 hrs. After 4 hrs, the cell densities of each culture was measured (0D600) and cells were harvested by centrifugation (3000 rpm, 10 min, RT). After centrifugation, culture supernatant was carefully removed and transferred to a new block and cell pellets were frozen at −80° C. To determine the levels of secreted protein, 0.5-ml aliquots of the culture supernatants were filtered first through a 0.45-μm filter followed by a 0.22 μm filter. The filtrates were then assayed to determine the levels of secreted protein of interest (POI) by chip electrophoresis. Briefly, samples were prepared by adding 2 μl of sample to 7 μl sample buffer, heating at 95 C for 5 minutes, and then adding 35 μl of water. Analysis was completed using HT Low MW Protein Express LabChip® Kit or HT Protein Express LabChip® Kit (following the manufacturer's protocol). A protein ladder ran every 12 samples for molecular weight determination (kDa) and quantification (ng/μl).

[1172] [[SEQID]]SEQ ID NO:−45025, [[SEQID]]SEQ ID NO:−45026, [[SEQID]]SEQ ID NO:−45027, and [[SEQID]]SEQ ID NO:−45028 were confirmed by LC/MS/MS of the gel band of interest. Selected hits were mixed with Invitrogen LDS Sample Buffer containing 5% β-mercaptoethanol, boiled and loaded on a Novex® NuPAGE® 10% Bis-Tris gel (Life Technologies). After running, the gels were stained using SimplyBlue™ SafeStain (Life Technologies) and desired bands were excised and submitted for analysis. Gel bands were washed, reduced and alkylated, and then digested with Trypsin for 4 hours followed by quenching with formic acid. Digests were then analyzed by nano LC/MS/MS with a Waters NanoAcquity HPLC system interfaced to a ThermoFisher Q Exactive®. Peptides were loaded on a trapping column and eluted over a 75 μm analytical column at 350 nL/min; both columns were packed with Jupiter® Proteo resin (Phenomenex). The mass spectrometer was operated in data-dependent mode, with MS and MS/MS performed in the Orbitrap at 70,000 FWHM resolution and 17,500 FWHM resolution, respectively. The fifteen most abundant ions were selected for MS/MS. The resulting peptide data were searched using Mascot against the relevant host database with relevant variant protein sequence appended.

[1173] Amylase activity assay for engineered polypeptides. One of the engineered polypeptides were tested to demonstrate enzymatic activity. [[SEQID]]SEQ ID NO:−00407 is an α-amylase in Bacillus subtilis that has the activity of breaking down polysaccharides, such as starch, into monosaccharides or disaccharides. To demonstrate that the [[SEQID]]SEQ ID NO:−00690 has retained enzymatic activity, Bacillus subtilis secreting the enzyme were plated onto agar plates containing starch. If there is enzymatic activity, the secreted enzyme will breakdown the starch and upon staining by iodine, there will be a halo surrounding the Bacillus subtilis colonies. 1% starch plates were made by combining 25 g Luria Broth-Miller, 10 g starch, 15 g bacteriological agar, and 1 L water. 10 mM IPTG was added to the starch plates after the agar has solidified. Single colonies of Bacillus subtilis strains expressing the mutant polypeptides were inoculated in 5 ml LB at 37° C. for 4 hours and 50 μl of the liquid culture were spotted at the center for the starch plates. After 20 hours of growth and induced secretion, 10% iodine was added to the starch plates to stain for starch. When [[SEQID]]SEQ ID NO:−00690 was plated on the starch plates, the enzyme is secreted and creates a large halo around the cells, similar to wild-type strain, and much larger than the negative control strain, which expresses the empty vector without the enzyme. Table E38E quantifies the area of the halos relative to the area of the cells. From the data shown, we demonstrated the engineering of secreted nutritive polypeptide enriched in essential amino acids which retains enzymatic activity.

TABLE E38E
Quantified area of cells, halos, and their differences
measured in in2.

| | Cell Area | Halo Area | Halo/ |
|---|---|---|---|
| Protein | (in²) | (in²) | Cell |
| No protein | 0.413 | 0.600 | 1.45 |
| control | | | |
| Wild-type | 1.270 | 2.246 | 1.77 |
| [[SEQID]] | 0.469 | 1.234 | 2.63 |
| SEQ ID | | | |
| NO:-00690 | | | |

### Example 39: Determination of Muscle Protein Fractional Synthesis Rate in Human Subjects Following Oral Consumption of Leucine-Enriched Nutritive Polypeptides

[1174] Oral ingestion of leucine or leucine-containing proteins stimulates muscle protein synthesis (Layman & Walker, 2006, The Journal of nutrition: 136: 319-323). Many of the leucine-enriched nutritive polypeptides described herein are highly water soluble and readily digested and absorbed in human subjects. The pharmacokinetics of amino acids as delivered via nutritive polypeptides and their effect on muscle protein synthesis are described here.

[1175] Effects of the leucine-enriched nutritive polypeptides on muscle protein synthesis were measured in apparently healthy subjects. Twelve (12) apparently healthy subjects (average height: 1.7 m, weight: 78.5 kg, age: 56.2, and BMI: 26.8) between the ages of 50 and 70 were randomly assigned in a single-blinded manner to a sequence of treatments. One group of six received formulations of [[SEQID]]SEQ ID NO:−105 and 90% whey protein isolate (WPI) control, and the other group received [[SEQID]]SEQ ID NO:−363 and 90% whey protein isolate control. The treatments were staggered such that each individual received 35 grams of each nutritive polypeptide formulation on separate days (2-3 days apart) to allow for washout of the initial formulation. Each subject served as their own control in the within-subject cross-over comparison.

[1176] Subjects were excluded from the study if they met any of the following exclusion criteria: History of diabetes. History of malignancy in the previous 6 months. Prior gastrointestinal bypass surgery (Lapband, etc.). Chronic inflammatory condition or disease (Lupus, HIV/AIDS, etc.). Known sensitivity or allergy to whey protein, mold spores or fungi. Do not refrain from eating animal proteins during their participation in this study. Cannot refrain from consuming protein or amino acid supplements during their participation in this study. Cannot refrain from resistance training during the study period. Currently participating in another research study with an investigational product. Hemoglobin less than 9.5 mg/dl at the screening visit. Concomitant use of corticosteroids or testosterone replacement therapy (ingestion, injection, or transdermal). Any other diseases or conditions that would place the subject at increased risk of harm if they were to participate, at the discretion of the medical staff.

[1177] All subjects were asked to maintain their current dietary habits, maintain their activities of daily living, and to not participate in any resistance exercise during the study.

[1178] The anabolic effect of each nutritive formulation was measured using the fractional rate of muscle protein synthesis (FSR) (Smith, Villareal, & Mittendorfer, 2007, American journal of physiology—Endocrinology and metabolism: 293: E666E671). Research procedures included venous blood draws and vastus lateralis muscle biopsies during a primed, constant infusion of L-[ring-d5]-phenylalanine (Cambridge Isotope Laboratories, Tewksbury, Mass.). The fractional rate of muscle protein synthesis (FSR) was measured by muscle biopsies during a primed, constant infusion of L-[ring-d5]-phenylalanine. Specifically, the fractional rate of muscle protein synthesis (FSR) was measured in fasted human subjects after an overnight fast (>8 hrs) using the stable isotope tracer incorporation technique from vastus lateralis muscle biopsies performed 2, 4, and 7 hrs after initiating stable isotope tracer infusion. Blood samples were also collected at specified time points after the beginning of stable isotope tracer infusion (i.e. 2, 3, 4, 4+30, 5, 5+30, 6, 6+30, and 7 hrs) to assess changes in amino acid concentrations.

[1179] For each subject, on the morning of the study and after an overnight fast (8 hrs), an 18-22 gauge polyethylene catheter was inserted into each arm. One catheter was inserted into a distal vein for heated blood sampling to obtain a background blood sample (5 ml), and another into the forearm for infusion of the stable isotope tracers. After insertion of peripheral catheters, a primed (5.04 μmol/kg), constant (0.084 μmol/kg/min) infusion of the stable isotope (GRAS substance) ring-d5-phenylalanine was started. Stable isotopes were obtained from Cambridge Isotope Laboratories (Tewksbury, Mass.) and were tested for sterility and pyrogenicity (by CIL and the preparing pharmacy—PharmaCare). Prior to infusion, the tracer was reconstituted with sterile saline. The stable isotope was filtered during infusion through a sterile 0.22 micron (Millipore) filter placed in the infusion line.

[1180] Blood samples (5 ml) were collected in serum separator tubes at specified time points after the beginning of isotope infusion (2, 3, 4, 4+30, 5, 5+30, 6, 6+30, and 7 hrs). About 60 ml of blood was drawn during the entire study, and this volume was replaced with saline infused with a stable isotope tracer.

[1181] Muscle biopsies from the vastus lateralis were performed at 2, 4, and 7 hrs of tracer infusion. After the biopsy at 4 hr, the nutritive protein formulation was administered orally. All muscle biopsies were performed under local anesthesia (using sterile 1% lidocaine, without epinephrine) for normal pain management and strict sterile procedures. Prior to each muscle biopsy, skin was cleaned using a sterile skin preparation kit Betadine), and the skin and tissue below was injected with local anesthetic (Lidocaine) to minimize pain.

[1182] Through a small incision (about 1 cm), a 5 mm Bergstrom needle “0” was advanced into the muscle and suction applied. A piece of the muscle was then removed with the needle (approximately 50-100 mg). The skin was then cleansed, edges approximated with ¼ inch×1.5 inch adhesive Steri-Strips™, and a transparent, breathable film dressing (Tegaderm) was applied to the site. Firm pressure was maintained until bleeding at the site ceased. To minimize the risk of infection and bruising, an antibiotic ointment and pressure dressing (with self-adhesive elastic bandage) was applied, respectively, by the medical staff before the subject was released.

[1183] FSR, measured in (%/hr), was calculated as follows:

$$FSR = [ \frac{{E}_{{P}_{2}} - {E}_{{P}_{1}}}{{E}_{m}} ] * \frac{1}{t} * 60 * 100 ,$$

[1184] where enrichments (EP1, EP2, and Em) are expressed as mole percent excess (MPE) and calculated as the ratio of labeled phenylalanine tracer to unlabeled phenylalanine tracee (TTR), once the tracer concentration has plateaued. EP1 and EP2 are the enrichments of bound ring-2H5-phenylalanine in the first and second biopsies (or second and third), respectively, and Em is the mean value of the enrichments of ring-2H5-phenylalanine in the intracellular pool. “t” is the time in minutes elapsed between 1st and 2nd muscle biopsy in min (or between the second and third). Constant conversion factors of 60 min/hr and 100 were used to express FSR in percent per hour. Outcome variables (muscle protein synthesis and blood amino acid concentrations) were analyzed via paired t-tests. Statistical significance was established a priori at P<0.05 and trends were accepted as 0.051<P<0.10.

[1185] Tables E39A-C show the calculated FSR data for each subject before and after an acute, oral dose of each nutritive protein formulation, and FIG. 56 shows the change in average FSR. The data shown is the mean+/−standard error of the mean. Note that the fasted FSR value from subject 3 in the WPI group had a very elevated FSR, inconsistent with normal fasted values, with a z-value of 2.85. A two-tailed grubbs' outlier test indicated that it was a significant (p<0.05) outlier and it was removed when calculating the mean and standard error as shown in FIG. 56.

TABLE E39A

| Subject | WPI FSR (hr⁻¹) | |
|---|---|---|
| ID | Fasted | Fed |
| 1 | 0.00023651 | 0.00072108 |
| 2 | 0.00041336 | 0.00037967 |
| 3 | 0.00168551 | 0.00022099 |
| 4 | 0.00032137 | 0.00112458 |
| 5 | 0.00064807 | 0.0005574 |
| 6 | 0.00078224 | 0.00133908 |
| 7 | 0.00029799 | 0.00058582 |
| 8 | 0.00063563 | 0.0007537 |
| 9 | 0.00043453 | 0.000653 |
| 10 | 0.0006604 | 0.00088189 |
| 11 | 0.00056282 | 0.00067366 |
| 12 | 0.00040945 | 0.00070602 |

TABLE E39B

| Subject | | |
|---|---|---|
| ID | [[SEQID]]SEQ ID NO:-363 FSR (hr¹) | |
| 1 | 0.00040882 | 0.00106664 |
| 2 | 0.00090652 | 0.00040036 |
| 3 | 0.00040061 | 0.00094592 |
| 4 | 0.00078852 | 0.00082819 |
| 5 | 0.00057147 | 0.00038021 |
| 6 | 0.00054359 | 0.00047435 |

TABLE E39C

| Subject | [[SEQID]]SEQ ID NO:-105 FSR (hr¹) | |
|---|---|---|
| ID | Fasted | Fed |
| 7 | 0.00037724 | 0.00090154 |
| 8 | 0.00041119 | 0.00047965 |
| 9 | 0.00043875 | 0.00075389 |
| 10 | 0.00039112 | 0.00032007 |
| 11 | 0.00049953 | 0.00088001 |
| 12 | 0.00022427 | 0.00085157 |

[1186] Paired t-tests comparing the fasted and fed response of each group indicate that the fed response in the WPI treated subjects is significantly different from the fasted response when subject 3 is removed. (p=0.007), consistent with previous studies examining the FSR response to WPI (Paddon-Jones, D., Sheffield-Moore, M., Katsanos C. S., Xiao-Jun Z., Wolfe, R. R. Differential stimulation of muscle protein synthesis in elderly humans following isocaloric ingestion in amino acids or whey protein. Exp. Gerontol. (2006) 41: 215-219). If subject three is included, the difference loses significance (p=0.45). The fasted and fed FSR response in the [[SEQID]]SEQ ID NO:−105 fed group are significantly different (p=0.04), but the fasted and fed FSR response in the [[SEQID]]SEQ ID NO:−363 fed group are not significantly different (p=0.68).

### Example 40: Oral Pharmacokinetics of Formulations Containing Nutritive Polypeptides

[1187] The anabolic response to protein ingestion is predicated on the delivery of essential amino acids. The purpose of this study was to examine the changes in plasma amino acid concentrations in response to various proteins over a period of 240 minutes. Four apparently healthy subjects between the ages of 18 and 50 were randomly assigned in a double-blinded manner to a sequence of treatments, receiving 20 grams of either whey protein isolate or [[SEQID]]SEQ ID NO:−105 orally, in a volume of 170 ml. Subjects were fasted overnight (>8 hrs) before oral pharmacokinetic study. Venous blood samples were collected at specified time points (i.e. 0, 15, 30, 60, 90, 120, 150, 180, 210 and 240 minutes) following the oral ingestion of nutritive polypeptide to assess changes in plasma amino acid concentrations. Plasma amino acid concentrations were quantified by Quest Diagnostics or Laboratory Corporation of America.

[1188] FIGS. 57-60 show the plasma time course of each measured amino acid and the aggregate groups, essential amino acids (EAA), branched chain amino acids (BCAA), and total amino acids (TAA), for WPI and [[SEQID]]SEQ ID NO:−105.

[1189] Using a 1-way ANOVA test to assess significant differences in plasma amino acid levels across the time points measured, for WPI, these data indicate that there are significant differences across time for Asn, Ile, Leu, Lys, Met, Phe, Pro, Trp, Tyr, EAA, BCAA, and TAA (p<0.05).

[1190] Using a 1-way ANOVA test to assess significant differences in plasma amino acid levels across the time points measured, for a nutritive formulation of [[SEQID]]SEQ ID NO:−105, these data indicate that there are significant differences across time for Arg, Asn, Asp, Glu, Gly, His, Ile, Leu, Lys, Met, Phe, Ser, Tyr, Val, EAA, BCAA, and TAA (p<0.05).

[1191] FIGS. 61-63 show the integrated area under the curve (AUC) of each measured amino acid as well as the aggregate groups, essential amino acids (EAA), branched chain amino acids (BCAA), and total amino acids (TAA), for WPI and [[SEQID]]SEQ ID NO:−105.

[1192] Using a t-test to compare the AUCs of each amino acid or amino acid group between WPI and [[SEQID]]SEQ ID NO:−105, there are significant differences in the Asp (p=0.01), His (p=0.04), Leu (0.023), Met (0.002), Phe (0.04), Pro (p<0.01), Ser (p=0.03), and Trp (p=0.002) responses.

[1193] In another study, a 35 gram dose of [[SEQID]]SEQ ID NO:−105 and WPI was given orally in 100 ml and 1151 ml, respectively, to six, apparently healthy subjects between the ages of 18 and 50. FIGS. 64-67 show the plasma time course of each measured amino acid and the aggregate groups, essential amino acids (EAA), branched chain amino acids (BCAA), and total amino acids (TAA), for WPI and [[SEQID]]SEQ ID NO:−105.

[1194] Using a 1-way ANOVA test to assess significant differences in plasma amino acid levels across the time points measured, for WPI, these data indicate that there are significant differences across time for Arg, Asn, Asp, Gln, Ile, Leu, Lys, Met, Phe, Pro, Ser, Thr, Trp, Tyr, Val, EAA, BCAA, and TAA (p<0.05).

[1195] Using a 1-way ANOVA test to assess significant differences in plasma amino acid levels across the time points measured, for a nutritive formulation of [[SEQID]]SEQ ID NO:−105, these data indicate that there are significant differences across time for

[1196] Arg, Asn, Asp, Glu, His, Ile, Ley, Lys, Met, Phe, Ser, Thr, Trp, Val, EAA, BCAA, and TAA (p<0.05).

[1197] FIGS. 68-70 show the integrated area under the curve (AUC) of each measured amino acid as well as the aggregate groups, essential amino acids (EAA), branched chain amino acids (BCAA), and total amino acids (TAA), for WPI and [[SEQID]]SEQ ID NO:−105 dosed at 35 g.

[1198] Using a two-tailed, unequal variance t-test to compare the AUCs of each amino acid or amino acid group between WPI and [[SEQID]]SEQ ID NO:−105, there are significant differences in the Asn (p=0.006), His (p=0.01), Ile (p=0.03), Lys (p=0.02), Met (p<0.001), Phe (p<0.001), Pro (p=0.002), Ser (p=0.005), Thr (p=0.004), Trp (p<0.001), Tyr (p=0.003), and Val (p=0.012) responses.

[1199] In another study examining the pharmacokinetics of amino acid delivery via nutritive polypeptides, three apparently healthy subjects between the ages of 18 and 50 were randomly assigned in a double-blinded manner to a sequence of treatments, receiving 20 grams of either whey protein isolate or [[SEQID]]SEQ ID NO:−363 orally. Subjects were fasted overnight (>8 hrs) before oral pharmacokinetic study. Venous blood samples were collected at specified time points (i.e. 0, 15, 30, 60, 90, 120, 150, 180, 210 and 240 minutes) following the oral ingestion of nutritive polypeptide to assess changes in plasma amino acid concentrations. Plasma amino acid concentrations were quantified by Quest Diagnostics or Laboratory Corporation of America.

[1200] FIGS. 71-74 show the plasma time course of each measured amino acid and the aggregate groups, essential amino acids (EAA), branched chain amino acids (BCAA), and total amino acids (TAA), for WPI and [[SEQID]]SEQ ID NO:−363.

[1201] Using a 1-way ANOVA test to assess significant differences in plasma amino acid levels across the time points measured, for WPI, these data indicate that there are significant differences across time for Gln, Ile, Leu, Lys, Phe, Ser, Tyr, Val, EAA, BCAA, and TAA (p<0.05).

[1202] Using a 1-way ANOVA test to assess significant differences in plasma amino acid levels across the time points measured, for [[SEQID]]SEQ ID NO:−363, these data indicate that there are no significant differences across time (p<0.05).

### Example 41: Chronic Treatment of Sarcopenia and Loss of Physical Function in Elderly Frail Subjects Using Nutritive Polypeptides

[1203] Supplementation of leucine or leucine-containing proteins improve muscle mass build-up after exercise and maintain skeletal muscle mass during long-term disuse (Layman & Walker, 2006, The Journal of nutrition: 136: 319-323). Nutritive polypeptides enriched in leucine and essential amino acids are described herein. Elderly, frail subjects are randomly assigned in a double blind manner to a specific treatment group: a control group receiving an isocaloric control or one of 3 dose ranging treatment arm receiving 3 times daily a dose of 15, 30, or 40 grams of a nutritive polypeptide formulation for 30 days. Enrolled subjects are provided with a control diet based upon individual's body mass index (BMI) and physical activities throughout the trial period. Food and calorie intakes are recorded. Enrolled subjects maintain their regular daily activities. Daily physical activities and calorie consumption are measured by a physical activity tracker (FitBit Flex wrist band). Lean body mass is measured by MRI (Müller, M. J., et al. “Assessment and definition of lean body mass deficiency in the elderly.” European journal of clinical nutrition (2014)) or dual-energy X-ray absorptiometry (DEXA; Nielsen, Palle Kjrerulff, Jorgen Ladefoged, and Klaus Olgaard. “Lean body mass by Dual Energy X-ray Absorptiometry (DEXA) and by urine and dialysate creatinine recovery in CAPD and pre-dialysis patients compared to normal subjects.” Adv Petit Dial 10 (1994): 99-103.) on day 1 (prior to nutritive polypeptide dosing) and day 31 after treatment has concluded to assess the change of skeletal muscle mass. Physical function is also assessed at the start and end of the treatment period using the short physical performance battery score (Volpato, Stefano, et al. “Predictive value of the Short Physical Performance Battery following hospitalization in older patients.” The Journals of Gerontology Series A: Biological Sciences and Medical Sciences 66.1 (2011): 89-96.), measures of gait speed, 6 minute walk test (6MWT), and the timed up and go test (TUGS; Podsiadlo, D; Richardson, S. “The timed ‘Up & Go’: A test of basic functional mobility for frail elderly persons”. Journal of the American Geriatrics Society (1991) 39: 142-8). The absolute and percent change in lean body mass as well as SPPB score, gait speed, 6MWT, and TUGS, from baseline is compared across treatment arms and relative to control to assess treatment efficacy.

### Example 42: Oral Pharmacokinetics of Formulations Containing Nutritive Polypeptides Deficient in Methionine

[1204] The purpose of this study was to examine the changes in plasma amino acid concentrations in response to a methionine deficient nutritive protein over a period of 240 minutes. Four apparently healthy subjects between the ages of 18 and 50 were randomly assigned in a double-blinded manner to a sequence of treatments, receiving 20 grams of [[SEQID]]SEQ ID NO:−426 orally, in a volume of 170 ml. Subjects were fasted overnight (>8 hrs), and the following morning venous blood samples were collected at specified time points (i.e. 0, 15, 30, 60, 90, 120, 150, 180, 210 and 240 minutes) after the oral ingestion of nutritive polypeptide to assess changes in plasma amino acid concentrations. Plasma amino acid concentrations were quantified by Quest Diagnostics or Laboratory Corporation of America.

[1205] FIGS. 75-78 show the plasma time course of each measured amino acid and the aggregate groups, essential amino acids (EAA), branched chain amino acids (BCAA), and total amino acids (TAA), for [[SEQID]]SEQ ID NO:−426.

[1206] Using a 1-way ANOVA test to assess significant differences in plasma amino acid levels across the time points measured, for [[SEQID]]SEQ ID NO:−426, these data indicate that there are significant differences across time for Glu and EAA (p<0.05). A Dunnett multiple comparison test examining the plasma EAA time course further indicates that the plasma EAA levels at the 30 and 60 min. time points are significantly different from the basal levels at time 0 min. Methionine shows no significant change over time.

### Example 43: Nutritive Polypeptides for the Treatment of Short Bowel Syndrome in Humans

[1207] A nutritive polypeptide containing a high percentage of BCAAs is provided and dosed orally to humans with short bowel syndrome to alleviate protein malnutrition and to increase gastrointestinal markers of intestinal function such as GLP-2. GLP-2 has been shown in numerous preclinical and clinical models to be involved in the regulation of cell proliferation, apoptosis, nutrient absorption, motility, as well as epithelial and intestinal permeability. (See, e.g., Martin, G R. et al., (2006). Gut hormones, and short bowel syndrome: The enigmatic role of glucagon-like peptide-2 in the regulation of intestinal adaptation. World J Gastroenterol. 12(26): 4117-4129.) Reduction of parenteral nutrition dependence, weight gain, changes in BMI, serum albumin, creatinine, reduction of inflammatory infiltrate (such as neutrophils) in the intestine, muscle mass/muscle synthesis, urine osmolality, amino acid pharmacokinetic and pharmacodynamic data are collected and improved in subjects receiving nutritive polypeptides. Exemplary polypeptides are listed herein. Nutritive polypeptides are well tolerated in patients with short bowel or gastrointestinal disorders since they are formulated in a small volume that can deliver high percentage BCAAs compared to the current standard of care. Optionally, nutritionally complete nutritive polypeptides, in particular polypeptides with high percentage EAAs, are provided.

### Example 44: Nutritive Polypeptides for the Treatment of Anorexia Nervosa in Humans

[1208] A nutritive polypeptide containing a high percentage of BCAAs is provided and dosed orally to humans with anorexia nervosa to alleviate gastrointestinal malabsorption associated with disordered eating and provide protein nutrition. Exemplary polypeptides enriched in BCAAs are described herein. Weight gain, changes in BMI, serum clotting factors, serum albumin, creatinine, increases in muscle and/or muscle synthesis, urine osmolality, amino acid pharmacokinetic and pharmacodynamic data are collected. High percentage BCAA Nutritive polypeptides in a small volume are preferred in patients with anorexia, whose small stomach volume severely limits the efficacy of currently available dietary therapies to treat gastrointestinal malabsorption.

### Example 45: Nutritive Polypeptides for the Treatment of Inflammatory Conditions in Humans

[1209] A nutritive polypeptide containing a high percentage of EAAs and, optionally BCAAs, is provided and dosed orally to humans with inflammatory bowel disease to alleviate gastrointestinal malabsorption associated with mucosal injury and provide protein nutrition. Exemplary polypeptides enriched in BCAAs are described herein. Weight gain, serum albumin, creatinine, amino acid pharmacokinetic and pharmacodynamic data are collected. High percentage EAA (and, optionally, BCAA) Nutritive polypeptides in a small volume are preferred in patients with IBD, whose small stomach volume severely limits the efficacy of currently available dietary therapies to treat gastrointestinal malabsorption.

### Example 46: Prevention of Muscle Mass Loss and Restoration of Muscle Mass in a Rodent Model of Disuse Muscle Atrophy

[1210] Disuse skeletal muscle atrophy is common during chronic periods of reduced physical activity. Disuse skeletal muscle atrophy can also be resulted from neuropathy- or radiculopathy-related paralysis post brain stroke, denervation, or polio viral infection. Prolonged reduced physical activity and muscle disuse lead to a decline in basal and postprandial rates of muscle protein synthesis and increased muscle protein breakdown (Wall & van Loon, 2013, Nutrition Reviews: 71: 195-208). Dietary supplementation of essential amino acids, specifically brained-chain amino acids and leucine, has been shown to attenuate disuse skeletal muscle atrophy and restore muscle mass (Wall & van Loon, 2013, Nutrition Reviews: 71: 195-208)(Martin et al., 2013, PloS one: 8: e75408).

[1211] In skeletal muscle, myosin II is a motor protein that generates force that drives muscle contraction. Myosin II is composed of heteromeric protein comprised of two heavy chains and four light chains. Increases in skeletal muscle anabolism should lead to an increase in the concentration of myosin heavy chain isoforms (Iresjo & Lundholm, 2012, Journal of translational medicine: 10: 238). The use of an enzyme linked immunosorbent assay and realtime quantitative PCR to measure myosin heavy chain isoform content of skeletal muscle are useful means of assessing the in vitro or in vivo ability of a compound to promote muscle protein synthesis and the accrual of muscle tissue (Iresjo & Lundholm, 2012, Journal of translational medicine: 10: 238).

[1212] Chronic dosing of a nutritive polypeptide selected for enrichment in essential amino acids and leucine described herein are dosed chronically in a rodent model of disuse muscle atrophy to measure compound efficacy on the prevention and restoration of muscle mass.

[1213] Disuse skeletal muscle atrophy is induced in a single hind limb of mouse (Pellegrino et al., 2011, The Journal of physiology: 589: 2147-60) by non-surgical immobilization of the knee in the extension position, and the ankle in the plantar flexion position (Khan & Sahani, 2013, CANADIAN JOURNAL OF PHYSIOLOGY AND PHARMACOLOGY: 8: 1-8)(Lee et al., 2014, Anesthesiology: 120: 76-85) or by casting (Martin et al., 2013, PloS one: 8: e75408). Muscle immobilization results in the loss of soleus muscle mass to 11%, 22%, 39%, and 45% of its original mass at 3, 7, 14, and 21 days, respectively (Khan & Sahani, 2013, CANADIAN JOURNAL OF PHYSIOLOGY AND PHARMACOLOGY: 8: 1-8). Disuse skeletal muscle atrophy of soleus muscle is induced in right hind limb of male C57BL/6 mice (8 weeks of age) by non-surgical immobilization of the knee in the extension position, and the ankle in the plantar flexion position (Khan & Sahani, 2013, CANADIAN JOURNAL OF PHYSIOLOGY AND PHARMACOLOGY: 8: 1-8).

[1214] Protective effects of nutritive polypeptides on muscle loss are evaluated in rodents by measuring skeletal muscle mass and functional properties. Disuse skeletal muscle atrophy of soleus muscle is induced by non-surgical immobilization of right hind limb of male C57BL/6 mice (8 weeks of age) (Khan & Sahani, 2013, CANADIAN JOURNAL OF PHYSIOLOGY AND PHARMACOLOGY: 8: 1-8). Animals undergo right hind limb non-surgical immobilization and are randomly assigned to a treatment group of vehicle or nutritive polypeptide treatment with ten animals per group. Treatment doses of 1-5 g/kg are administered by daily oral gavage for 21 days after immobilization.

[1215] A group of age-matched control mice without hind limb immobilization are provided nutritive polypeptides to serve as a normal muscle control group. Baseline soleus muscle mass is assessed by MRI on day 0, and change of soleus muscle mass is assessed by MRI on day 3, 7, 10, 14, 17, and 21. Animals are sacrificed on day 21. Atrophic soleus muscle from right hind limb and non-atrophic soleus muscle from left hind limb are harvested. Muscle weight is recorded. Skeletal muscle tissue is thawed on ice. Extraction Buffer is prepared immediately before use by adding 1:100 Protease Inhibitor Cocktail and Phosphatase Inhibitor Cocktails 2 and 3 to TPER. Tissue samples are weighed in 2 mL screw cap tubes and add Extraction Buffer at a ratio of 5 mL/g of tissue. Two sterile steel beads are added to the tube, and samples are homogenized in the Tissuelyser II (QIagen, Valencia, Calif.) at 30 Hz for 5 minutes three times in succession. Tubes are then centrifuged at 12,000×g for 5 minutes to pellet cellular debris. Supernatant is then collected into labelled 2 mL tubes.

[1216] Protein levels of myosin heavy chain isoforms 2 and 4 are measured in the protein extracted from soleus muscles, as described herein (Pellegrino et al., 2011, The Journal of physiology: 589: 2147-60)(Desaphy et al., 2005, Neurobiology of Disease: 18: 356-365). Alternatively, mRNA levels of myosin heavy chain isoforms 2 and 4 in soleus muscles are measured by quantitative PCR, as described herein (Iresjo & Lundholm, 2012, Journal of translational medicine: 10: 238). Skeletal muscle anabolism is calculated by the ratio of protein or mRNA levels of myosin heavy chain isoforms 2 and 4 in soleus muscles or soleus muscle weight between the non-atrophic left hind limb and the atrophic right limb. Efficacy of nutritive polypeptides on disuse skeletal muscle anabolism is compared to the control animals which receive vehicle.

[1217] In another experiment, the ability of nutritive polypeptides to restore muscle mass after a period of limb immobilization is tested. Disuse skeletal muscle atrophy of soleus muscle is induced by non-surgical immobilization of right hind limb for 14 days in male C57BL/6 mice (8 weeks of age). A group of age-matched control mice without hind limb immobilization serve as normal muscle control. Animals with soleus muscle atrophy resulted from non-surgical immobilization are released from hind limb immobilization and randomly assigned to each treatment group. Treatment doses of 1-5 g/kg are administered by daily oral gavage for 21 days.

[1218] Baseline soleus muscle mass is assessed by MRI on day 0 (the last day of hind limb immobilization), and change of soleus muscle mass is assessed by MRI on day 3, 7, 10, 14, 17, and 21 of treatment of provided nutritive polypeptides. Animals are sacrificed on day 21. Atrophic soleus muscle from right hind limb and non-atrophic soleus muscle from left hind limb are harvest. Muscle weight is recorded. Protein and mRNA levels of myosin heavy chain isoforms 2 and 4 are measured in the protein extracted from soleus muscles, as described herein. Skeletal muscle anabolism is calculated by the ratio of protein or mRNA levels of myosin heavy chain isoforms 2 and 4 in soleus muscles or soleus muscle weight between the non-atrophic left hind limb and the atrophic right limb. Efficacy of nutritive polypeptides on skeletal muscle restoration is compared to the control animals which receive vehicle.

[1219] Enzyme Linked Immunosorbent Assays (ELISAs) for the detection of myosin heavy chain 2 and 4. ELISA kits for myosin heavy chain 2 and myosin heavy chain 4 are obtained from Cloud Clone Corp. (Catalog numbers SED416MU and SEA755MU, respectively; Wuhan, Hubei, PRC). Phosphate Buffered Saline is obtained from Life Technologies (Catalog number 20012, Grand Island, N.Y.). TWEEN®-20 detergent is obtained from Fisher Scientific (Catalog number BP337-100, Pittsburgh, Pa.). Plates are washed on an ELx50 microplate strip washer (BioTek, Winooski, Vt.). Plates are read on a Synergy™ Mx monochromator-based multi-mode microplate reader (BioTek, Winooski, Vt.). Tissue Protein Extraction Reagent (TPER) is obtained from Thermo Scientific (Catalog number 78510, Waltham, Mass.). Protease inhibitor cocktail, and phosphatase inhibitor cocktails 2 and 3 are obtained from Sigma-Aldrich (Catalog numbers P8340, P0044 and P5726, respectively; St. Louis, Mo.). Sterile 2 mL screw cap tubes are obtained from Fisher Scientific (Catalog number 0553869C, Pittsburgh, Pa.). Stainless steel 5 mm beads are obtained from Qiagen (Catalog number 69989, Valencia, Calif.). Tissue samples are homogenized on a Tissuelyser II (Qiagen, Valencia, Calif.). Protein concentration is determined using the Coomassie® Plus (Bradford) Protein Assay from Thermo Scientific (Catalog number 23236, Waltham, Mass.). Data are analyzed using Microsoft Excel version 14.0.7128.5000 (Microsoft Corporation, Redmond, Wash.) and GraphPad Prism version 6.03 for Windows (GraphPad Software, La Jolla, Calif.).

[1220] Extracted protein supernatant is diluted to 1 mg/mL in Extraction Buffer. Dilute these normalized supernatants 4× with the ELISA Kit Standard Diluent for myosin heavy chain 4 or 2.5× with ELISA Kit Standard Diluent for myosin heavy chain 2. Reconstitute standards with same proportion Extraction Buffer and Standard Diluent (25% for myosin heavy chain 4 and 40% for myosin heavy chain 2), and dilute in the same concentration Extraction Buffer and Standard Diluent to generate standard curve as described in the manufacturer's instructions. Run standards and samples at 100 μL/well in duplicate following the manufacturer's instructions.

[1221] The plates are read on the Synergy™ Mx plate reader at an absorbance of 450 nm. The average of the duplicate readings for each standard, control and sample is generated after subtracting the average of the 0 μg/mL standard absorbance in Excel. A standard curve is used generated by plotting the average absorbance for each standard and unknown samples concentrations are calculated on GraphPad Prism 6 using a non-linear regression using a 4 parameter logistic equation after transforming the standard x=log(x). Statistical test of data is conducted using GraphPad Prism 6 software.

[1222] Quantitative PCR for the detection of myosin heavy chain 2 and 4. Total RNA is extracted from soleus muscle using Quick-RNA kit (Zymo Research, Irvine, Calif.). cDNA is synthesized from total RNA using high capacity cDNA archive kit (Applied Biosystems, Forster City, Calif.). Primer sequences and quantitative PCR protocol of myosin heavy chain 2 and 4 are described as herein (Iresjo & Lundholm, 2012, Journal of translational medicine: 10: 238). Quantitative PCR is performed using a C1000 thermal cycler (Bio-Rad, Forster City, Calif.). Relative mRNA expression levels are calculated by normalization to endogenous genes beta-actin and HPRT. Statistical test of data is conducted using GraphPad Prism 6 software.

### Example 47: Prevention of Muscle Mass Loss and Restoration of Muscle Mass in a Rodent Model of Disuse Muscle Atrophy

[1223] Disuse skeletal muscle atrophy is common during chronic periods of reduced physical activity. Disuse skeletal muscle atrophy can also be resulted from neuropathy- or radiculopathy-related paralysis post brain stroke, denervation, or polio viral infection. Prolonged reduced physical activity and muscle disuse lead to a decline in basal and postprandial rates of muscle protein synthesis and increased muscle protein breakdown (Wall & van Loon, 2013, Nutrition Reviews: 71: 195-208). Dietary supplementation of essential amino acids, specifically brained-chain amino acids and leucine, has been shown to attenuate disuse skeletal muscle atrophy and restore muscle mass (Wall & van Loon, 2013, Nutrition Reviews: 71: 195-208)(Martin et al., 2013, PloS one: 8: e75408).

[1224] In skeletal muscle, myosin II is a motor protein that generates force that drives muscle contraction. Myosin II is composed of heteromeric protein comprised of two heavy chains and four light chains. Increases in skeletal muscle anabolism should lead to an increase in the concentration of myosin heavy chain isoforms (Iresjo & Lundholm, 2012, Journal of translational medicine: 10: 238). The use of an enzyme linked immunosorbent assay and realtime quantitative PCR to measure myosin heavy chain isoform content of skeletal muscle are useful means of assessing the in vitro or in vivo ability of a compound to promote muscle protein synthesis and the accrual of muscle tissue (Iresjo & Lundholm, 2012, Journal of translational medicine: 10: 238).

[1225] Chronic dosing of a nutritive polypeptide selected for enrichment in essential amino acids and leucine described herein are dosed chronically in a rodent model of disuse muscle atrophy to measure compound efficacy on the prevention and restoration of muscle mass.

[1226] Disuse skeletal muscle atrophy is induced in a single hind limb of mouse (Pellegrino et al., 2011, The Journal of physiology: 589: 2147-60) by non-surgical immobilization of the knee in the extension position, and the ankle in the plantar flexion position (Khan & Sahani, 2013, CANADIAN JOURNAL OF PHYSIOLOGY AND PHARMACOLOGY: 8: 1-8)(Lee et al., 2014, Anesthesiology: 120: 76-85) or by casting (Martin et al., 2013, PloS one: 8: e75408). Muscle immobilization results in the loss of soleus muscle mass to 11%, 22%, 39%, and 45% of its original mass at 3, 7, 14, and 21 days, respectively (Khan & Sahani, 2013, CANADIAN JOURNAL OF PHYSIOLOGY AND PHARMACOLOGY: 8: 1-8). Disuse skeletal muscle atrophy of soleus muscle is induced in right hind limb of male C57BL/6 mice (8 weeks of age) by non-surgical immobilization of the knee in the extension position, and the ankle in the plantar flexion position (Khan & Sahani, 2013, CANADIAN JOURNAL OF PHYSIOLOGY AND PHARMACOLOGY: 8: 1-8).

[1227] Protective effects of nutritive polypeptides on muscle loss are evaluated in rodents by measuring skeletal muscle mass and functional properties. Disuse skeletal muscle atrophy of soleus muscle is induced by non-surgical immobilization of right hind limb of male C57BL/6 mice (8 weeks of age) (Khan & Sahani, 2013, CANADIAN JOURNAL OF PHYSIOLOGY AND PHARMACOLOGY: 8: 1-8). Animals undergo right hind limb non-surgical immobilization and are randomly assigned to a treatment group of vehicle or nutritive polypeptide treatment with ten animals per group. Treatment doses of 1-5 g/kg are administered by daily oral gavage for 21 days after immobilization.

[1228] A group of age-matched control mice without hind limb immobilization are provided nutritive polypeptides to serve as a normal muscle control group. Baseline soleus muscle mass is assessed by MRI on day 0, and change of soleus muscle mass is assessed by MRI on day 3, 7, 10, 14, 17, and 21. Animals are sacrificed on day 21. Atrophic soleus muscle from right hind limb and non-atrophic soleus muscle from left hind limb are harvested. Muscle weight is recorded. Skeletal muscle tissue is thawed on ice. Extraction Buffer is prepared immediately before use by adding 1:100 Protease Inhibitor Cocktail and Phosphatase Inhibitor Cocktails 2 and 3 to TPER. Tissue samples are weighed in 2 mL screw cap tubes and add Extraction Buffer at a ratio of 5 mL/g of tissue. Two sterile steel beads are added to the tube, and samples are homogenized in the Tissuelyser II (QIagen, Valencia, Calif.) at 30 Hz for 5 minutes three times in succession. Tubes are then centrifuged at 12,000×g for 5 minutes to pellet cellular debris. Supernatant is then collected into labelled 2 mL tubes.

[1229] Protein levels of myosin heavy chain isoforms 2 and 4 are measured in the protein extracted from soleus muscles, as described herein (Pellegrino et al., 2011, The Journal of physiology: 589: 2147-60)(Desaphy et al., 2005, Neurobiology of Disease: 18: 356-365). Alternatively, mRNA levels of myosin heavy chain isoforms 2 and 4 in soleus muscles are measured by quantitative PCR, as described herein (Iresjo & Lundholm, 2012, Journal of translational medicine: 10: 238). Skeletal muscle anabolism is calculated by the ratio of protein or mRNA levels of myosin heavy chain isoforms 2 and 4 in soleus muscles or soleus muscle weight between the non-atrophic left hind limb and the atrophic right limb. Efficacy of nutritive polypeptides on disuse skeletal muscle anabolism is compared to the control animals which receive vehicle.

[1230] In another experiment, the ability of nutritive polypeptides to restore muscle mass after a period of limb immobilization is tested. Disuse skeletal muscle atrophy of soleus muscle is induced by non-surgical immobilization of right hind limb for 14 days in male C57BL/6 mice (8 weeks of age). A group of age-matched control mice without hind limb immobilization serve as normal muscle control. Animals with soleus muscle atrophy resulted from non-surgical immobilization are released from hind limb immobilization and randomly assigned to each treatment group. Treatment doses of 1-5 g/kg are administered by daily oral gavage for 21 days.

[1231] Baseline soleus muscle mass is assessed by MRI on day 0 (the last day of hind limb immobilization), and change of soleus muscle mass is assessed by MRI on day 3, 7, 10, 14, 17, and 21 of treatment of provided nutritive polypeptides. Animals are sacrificed on day 21. Atrophic soleus muscle from right hind limb and non-atrophic soleus muscle from left hind limb are harvest. Muscle weight is recorded. Protein and mRNA levels of myosin heavy chain isoforms 2 and 4 are measured in the protein extracted from soleus muscles, as described herein. Skeletal muscle anabolism is calculated by the ratio of protein or mRNA levels of myosin heavy chain isoforms 2 and 4 in soleus muscles or soleus muscle weight between the non-atrophic left hind limb and the atrophic right limb. Efficacy of nutritive polypeptides on skeletal muscle restoration is compared to the control animals which receive vehicle.

[1232] Enzyme Linked Immunosorbent Assays (ELISAs) for the detection of myosin heavy chain 2 and 4. ELISA kits for myosin heavy chain 2 and myosin heavy chain 4 are obtained from Cloud Clone Corp. (Catalog numbers SED416MU and SEA755MU, respectively; Wuhan, Hubei, PRC). Phosphate Buffered Saline is obtained from Life Technologies (Catalog number 20012, Grand Island, N.Y.). TWEEN®-20 detergent is obtained from Fisher Scientific (Catalog number BP337-100, Pittsburgh, Pa.). Plates are washed on an ELx50 microplate strip washer (BioTek, Winooski, Vt.). Plates are read on a Synergy™ Mx monochromator-based multi-mode microplate reader (BioTek, Winooski, Vt.). Tissue Protein Extraction Reagent (TPER) is obtained from Thermo Scientific (Catalog number 78510, Waltham, Mass.). Protease inhibitor cocktail, and phosphatase inhibitor cocktails 2 and 3 are obtained from Sigma-Aldrich (Catalog numbers P8340, P0044 and P5726, respectively; St. Louis, Mo.). Sterile 2 mL screw cap tubes are obtained from Fisher Scientific (Catalog number 0553869C, Pittsburgh, Pa.). Stainless steel 5 mm beads are obtained from Qiagen (Catalog number 69989, Valencia, Calif.). Tissue samples are homogenized on a Tissuelyser II (Qiagen, Valencia, Calif.). Protein concentration is determined using the Coomassie® Plus (Bradford) Protein Assay from Thermo Scientific (Catalog number 23236, Waltham, Mass.). Data are analyzed using Microsoft Excel version 14.0.7128.5000 (Microsoft Corporation, Redmond, Wash.) and GraphPad Prism version 6.03 for Windows (GraphPad Software, La Jolla, Calif.).

[1233] Extracted protein supernatant is diluted to 1 mg/mL in Extraction Buffer. Dilute these normalized supernatants 4× with the ELISA Kit Standard Diluent for myosin heavy chain 4 or 2.5× with ELISA Kit Standard Diluent for myosin heavy chain 2. Reconstitute standards with same proportion Extraction Buffer and Standard Diluent (25% for myosin heavy chain 4 and 40% for myosin heavy chain 2), and dilute in the same concentration Extraction Buffer and Standard Diluent to generate standard curve as described in the manufacturer's instructions. Run standards and samples at 100 μL/well in duplicate following the manufacturer's instructions.

[1234] The plates are read on the Synergy™ Mx plate reader at an absorbance of 450 nm. The average of the duplicate readings for each standard, control and sample is generated after subtracting the average of the 0 μg/mL standard absorbance in Excel. A standard curve is used generated by plotting the average absorbance for each standard and unknown samples concentrations are calculated on GraphPad Prism 6 using a non-linear regression using a 4 parameter logistic equation after transforming the standard x=log(x). Statistical test of data is conducted using GraphPad Prism 6 software.

[1235] Quantitative PCR for the detection of myosin heavy chain 2 and 4. Total RNA is extracted from soleus muscle using Quick-RNA kit (Zymo Research, Irvine, Calif.). cDNA is synthesized from total RNA using high capacity cDNA archive kit (Applied Biosystems, Forster City, Calif.). Primer sequences and quantitative PCR protocol of myosin heavy chain 2 and 4 are described as herein (Iresjo & Lundholm, 2012, Journal of translational medicine: 10: 238). Quantitative PCR is performed using a C1000 thermal cycler (Bio-Rad, Forster City, Calif.). Relative mRNA expression levels are calculated by normalization to endogenous genes beta-actin and HPRT. Statistical test of data is conducted using GraphPad Prism 6 software.

### Example 48: Selection and Formulation of Nutritive Polypeptides for Cancer Therapy

[1236] Cancer and tumor cells have a disproportionate requirement for certain amino acids than non-cancer cells (Galluzzi, Kepp, Vander Heiden, & Kroemer, 2013, Nature reviews. Drug discovery: 12: 829-46). For example, serine and glycine play essential roles in mammalian metabolism including protein synthesis, de novo synthesis of nucleotides, methylation of DNA and polyamine synthesis (J. W. Locasale, 2013, Nature reviews. Cancer: 13: 572-83). Certain tumor cells exhibit dependence on serine and glycine for survival and proliferation, due to amplification, deletions, polymorphisms or alterations in expression of genes in the serine and glycine metabolic pathways, while normal cells are less sensitive to starvation of serine and glycine (J. Locasale & Cantley, 2011, Cell Cycle: 10: 3812-3813)(Labuschagne, van den Broek, Mackay, Vousden, & Maddocks, 2014, Cell reports: 7: 1248-58)(Zhang et al., 2012, Cell: 148: 259-72). Certain tumor cells exhibit dependence on methionine for survival and proliferation, due to deletions, polymorphisms or alterations in expression of genes in the methionine de novo and salvage pathways (Cavuoto & Fenech, 2012, Cancer treatment reviews: 38: 726-36), while normal cells are not sensitive to methionine starvation (Kreis & Goodenow, 1978, Cancer Res: 38: 2259-2262). Certain tumor cells exhibit dependence on arginine due to deficient utilization of citrulline or arginosuccinate (Currie and Basham 1978)(Wheatley & Campbell, 2003, British journal of cancer: 89: 573-6). Certain tumor cells exhibit dependence on glutamine for survival and proliferation, due to upregulation of glutaminases (Hensley, 2013a, Journal of Clinical Investigation: 123: 3678-3684)(Hensley, 2013b, Journal of Clinical Investigation: 123: 3678-3684)(Yang et al., 2014, Molecular systems biology: 10: 728). Therefore, restriction of serine, glycine, methionine, arginine, and glutamine within a protein diet can limit tumor cell growth.

[1237] Selective inhibition of the proliferation of serine and glycine dependent cancer cells has been demonstrated using media deficient in serine and glycine (Maddocks et al., 2013, Nature: 493: 542-6), and animal studies utilizing a serine and glycine restricted diet show inhibition of cancer growth and extension of life-span (Labuschagne et al., 2014, Cell reports: 7: 1248-58). Selective killing of methionine dependent cancer cells in co-culture with normal cells has been demonstrated using media deficient in methionine, and animal studies utilizing a methionine restricted diet show inhibition of cancer growth and extension of life-span (Cavuoto & Fenech, 2012, Cancer treatment reviews: 38: 726-36). Moreover, homocysteine supplementation selectively rescues normal cells from the toxicity of methionine starvation while tumor cells fail to utilize homocysteine and strictly rely on methionine (Kreis & Goodenow, 1978, Cancer Res: 38: 2259-2262). Glutamine is a key mitochondrial substrate required for TCA cycle, and several approaches have been taken to target glutamine dependence of cancers in clinical trials (Wise & Thompson, 2010, Trends in Biochemical Sciences: 35: 427-433). One of the approaches is glutamine depletion by the use of L-asparaginase which degrades both asparagine and glutamine (Avramis & Panosyan, 2005, Clinical Pharmacokinetics: 44: 367-393). Arginine deprivation by arginase or arginine deaminase shows promising anti-cancer effects in clinical trials (Phillips, Sheaff, & Szlosarek, 2013, Cancer Res Treat: 45: 251-262).

### Example 49: In Vitro Screening of Cancer Cells for Amino Acid Dependence and Auxotrophy

[1238] To evaluate the dependence of cancer cells on amino acids, a chemically defined cell culture media deficient in one or more amino acids is used and cell growth and death is monitored (Hensley, 2013b, Journal of Clinical Investigation: 123: 3678-3684)(Zhang et al., 2012, Cell: 148: 259-72)(Maddocks et al., 2013, Nature: 493: 542-6). In one experiment, an individual NCI60 human tumor cell line selected from Table E40A is plated (2,000/96-well) for 24-72 hours in culture media deficient in one or more amino acid. A comparable, noncancerous cell line is used as a control. Effects of the defined media on cancer and control cell health are analyzed by cell proliferation (numbers), nucleotide incorporation, and cell death (TUNEL and annexin V assays) (Hensley, 2013b, Journal of Clinical Investigation: 123: 3678-3684)(Zhang et al., 2012, Cell: 148: 259-72)(Maddocks et al., 2013, Nature: 493: 542-6).

TABLE E44A
NCI-60 Human Cancer Cell Lines

| | |
|---|---|
| LUNG | NCI-H23, NCI-H522, A549-ATCC, EKVX, |
| | NCI-H226, NCI-H332M, H460, H0P62, HOP92 |
| COLON | HT29, HCC-2998, HCT116, SW620, |
| | COLO205, HCT15, KM12 |
| BREAST | MCF7, MCF7ADRr, MDAMB231, HS578T, |
| | MDAMB435, MDN, BT549, T47D |
| OVARIAN | OVCAR3, OVCAR4, OVCAR5, OVCAR8, |
| | IGROV1, SKOV3 |
| LEUKEMIA | CCRFCEM, K562, MOLT4, HL60, |
| | RPM18266, SR |
| RENAL | UO31, SN12C, A498, CAKI1, RXF393, 7860, |
| | ACHN, TK10 |
| MELANOMA | LOXIMVI, MALME3M, SKMEL2, SKMEL5, |
| | SKMEL28, M14, UACC62, UACC257 |
| PROSTATE | PC3, DU145 |
| CNS | SNB19, SNB75, U251, SF268, SF295, 5M539 |

[1239] In another experiment, a media comprising an amino acid blend with molar amino acid ratios equivalent to that found in a nutritive polypeptide (with or without basal plasma amino acid supplementation to account for background amino acid levels), is used in combination with one of the cell lines in Table E40A to assess the efficacy of a nutritive polypeptide derived amino acid blend. In another experiment, a media comprising a nutritive polypeptide that has undergone in vitro digestion as described herein (with or without basal plasma amino acid supplementation to account for background amino acid levels), is used. In another experiment, a media comprising the nutritive polypeptide with or without basal plasma amino acid supplementation to account for background amino acid levels is used.

[1240] Effects of polypeptides on cancer stem cells (or tumor initiating cells) are also determined in vitro. Cancer stem cells are a subset of cancer cells which are resistant to anticancer therapies and responsible for drug resistance, recurrence, invasion, tumorigenesis, and metastasis (Chaffer & Weinberg, 2011, Science (New York, N.Y.): 331: 1559-1564). Cancer stem cells are capable of in vitro anchorage-independent growth. To characterize the amino acid dependence of cancer stem cells, cancer cells are grown in monolayer adherent culture in chemically defined cell culture media as described above for 3 days. Cancer stem cell frequency in the bulk of cancer cells derived from the culture media is determined by plating the treated cells into anchorage-independent culture in vitro. The culture plate for anchorage-independent culture is sealed with complete culture media containing 1% agar, overlaid by single cells suspended in complete culture media containing 0.4% agar for 21-35 days, depending on cell types. Cells are fed weekly with complete culture media containing 0.3% agar. Cell colonies in anchorage-independent culture are stained with p-iodonitrotetrazolium violet (0.2%), and numbers of cell colonies are counted.

[1241] Formula to calculate cancer stem cell frequency is:

$$Cancer stem cell frequency ( \% ) = \frac{Number of colonies in anchorage independent culture}{Total cell numbers plated in anchorage independent culture}$$

[1242] Low cancer stem cell frequency relative to a control grown in complete amino acid medium indicate a sensitivity towards the amino acid depleted in the supplied medium. These data are also compared to primary non-cancerous cell lines of the same cell or tissue type to determine the sensitivity of non-cancerous cell to an amino acid milieu lacking a particular amino acid.

[1243] Representative nutritive polypeptides from the protein database of edible species selected for solubility, aggregation resistance, and ease of expression as described herein that are also deficient in serine, glycine, methionine, arginine, glutamine, and other amino acids required to support cancer cell survival and proliferation, and prevent cell apoptosis, autophagy, death, and necrosis are provided in tables Table E44B, Table E44C, Table E44D, Table E44E, Table E44F, and Table E44G.

TABLE E44B

| [[SEQID]] | | | |
|---|---|---|---|
| SEQ ID NO: | EAAc | EAA | S |
| [[SEQID]] | 1 | 0.35 | 0.00 |
| SEQ ID NO:-03455 | | | |
| [[SEQID]] | 1 | 0.41 | 0.01 |
| SEQ ID NO:-03508 | | | |
| [[SEQID]] | 1 | 0.45 | 0.01 |
| SEQ ID NO:-03612 | | | |
| [[SEQID]] | 1 | 0.38 | 0.01 |
| SEQ ID NO:-03569 | | | |
| [[SEQID]] | 1 | 0.46 | 0.01 |
| SEQ ID NO:-03521 | | | |
| [[SEQID]] | 1 | 0.39 | 0.01 |
| SEQ ID NO:-03524 | | | |
| [[SEQID]] | 1 | 0.46 | 0.01 |
| SEQ ID NO:-03533 | | | |
| [[SEQID]] | 1 | 0.56 | 0.01 |
| SEQ ID NO:-03588 | | | |
| [[SEQID]] | 1 | 0.37 | 0.01 |
| SEQ ID NO:-03527 | | | |
| [[SEQID]] | 1 | 0.47 | 0.01 |
| SEQ ID NO:-03625 | | | |

TABLE E44C

| [[SEQID]] | | | |
|---|---|---|---|
| SEQ ID NO: | EAAc | EAA | G |
| [[SEQID]] | 1 | 0.41 | 0.00 |
| SEQ ID NO:-03437 | | | |
| [[SEQID]] | 1 | 0.50 | 0.00 |
| SEQ ID NO:-03505 | | | |
| [[SEQID]] | 1 | 0.51 | 0.00 |
| SEQ ID NO:-03510 | | | |
| [[SEQID]] | 1 | 0.44 | 0.00 |
| SEQ ID NO:-03549 | | | |
| [[SEQID]] | 1 | 0.63 | 0.00 |
| SEQ ID NO:-03492 | | | |
| [[SEQID]] | 1 | 0.45 | 0.00 |
| SEQ ID NO:-03482 | | | |
| [[SEQID]] | 1 | 0.49 | 0.00 |
| SEQ ID NO:-03546 | | | |
| [[SEQID]] | 1 | 0.52 | 0.00 |
| SEQ ID NO:-03488 | | | |
| [[SEQID]] | 1 | 0.50 | 0.00 |
| SEQ ID NO:-03507 | | | |
| [[SEQID]] | 1 | 0.51 | 0.00 |
| SEQ ID NO:-03506 | | | |

TABLE E44D

| [[SEQID]] | | | | |
|---|---|---|---|---|
| SEQ ID NO: | EAAc | EAA | G | S |
| [[SEQID]] | 1 | 0.67 | 0.12 | 0.06 |
| SEQ ID NO:-03899 | | | | |
| [[SEQID]] | 1 | 0.60 | 0.11 | 0.06 |
| SEQ ID NO:-03897 | | | | |
| [[SEQID]] | 1 | 0.59 | 0.10 | 0.05 |
| SEQ ID NO:-03898 | | | | |
| [[SEQID]] | 1 | 0.58 | 0.11 | 0.06 |
| SEQ ID NO:-03896 | | | | |
| [[SEQID]] | 1 | 0.57 | 0.07 | 0.03 |
| SEQ ID NO:-03892 | | | | |
| [[SEQID]] | 1 | 0.57 | 0.13 | 0.03 |
| SEQ ID NO:-03891 | | | | |
| [[SEQID]] | 1 | 0.57 | 0.11 | 0.05 |
| SEQ ID NO:-03895 | | | | |
| [[SEQID]] | 1 | 0.57 | 0.05 | 0.03 |
| SEQ ID NO:-03900 | | | | |
| [[SEQID]] | 1 | 0.56 | 0.10 | 0.02 |
| SEQ ID NO:-03894 | | | | |
| [[SEQID]] | 1 | 0.56 | 0.08 | 0.03 |
| SEQ ID NO:-03893 | | | | |

TABLE E44E

| [[SEQID]]SEQ ID NO: | EAAc | EAA | Q |
|---|---|---|---|
| [[SEQID]]SEQ ID NO: | 1 | 0.65 | 0.00 |
| −03636 | | | |
| [[SEQID]]SEQ ID NO: | 1 | 0.62 | 0.00 |
| −03468 | | | |
| [[SEQID]]SEQ ID NO: | 1 | 0.62 | 0.00 |
| −03484 | | | |
| [[SEQID]]SEQ ID NO: | 1 | 0.59 | 0.00 |
| −03570 | | | |
| [[SEQID]]SEQ ID NO: | 1 | 0.58 | 0.00 |
| −03422 | | | |
| [[SEQID]]SEQ ID NO: | 1 | 0.58 | 0.00 |
| −03432 | | | |
| [[SEQID]]SEQ ID NO: | 1 | 0.58 | 0.00 |
| −03590 | | | |
| [[SEQID]]SEQ ID NO: | 1 | 0.58 | 0.00 |
| −03515 | | | |
| [[SEQID]]SEQ ID NO: | 1 | 0.58 | 0.00 |
| −03416 | | | |
| [[SEQID]]SEQ ID NO: | 1 | 0.57 | 0.00 |
| −03577 | | | |

TABLE E44F

| [[SEQID]]SEQ ID | | | |
|---|---|---|---|
| NO: | EAAc | EAA | M |
| [[SEQID]]SEQ ID | 1 | 0.54 | 0.01 |
| NO: −03497 | | | |
| [[SEQID]]SEQ ID | 1 | 0.53 | 0.01 |
| NO: −03461 | | | |
| [[SEQID]]SEQ ID | 1 | 0.52 | 0.01 |
| NO: −03592 | | | |
| [[SEQID]]SEQ ID | 1 | 0.52 | 0.01 |
| NO: −00489 | | | |
| [[SEQID]]SEQ ID | 1 | 0.52 | 0.01 |
| NO: −03481 | | | |
| [[SEQID]]SEQ ID | 1 | 0.51 | 0.01 |
| NO: −03426 | | | |
| [[SEQID]]SEQ ID | 1 | 0.51 | 0.01 |
| NO: −03608 | | | |
| [[SEQID]]SEQ ID | 1 | 0.51 | 0.00 |
| NO: −01546 | | | |
| [[SEQID]]SEQ ID | 1 | 0.51 | 0.01 |
| NO: −03602 | | | |
| [[SEQID]]SEQ ID | 1 | 0.51 | 0.00 |
| NO: −03539 | | | |

TABLE E44G

| [[SEQID]]SEQ ID | | | |
|---|---|---|---|
| NO: | EAAc | EAA | R |
| [[SEQID]]SEQ ID | 1 | 0.37 | 0.00 |
| NO: −03534 | | | |
| [[SEQID]]SEQ ID | 1 | 0.37 | 0.00 |
| NO: −03438 | | | |
| [[SEQID]]SEQ ID | 1 | 0.42 | 0.00 |
| NO: −03640 | | | |
| [[SEQID]]SEQ ID | 1 | 0.52 | 0.01 |
| NO: −03600 | | | |
| [[SEQID]]SEQ ID | 1 | 0.54 | 0.01 |
| NO: −03490 | | | |
| [[SEQID]]SEQ ID | 1 | 0.48 | 0.01 |
| NO: −03500 | | | |
| [[SEQID]]SEQ ID | 1 | 0.53 | 0.01 |
| NO: −03516 | | | |
| [[SEQID]]SEQ ID | 1 | 0.54 | 0.01 |
| NO: −03628 | | | |
| [[SEQID]]SEQ ID | 1 | 0.42 | 0.01 |
| NO: −03633 | | | |
| [[SEQID]]SEQ ID | 1 | 0.57 | 0.01 |
| NO: −03436 | | | |

[1244] Representative nutritive polypeptides that have been expressed that are similarly deficient in the amino acids outlined above are shown in tables Table E44H, Table E44I, Table E44J, Table E44K, Table E44L, and Table E44M.

TABLE E44H

| [[SEQID]]SEQ ID NO: | EAAc | EAA | S |
|---|---|---|---|
| [[SEQID]]SEQ ID NO: | 1 | 0.50 | 0.00 |
| −00112 | | | |
| [[SEQID]]SEQ ID NO: | 1 | 0.48 | 0.01 |
| −00211 | | | |
| [[SEQID]]SEQ ID NO: | 1 | 0.39 | 0.01 |
| −00648 | | | |
| [[SEQID]]SEQ ID NO: | 1 | 0.52 | 0.01 |
| −00488 | | | |
| [[SEQID]]SEQ ID NO: | 1 | 0.32 | 0.01 |
| −00084 | | | |
| [[SEQID]]SEQ ID NO: | 1 | 0.56 | 0.01 |
| −00142 | | | |
| [[SEQID]]SEQ ID NO: | 1 | 0.49 | 0.01 |
| −00155 | | | |
| [[SEQID]]SEQ ID NO: | 1 | 0.58 | 0.01 |
| −00141 | | | |
| [[SEQID]]SEQ ID NO: | 1 | 0.46 | 0.02 |
| −00337 | | | |
| [[SEQID]]SEQ ID NO: | 1 | 0.49 | 0.02 |
| −00330 | | | |

TABLE E441

| [[SEQID]]SEQ | | | |
|---|---|---|---|
| ID NO: | EAAc | EAA | G |
| [[SEQID]]SEQ | 1 | 0.52 | 0.00 |
| ID NO: −00113 | | | |
| [[SEQID]]SEQ | 1 | 0.46 | 0.00 |
| ID NO: −00800 | | | |
| [[SEQID]]SEQ | 1 | 0.47 | 0.00 |
| ID NO: −00780 | | | |
| [[SEQID]]SEQ | 1 | 0.48 | 0.00 |
| ID NO: −00211 | | | |
| [[SEQID]]SEQ | 1 | 0.67 | 0.00 |
| ID NO: −00150 | | | |
| [[SEQID]]SEQ | 1 | 0.41 | 0.01 |
| ID NO: −00809 | | | |
| [[SEQID]]SEQ | 1 | 0.42 | 0.01 |
| ID NO: −00505 | | | |
| [[SEQID]]SEQ | 1 | 0.48 | 0.01 |
| ID NO: −03696 | | | |
| [[SEQID]]SEQ | 1 | 0.50 | 0.01 |
| ID NO: −00112 | | | |
| [[SEQID]]SEQ | 1 | 0.42 | 0.01 |
| ID NO: −03445 | | | |

TABLE E44J

| [[SEQID]]SEQ | | | | |
|---|---|---|---|---|
| ID NO: | EAAc | EAA | G | S |
| [[SEQID]]SEQ | 1 | 0.50 | 0.01 | 0.00 |
| ID NO: −00112 | | | | |
| [[SEQID]]SEQ | 1 | 0.48 | 0.00 | 0.01 |
| ID NO: −00211 | | | | |
| [[SEQID]]SEQ | 1 | 0.52 | 0.00 | 0.02 |
| ID NO: −00113 | | | | |
| [[SEQID]]SEQ | 1 | 0.58 | 0.02 | 0.01 |
| ID NO: −00141 | | | | |
| [[SEQID]]SEQ | 1 | 0.67 | 0.00 | 0.03 |
| ID NO: −00150 | | | | |
| [[SEQID]]SEQ | 1 | 0.52 | 0.01 | 0.02 |
| ID NO: −00117 | | | | |
| [[SEQID]]SEQ | 1 | 0.48 | 0.01 | 0.02 |
| ID NO: −00151 | | | | |
| [[SEQID]]SEQ | 1 | 0.56 | 0.03 | 0.01 |
| ID NO: −00142 | | | | |
| [[SEQID]]SEQ | 1 | 0.48 | 0.01 | 0.04 |
| ID NO: −03696 | | | | |
| [[SEQID]]SEQ | 1 | 0.50 | 0.02 | 0.03 |
| ID NO: −00131 | | | | |

TABLE E44K

| [[SEQID]]SEQ | | | |
|---|---|---|---|
| ID NO: | EAAc | EAA | Q |
| [[SEQID]]SEQ | 1 | 0.39 | 0.00 |
| ID NO: −00648 | | | |
| [[SEQID]]SEQ | 1 | 0.65 | 0.00 |
| ID NO: −00143 | | | |
| [[SEQID]]SEQ | 1 | 0.49 | 0.00 |
| ID NO: −00598 | | | |
| [[SEQID]]SEQ | 1 | 0.38 | 0.00 |
| ID NO: −00554 | | | |
| [[SEQID]]SEQ | 1 | 0.50 | 0.00 |
| ID NO: −00563 | | | |
| [[SEQID]]SEQ | 1 | 0.46 | 0.00 |
| ID NO: −00485 | | | |
| [[SEQID]]SEQ | 1 | 0.48 | 0.01 |
| ID NO: −00627 | | | |
| [[SEQID]]SEQ | 1 | 0.42 | 0.01 |
| ID NO: −02703 | | | |
| [[SEQID]]SEQ | 1 | 0.67 | 0.01 |
| ID NO: −00150 | | | |
| [[SEQID]]SEQ | 1 | 0.47 | 0.01 |
| ID NO: −03872 | | | |

TABLE E44L

| [[SEQID]]SEQ ID NO: | EAAc | EAA | M |
|---|---|---|---|
| [[SEQID]]SEQ ID NO: −03649 | 1 | 0.49 | 0.00 |
| [[SEQID]]SEQ ID NO: −01546 | 1 | 0.51 | 0.00 |
| [[SEQID]]SEQ ID NO: −03768 | 1 | 0.42 | 0.00 |
| [[SEQID]]SEQ ID NO: −03051 | 1 | 0.48 | 0.00 |
| [[SEQID]]SEQ ID NO: −03297 | 1 | 0.62 | 0.00 |
| [[SEQID]]SEQ ID NO: −01388 | 1 | 0.36 | 0.00 |
| [[SEQID]]SEQ ID NO: −03730 | 1 | 0.45 | 0.00 |
| [[SEQID]]SEQ ID NO: −00340 | 1 | 0.41 | 0.00 |
| [[SEQID]]SEQ ID NO: −00484 | 1 | 0.38 | 0.00 |
| [[SEQID]]SEQ ID NO: −03447 | 1 | 0.30 | 0.00 |

TABLE E44M

| [[SEQID]]SEQ | | | |
|---|---|---|---|
| ID NO: | EAAc | EAA | R |
| [[SEQID]]SEQ | 1 | 0.48 | 0.00 |
| ID NO: −00406 | | | |
| [[SEQID]]SEQ | 1 | 0.65 | 0.00 |
| ID NO: −00143 | | | |
| [[SEQID]]SEQ | 1 | 0.70 | 0.00 |
| ID NO: −00140 | | | |
| [[SEQID]]SEQ | 1 | 0.67 | 0.00 |
| ID NO: −00146 | | | |
| [[SEQID]]SEQ | 1 | 0.59 | 0.00 |
| ID NO: −00548 | | | |
| [[SEQID]]SEQ | 1 | 0.52 | 0.00 |
| ID NO: −00117 | | | |
| [[SEQID]]SEQ | 1 | 0.67 | 0.00 |
| ID NO: −00150 | | | |
| [[SEQID]]SEQ | 1 | 0.50 | 0.00 |
| ID NO: −00112 | | | |
| [[SEQID]]SEQ | 1 | 0.51 | 0.01 |
| ID NO: −01625 | | | |
| [[SEQID]]SEQ | 1 | 0.52 | 0.01 |
| ID NO: −03691 | | | |

### Example 50: Improved Therapy for Cancer Through Nutritive Polypeptide Co-Administration with a Chemotherapeutic Regiment

[1245] Provided are chemotherapeutic treatments for cancer and other oncological diseases in combination with administration of nutritive polypeptides. In particular, a nutritive polypeptide having no or low levels of serine, glycine, methionine, arginine, glutamine, and/or other amino acids are provided to human subjects undergoing chemotherapeutic treatments. These formulations containing nutritive polypeptides provide essential amino acids necessary for normal metabolic support while selectively limiting serine, glycine, methionine, glutamine, arginine, and/or any other amino acids selectively required by the tumor.

[1246] In vitro efficacy of co-administration of nutritive polypeptides and chemotherapeutic regimens are determined in NCI-60 human tumor cell lines as described herein. A comparable, noncancerous cell line is used as a control. Examples of agents used in such chemotherapeutic regimens include 5-fluorouracil, cyclophosphamide, doxorubicin, cisplatin, and methotrexate. Cancer cells are plated in plates (2,000/96-well) for 24 hours in chemically defined cell culture media comprising elemental amino acids, nutritive polypeptide derived amino acid blends, in vitro digested nutritive polypeptides, or untreated nutritive polypeptides. Chemotherapeutic regiments are then added into cells. Efficacies of co-administration of the polypeptide and chemotherapeutic regiments on suppression of cell proliferation and induction of cell death relative to controls are determined by number of cells, nucleotide incorporation, and cell death (TUNEL and annexin V assays). Such co-administration of a nutritive polypeptide with chemotherapy provides improved therapy of cancer including reduced cell growth and increased cell death when compared to chemotherapy alone by depleting the amino acids required for survival of cancer cells.

### Example 51: Suppression of Cancer in Pre-Clinical Animal Models with Nutritive Polypeptides

[1247] Tumors that exhibit dependence on serine, glycine, methionine, glutamine, arginine, and/or any other amino acids for survival demonstrate in vivo dependence on these specific amino acids (Zhang et al., 2012, Cell: 148: 259-72)(Maddocks et al., 2013, Nature: 493: 542-6)(Gross et al., 2014, Molecular cancer therapeutics: 13: 890-901). To evaluate this effect in vivo, a specific amino acid-deficient nutritive polypeptide is mixed into animal test diet or water. Human cancer cells are injected into immunocompromised mice (Table E46A), by re-suspending in 100 μl PBS buffer and injecting into the designated location. Immediately following cancer cell injection, mice are randomly placed either on control or test diet or water supplemented with the nutritive polypeptide. Survival and longevity of tumor-bearing mice are recorded. Tumor growth (volume) is measured over time. Cell proliferation (Ki67 and BrdU labeling) and apoptosis (TUNEL assay) are quantified in the tumors.

TABLE E46A
Human cancer xenograft

| Cells | HCT116 | MDA-MB-231 |
|---|---|---|
| Origin | colon | breast |
| p53 | WT | Mut |
| Host | CD1-Nude | NOD-SCID |
| Gender | Female | Female |
| Route | s.c. | mammary fat pad |
| Injected cell # | 3 × 10\hat{ }6 | 2.5 × 10\hat{ }6 |

### Example 52: Improved Therapy for Cancer Through Co-Administration with a Chemotherapeutic Regiment in Pre-Clinical Animal Models

[1248] Efficacy of co-administration of nutritive polypeptides and chemotherapeutic regimens are determined in human cancer xenograft in immunocompromised mice. Human cancer cells are injected into immunocompromised mice as described herein. Immediately following cancer cell injection, mice are randomly placed either on control or test diet or water supplemented with a nutritive polypeptide deficient in serine, glycine, glutamine, arginine, methionine and/or any other amino acids. Chemotherapeutic regimens are injected daily into tumor-bearing animals. Survival and longevity of tumor-bearing mice are recorded. Tumor growth (volume) is measured over time. Cell proliferation (Ki67 and BrdU labeling) and apoptosis (TUNEL assay) are quantified in the tumors. Examples of agents used in such chemotherapeutic regimens include 5-fluorouracil, cyclophosphamide, doxorubicin, cisplatin, and methotrexate. Such co-administration of a nutritive polypeptide with chemotherapy provides benefits including reduced tumor growth and increased cell death when compared to chemotherapy or nutritive polypeptide administration alone.

### Example 53: Improved Therapy for Cancer in Humans with Nutritive Polypeptides

[1249] Provided are chemotherapeutic treatments for cancer and other oncological diseases in combination with administration of nutritive polypeptides described herein. In humans with cancers of the breast, prostate, lung, melanoma, CNS, leukemia, ovarian, or gastrointestinal tract, for example, a formulation of a nutritive polypeptide at a daily dose of 10-30 grams is administered orally to patients, concomitantly with a chemotherapeutic regimen. Provided nutritive polypeptides are the major/only dietary sources of amino acids of treated human subjects. Examples of agents used in such chemotherapeutic regimens include 5-fluorouracil, cyclophosphamide, doxorubicin, cisplatin, and methotrexate. Such co-administration of a nutritive polypeptide deficient in serine, glycine, glutamine, methionine, arginine, and other amino acids with chemotherapy provides benefits including improved tumor-free patient survival when compared to chemotherapy alone, by supporting life functions necessary for survival and tumor clearance.

[1250] In particular, provided are nutritive polypeptides deficient in serine and glycine. Provided nutritive polypeptides with serine and glycine deficiency are co-administered at a daily dose of 10-30 grams as the major dietary source of amino acids with chemotherapeutic regimens to human subjects as the described herein. Co-administration of provided nutritive polypeptides with serine and glycine deficiency and chemotherapeutic regimens has additive/synergistic therapeutic efficacies.

[1251] In an additional particular embodiment, provided are nutritive polypeptides deficient in methionine. Provided nutritive polypeptides with methionine deficiency are co-administered at a daily dose of 10-30 grams as the major dietary source of amino acids with chemotherapeutic regimens to human subjects as the described herein. In conjunction, dietary homocysteinse is supplemented at a daily dose of 1 gram to rescue normal cells from the toxicity of methionine deficiency in selected patients whose tumors have stringent dependence on methionine (Kreis & Goodenow, 1978, Cancer Res: 38: 2259-2262). Co-administration of provided nutritive polypeptides with methionine deficiency and chemotherapeutic regimens has additive/synergistic therapeutic efficacies.

[1252] In particular, provided are nutritive polypeptides deficient in glutamine. Provided nutritive polypeptides with glutamine deficiency are co-administered at a daily dose of 10-30 grams as the major dietary source of amino acids with chemotherapeutic regimens to human subjects as the described herein. Co-administration of provided nutritive polypeptides with glutamine deficiency and chemotherapeutic regimens has additive/synergistic therapeutic efficacies.

[1253] In particular, provided are nutritive polypeptides deficient in arginine. Provided nutritive polypeptides with arginine deficiency are co-administered at a daily dose of 10-30 grams as the major dietary source of amino acids with chemotherapeutic regimens to human subjects as the described herein. In conjunction, dietary citrulline or arginosuccinate is supplemented at a daily dose of 1 gram to rescue normal cells from the toxicity of arginine deficiency in selected patients whose tumors have stringent dependence on arginine (Phillips et al., 2013, Cancer Res Treat: 45: 251-262). Co-administration of provided nutritive polypeptides with arginine deficiency and chemotherapeutic regimens has additive/synergistic therapeutic efficacies.

### Example 54: Improved Adverse Effects for Cancer Chemotherapy in Humans

[1254] Chemotherapy for cancer and other oncological diseases induces morbidity and side effects that can be directly life-threatening to the patient as well as limiting the ability to provide optimal dosing for tumor removal and cancer free survival (Evans et al., 2008, Clinical nutrition (Edinburgh, Scotland): 27: 793-9). These include anemia, appetite loss, fatigue, increased bruising, bleeding, and infection, nausea, vomiting, nerve damage, skeletal muscle mass loss, and muscle damage. In general, the cause of such morbidity and side effects is undesired damage to healthy cells due to the mechanism of each chemotherapeutic regimen. Such normal cells most commonly include blood-forming cells in the bone marrow; hair follicles, cells in the mouth, digestive tract, and reproductive system. Some chemotherapeutic regimens damage cells in the heart, kidneys, bladder, lungs, and nervous system as well. Providing nutritional support to normal cells has been shown to ameliorate some of these side effects in animals and people (Muscaritoli M, Costelli P, Aversa Z, Bonetto A, Baccino F M, 2008, Asia Pac J Clin Nutr: 17: 387-90), through supplementation of specific amino acids required to mitigate each mechanism while not interfering with anti-tumor effects of chemotherapy (Durham, Dillon, & Sheffield-Moore, 2009, Current opinion in clinical nutrition and metabolic care: 12: 72-7).

[1255] Provided are additional chemotherapeutic treatments for cancer and other oncological diseases in combination with administration of nutritive polypeptides selected to provide nutritional support to specifically ameliorate the morbidity and side effects of such chemotherapy.

[1256] In particular, provided are nutritive polypeptides having increased levels of leucine and other amino acids relative to other polypeptides, in particular polypeptides that are present in the food generally provided to human subjects undergoing chemotherapeutic treatments (Op den Kamp, Langen, Haegens, & Schols, 2009, Current opinion in clinical nutrition and metabolic care: 12: 611-6). Exemplary nutritive polypeptides that are essential amino acid complete with higher levels of leucine are provided in Table E49A and Table E49B, and were identified in the edible and expressed nutritive protein databases, respectively.

TABLE E49A

| [[SEQID]]SEQ ID | | | |
|---|---|---|---|
| NO: | EAAc | EAA | L |
| [[SEQID]]SEQ ID | 1 | 0.49 | 0.18 |
| NO: −03428 | | | |
| [[SEQID]]SEQ ID | 1 | 0.49 | 0.18 |
| NO: −03623 | | | |
| [[SEQID]]SEQ ID | 1 | 0.51 | 0.18 |
| NO: −03599 | | | |
| [[SEQID]]SEQ ID | 1 | 0.54 | 0.18 |
| NO: −03494 | | | |
| [[SEQID]]SEQ ID | 1 | 0.45 | 0.18 |
| NO: −03632 | | | |
| [[SEQID]]SEQ ID | 1 | 0.44 | 0.18 |
| NO: −03423 | | | |
| [[SEQID]]SEQ ID | 1 | 0.43 | 0.18 |
| NO: −03547 | | | |
| [[SEQID]]SEQ ID | 1 | 0.44 | 0.18 |
| NO: −03598 | | | |
| [[SEQID]]SEQ ID | 1 | 0.47 | 0.18 |
| NO: −03503 | | | |
| [[SEQID]]SEQ ID | 1 | 0.44 | 0.17 |
| NO: −03572 | | | |

TABLE E49B

| [[SEQID]]SEQ ID NO: | EAAc | EAA | L |
|---|---|---|---|
| [[SEQID]]SEQ ID NO: | 1 | 0.56 | 0.18 |
| −00142 | | | |
| [[SEQID]]SEQ ID NO: | 1 | 0.51 | 0.18 |
| −00083 | | | |
| [[SEQID]]SEQ ID NO: | 1 | 0.56 | 0.17 |
| −00645 | | | |
| [[SEQID]]SEQ ID NO: | 1 | 0.51 | 0.17 |
| −00153 | | | |
| [[SEQID]]SEQ ID NO: | 1 | 0.58 | 0.17 |
| −00490 | | | |
| [[SEQID]]SEQ ID NO: | 1 | 0.53 | 0.17 |
| −00128 | | | |
| [[SEQID]]SEQ ID NO: | 1 | 0.51 | 0.17 |
| −00145 | | | |
| [[SEQID]]SEQ ID NO: | 1 | 0.49 | 0.16 |
| −03446 | | | |
| [[SEQID]]SEQ ID NO: | 1 | 0.44 | 0.16 |
| −00512 | | | |
| [[SEQID]]SEQ ID NO: | 1 | 0.50 | 0.15 |
| −00003 | | | |

[1257] Formulations containing nutritive polypeptides provide essential metabolic support for life while selectively increasing leucine levels to ameliorate such side effects as cachexia, skeletal muscle mass loss, and peripheral neuropathy induced by chemotherapy. In humans with cancers of the breast, prostate, lung, melanoma, CNS, leukemia, ovarian, or gastrointestinal tract, for example, such a nutritive polypeptide at an initial dose of 10-30 grams is administered orally to patients, concomitantly with a chemotherapeutic regimen. Examples of agents used in such chemotherapeutic regimens include 5-fluorouracil, cyclophosphamide, doxorubicin, cisplatin, and methotrexate. Such co-administration of a nutritive polypeptide enriched in leucine with chemotherapy provides benefits including decreased incidence and severity of cachexia, skeletal muscle mass loss, and peripheral neuropathy compared to chemotherapy alone, by supporting life functions necessary for normal cell survival and function.

[1258] In an additional particular embodiment, provided are nutritive polypeptides having increased levels of branched-chain amino acids relative to other polypeptides, in particular polypeptides that are present in the food generally provided to human subjects undergoing chemotherapeutic treatments. Exemplary nutritive polypeptides that are essential amino acid complete with higher levels of branched-chain amino acids are provided in tables E49C and E49D, and were identified in the edible and expressed nutritive protein databases, respectively.

TABLE E49C

| [[SEQID]]SEQ ID | | | |
|---|---|---|---|
| NO: | EAAc | EAA | BCAA |
| [[SEQID]]SEQ ID | 1 | 0.49 | 0.29 |
| NO: −03542 | | | |
| [[SEQID]]SEQ ID | 1 | 0.49 | 0.29 |
| NO: −03623 | | | |
| [[SEQID]]SEQ ID | 1 | 0.52 | 0.28 |
| NO: −03618 | | | |
| [[SEQID]]SEQ ID | 1 | 0.52 | 0.28 |
| NO: −03491 | | | |
| [[SEQID]]SEQ ID | 1 | 0.51 | 0.28 |
| NO: −03559 | | | |
| [[SEQID]]SEQ ID | 1 | 0.47 | 0.28 |
| NO: −03503 | | | |
| [[SEQID]]SEQ ID | 1 | 0.53 | 0.28 |
| NO: −03528 | | | |
| [[SEQID]]SEQ ID | 1 | 0.54 | 0.28 |
| NO: −03620 | | | |
| [[SEQID]]SEQ ID | 1 | 0.54 | 0.28 |
| NO: −03535 | | | |
| [[SEQID]]SEQ ID | 1 | 0.49 | 0.28 |
| NO: −03529 | | | |

TABLE E49D

| [[SEQID]]SEQ ID | | | |
|---|---|---|---|
| ID NO: | EAAc | EAA | BCAA |
| [[SEQID]]SEQ | 1 | 0.68 | 0.36 |
| ID NO: −00561 | | | |
| [[SEQID]]SEQ | 1 | 0.58 | 0.34 |
| ID NO: −00490 | | | |
| [[SEQID]]SEQ | 1 | 0.51 | 0.33 |
| ID NO: −00145 | | | |
| [[SEQID]]SEQ | 1 | 0.70 | 0.32 |
| ID NO: −00140 | | | |
| [[SEQID]]SEQ | 1 | 0.57 | 0.32 |
| ID NO: −00494 | | | |
| [[SEQID]]SEQ | 1 | 0.58 | 0.31 |
| ID NO: −00141 | | | |
| [[SEQID]]SEQ | 1 | 0.50 | 0.30 |
| ID NO: −00620 | | | |
| [[SEQID]]SEQ | 1 | 0.65 | 0.30 |
| ID NO: −00143 | | | |
| [[SEQID]]SEQ | 1 | 0.59 | 0.30 |
| ID NO: −00287 | | | |
| [[SEQID]]SEQ | 1 | 0.48 | 0.29 |
| ID NO: −00541 | | | |

[1259] Formulations containing nutritive polypeptides provide essential metabolic support for life while selectively increasing branched-chain amino acids levels to ameliorate such side effects as cachexia and skeletal muscle mass loss induced by chemotherapy (Laviano et al., 2005, Current opinion in clinical nutrition and metabolic care: 8: 408-414). In humans with cancers of the breast, prostate, lung, melanoma, CNS, leukemia, ovarian, or gastrointestinal tract, for example, such a nutritive polypeptide at an initial dose of 10-30 grams is administered orally to patients, concomitantly with a chemotherapeutic regimen. Examples of agents used in such chemotherapeutic regimens include 5-fluorouracil, cyclophosphamide, doxorubicin, cisplatin, and methotrexate. Such co-administration of a nutritive polypeptide enriched in branched-chain amino acids with chemotherapy provides benefits including decreased incidence and severity of cachexia and skeletal muscle mass loss compared to chemotherapy alone, by supporting life functions necessary for normal cell survival and function.

[1260] In an additional particular embodiment, provided are nutritive polypeptides having increased levels of aspartate relative to other polypeptides, in particular polypeptides that are present in the food generally provided to human subjects undergoing chemotherapeutic treatments. Exemplary nutritive polypeptides that are essential amino acid complete with higher levels of aspartate are provided in table E49E and in table E49F, and were identified in the edible and expressed nutritive protein databases, respectively.

TABLE E49E

| [[SEQID]]SEQ ID | | | |
|---|---|---|---|
| NO: | EAAc | EAA | D |
| [[SEQID]]SEQ ID | 1 | 0.33 | 0.28 |
| NO: −03630 | | | |
| [[SEQID]]SEQ ID | 1 | 0.34 | 0.26 |
| NO: −03425 | | | |
| [[SEQID]]SEQ ID | 1 | 0.33 | 0.25 |
| NO: −03564 | | | |
| [[SEQID]]SEQ ID | 1 | 0.34 | 0.25 |
| NO: −03543 | | | |
| [[SEQID]]SEQ ID | 1 | 0.32 | 0.24 |
| NO: −03607 | | | |
| [[SEQID]]SEQ ID | 1 | 0.35 | 0.23 |
| NO: −03621 | | | |
| [[SEQID]]SEQ ID | 1 | 0.37 | 0.21 |
| NO: −03604 | | | |
| [[SEQID]]SEQ ID | 1 | 0.37 | 0.20 |
| NO: −03540 | | | |
| [[SEQID]]SEQ ID | 1 | 0.39 | 0.19 |
| NO: −03624 | | | |
| [[SEQID]]SEQ ID | 1 | 0.37 | 0.19 |
| NO: −03537 | | | |

TABLE E49F

| [[SEQID]]SEQ | | | |
|---|---|---|---|
| ID NO: | EAAc | EAA | D |
| [[SEQID]]SEQ | 1 | 0.38 | 0.16 |
| ID NO:-00484 | | | |
| [[SEQID]]SEQ | 1 | 0.44 | 0.14 |
| ID NO:-03883 | | | |
| [[SEQID]]SEQ | 1 | 0.38 | 0.13 |
| ID NO:-00496 | | | |
| [[SEQID]]SEQ | 1 | 0.25 | 0.13 |
| ID NO:-00515 | | | |
| [[SEQID]]SEQ | 1 | 0.42 | 0.13 |
| ID NO:-03758 | | | |
| [[SEQID]]SEQ | 1 | 0.32 | 0.12 |
| ID NO:-00084 | | | |
| [[SEQID]]SEQ | 1 | 0.45 | 0.12 |
| ID NO:-00870 | | | |
| [[SEQID]]SEQ | 1 | 0.40 | 0.12 |
| ID NO:-00877 | | | |
| [[SEQID]]SEQ | 1 | 0.40 | 0.11 |
| ID NO:-00667 | | | |
| [[SEQID]]SEQ | 1 | 0.45 | 0.11 |
| ID NO:-00642 | | | |

[1261] Formulations containing nutritive polypeptides provide essential metabolic support for life while selectively increasing aspartate levels to stimulate ureagenesis and remove excess ammonia caused by chemotherapy (Kleef & Scheller, 1999, Forschende Komplementärmedizin: 6: 216). In humans with cancers of the breast, prostate, lung, melanoma, CNS, leukemia, ovarian, or gastrointestinal tract, for example, such a nutritive polypeptide at an initial dose of 10-30 grams is administered orally to patients, concomitantly with a chemotherapeutic regimen. Examples of agents used in such chemotherapeutic regimens include 5-fluorouracil, cyclophosphamide, doxorubicin, cisplatin, and methotrexate. Such co-administration of a nutritive polypeptide enriched in aspartate with chemotherapy provides benefits including decreased incidence and severity of confusion, fatigue, and nausea compared to chemotherapy alone.

[1262] In an additional particular embodiment, provided are nutritive polypeptides having increased levels of glycine relative to other polypeptides, in particular polypeptides that are present in the food generally provided to human subjects undergoing chemotherapeutic treatments. Exemplary nutritive polypeptides that are essential amino acid complete with higher levels of glycine are provided in Table E49G and in Table E49H, and were identified in the edible and expressed nutritive protein databases, respectively.

TABLE E49G

| [[SEQID]]SEQ ID | | | |
|---|---|---|---|
| NO: | EAAc | EAA | G |
| [[SEQID]]SEQ ID | 1 | 0.42 | 0.09 |
| NO:-03591 | | | |
| [[SEQID]]SEQ ID | 1 | 0.41 | 0.08 |
| NO:-03474 | | | |
| [[SEQID]]SEQ ID | 1 | 0.44 | 0.08 |
| NO:-03558 | | | |
| [[SEQID]]SEQ ID | 1 | 0.50 | 0.08 |
| NO:-03429 | | | |
| [[SEQID]]SEQ ID | 1 | 0.38 | 0.08 |
| NO:-03522 | | | |
| [[SEQID]]SEQ ID | 1 | 0.35 | 0.08 |
| NO:-03622 | | | |
| [[SEQID]]SEQ ID | 1 | 0.39 | 0.08 |
| NO:-03525 | | | |
| [[SEQID]]SEQ ID | 1 | 0.39 | 0.08 |
| NO:-03458 | | | |
| [[SEQID]]SEQ ID | 1 | 0.36 | 0.08 |
| NO:-03420 | | | |
| [[SEQID]]SEQ ID | 1 | 0.35 | 0.08 |
| NO:-03610 | | | |

TABLE E49H

| [[SEQID]]SEQ | | | |
|---|---|---|---|
| ID NO: | EAAc | EAA | G |
| [[SEQID]]SEQ | 1 | 0.24 | 0.15 |
| ID NO:-03641 | | | |
| [[SEQID]]SEQ | 1 | 0.30 | 0.12 |
| ID NO:-03447 | | | |
| [[SEQID]]SEQ | 1 | 0.37 | 0.12 |
| ID NO:-03450 | | | |
| [[SEQID]]SEQ | 1 | 0.32 | 0.10 |
| ID NO:-00084 | | | |
| [[SEQID]]SEQ | 1 | 0.38 | 0.10 |
| ID NO:-03614 | | | |
| [[SEQID]]SEQ | 1 | 0.38 | 0.10 |
| ID NO:-03449 | | | |
| [[SEQID]]SEQ | 1 | 0.40 | 0.09 |
| ID NO:-00500 | | | |
| [[SEQID]]SEQ | 1 | 0.50 | 0.07 |
| ID NO:-02675 | | | |
| [[SEQID]]SEQ | 1 | 0.50 | 0.07 |
| ID NO:-00563 | | | |
| [[SEQID]]SEQ | 1 | 0.49 | 0.07 |
| ID NO:-03649 | | | |

[1263] Formulations containing nutritive polypeptides provide essential metabolic support for life while selectively increasing glycine levels to protect from hepatotoxicity following treatment with a chemotherapy regimen such as the one commonly referred to by the abbreviation FOLFOX (FOL—Folinic acid, F—Fluorouracil, OX—Oxaliplatin) (Wang et al., 2013, Amino acids: 45: 463-77). In humans with cancers of the colon, for example, such a nutritive polypeptide at an initial dose of 10-30 grams is administered orally to patients, concomitantly with a FOLFOX chemotherapeutic regimen. Such co-administration of a nutritive polypeptide enriched in glycine with chemotherapy provides benefits including decreased incidence and severity of hepatotoxicity compared to chemotherapy alone.

[1264] In an additional particular, provided are nutritive polypeptides having increased levels of lysine relative to other polypeptides, in particular polypeptides that are present in the food generally provided to human subjects undergoing chemotherapeutic treatments. Exemplary nutritive polypeptides that are essential amino acid complete with higher levels of lysine are provided in Table E49I and in Table E49J, and were identified in the edible and expressed nutritive protein databases, respectively.

TABLE E49I

| [[SEQID]]SEQ ID | | | |
|---|---|---|---|
| NO: | EAAc | EAA | K |
| [[SEQID]]SEQ ID | 1 | 0.50 | 0.27 |
| NO:-03530 | | | |
| [[SEQID]]SEQ ID | 1 | 0.51 | 0.25 |
| NO:-03615 | | | |
| [[SEQID]]SEQ ID | 1 | 0.50 | 0.24 |
| NO:-03489 | | | |
| [[SEQID]]SEQ ID | 1 | 0.53 | 0.23 |
| NO:-03511 | | | |
| [[SEQID]]SEQ ID | 1 | 0.53 | 0.23 |
| NO:-03431 | | | |
| [[SEQID]]SEQ ID | 1 | 0.41 | 0.23 |
| NO:-03501 | | | |
| [[SEQID]]SEQ ID | 1 | 0.62 | 0.23 |
| NO:-03544 | | | |
| [[SEQID]]SEQ ID | 1 | 0.40 | 0.23 |
| NO:-03502 | | | |
| [[SEQID]]SEQ ID | 1 | 0.49 | 0.23 |
| NO:-03480 | | | |
| [[SEQID]]SEQ ID | 1 | 0.51 | 0.23 |
| NO:-03496 | | | |

TABLE E49J

| [[SEQID]]SEQ | | | |
|---|---|---|---|
| ID NO: | EAAc | EAA | K |
| [[SEQID]]SEQ | 1 | 0.52 | 0.23 |
| ID NO:-03691 | | | |
| [[SEQID]]SEQ | 1 | 0.49 | 0.22 |
| ID NO:-00503 | | | |
| [[SEQID]]SEQ | 1 | 0.49 | 0.22 |
| ID NO:-00517 | | | |
| [[SEQID]]SEQ | 1 | 0.43 | 0.19 |
| ID NO:-00509 | | | |
| [[SEQID]]SEQ | 1 | 0.46 | 0.19 |
| ID NO:-00495 | | | |
| [[SEQID]]SEQ | 1 | 0.48 | 0.19 |
| ID NO:-03696 | | | |
| [[SEQID]]SEQ | 1 | 0.51 | 0.19 |
| ID NO:-01625 | | | |
| [[SEQID]]SEQ | 1 | 0.46 | 0.18 |
| ID NO:-00491 | | | |
| [[SEQID]]SEQ | 1 | 0.46 | 0.18 |
| ID NO:-00336 | | | |

[1265] Formulations containing nutritive polypeptides provide essential metabolic support for life while selectively increasing lysine levels to prevent oral mucositis following chemotherapy for cancers of the head and neck. In humans with cancers of the head and neck, for example, such a nutritive polypeptide at an initial dose of 10-30 grams is administered orally to patients, concomitantly with a chemotherapeutic regimen (Colella G, Cannavale R, Vicidomini A, Rinaldi G, Compilato D, 2010, Int J Immunopathol Pharmacol: 23: 143-51)(Blount, Wang, Lim, Sudarsan, & Breaker, 2007, Nature chemical biology: 3: 44-9). Such co-administration of a nutritive polypeptide enriched in lysine with chemotherapy provides benefits including decreased incidence and severity of oral mucositis compared to chemotherapy alone.

[1266] In an additional particular embodiment, provided are nutritive polypeptides having increased levels of histidine relative to other polypeptides, in particular polypeptides that are present in the food generally provided to human subjects undergoing chemotherapeutic treatments. Exemplary nutritive polypeptides that are essential amino acid complete with higher levels of histidine are provided in Table E49K and in Table E349L, and were identified in the edible and expressed nutritive protein databases, respectively.

TABLE E49K

| [[SEQID]]SEQ ID | | | |
|---|---|---|---|
| NO: | EAAc | EAA | H |
| [[SEQID]]SEQ ID | 1 | 0.62 | 0.15 |
| NO:-03468 | | | |
| [[SEQID]]SEQ ID | 1 | 0.43 | 0.12 |
| NO:-03637 | | | |
| [[SEQID]]SEQ ID | 1 | 0.42 | 0.12 |
| NO:-03638 | | | |
| [[SEQID]]SEQ ID | 1 | 0.52 | 0.11 |
| NO:-03464 | | | |
| [[SEQID]]SEQ ID | 1 | 0.59 | 0.10 |
| NO:-00298 | | | |
| [[SEQID]]SEQ ID | 1 | 0.59 | 0.10 |
| NO:-03526 | | | |
| [[SEQID]]SEQ ID | 1 | 0.58 | 0.10 |
| NO:-03518 | | | |
| [[SEQID]]SEQ ID | 1 | 0.41 | 0.10 |
| NO:-03474 | | | |
| [[SEQID]]SEQ ID | 1 | 0.60 | 0.10 |
| NO:-03483 | | | |
| [[SEQID]]SEQ ID | 1 | 0.56 | 0.10 |
| NO:-01489 | | | |

TABLE E49L

| [[SEQID]]SEQ | | | |
|---|---|---|---|
| ID NO: | EAAc | EAA | H |
| [[SEQID]]SEQ | 1 | 0.48 | 0.12 |
| ID NO:-01162 | | | |
| [[SEQID]]SEQ | 1 | 0.59 | 0.10 |
| ID NO:-00298 | | | |
| [[SEQID]]SEQ | 1 | 0.58 | 0.10 |
| ID NO:-00297 | | | |
| [[SEQID]]SEQ | 1 | 0.53 | 0.08 |
| ID NO:-00128 | | | |
| [[SEQID]]SEQ | 1 | 0.56 | 0.07 |
| ID NO:-00299 | | | |
| [[SEQID]]SEQ | 1 | 0.58 | 0.07 |
| ID NO:-00141 | | | |
| [[SEQID]]SEQ | 1 | 0.40 | 0.06 |
| ID NO:-03162 | | | |
| [[SEQID]]SEQ | 1 | 0.46 | 0.06 |
| ID NO:-03854 | | | |
| [[SEQID]]SEQ | 1 | 0.52 | 0.06 |
| ID NO:-00113 | | | |
| [[SEQID]]SEQ | 1 | 0.56 | 0.06 |
| ID NO:-00130 | | | |

[1267] Formulations containing nutritive polypeptides provide essential metabolic support for life while selectively increasing histidine levels to reduce hemorrhagic cystitis caused by chemotherapy (Farshid, Tamaddonfard, & Ranjbar, 2013, Indian journal of pharmacology: 45: 126-9). In humans with cancers of the breast, prostate, lung, melanoma, CNS, leukemia, ovarian, or gastrointestinal tract, for example, such a nutritive polypeptide at an initial dose of 10-30 grams is administered orally to patients, concomitantly with a chemotherapeutic regimen. Examples of agents used in such chemotherapeutic regimens include 5-fluorouracil, cyclophosphamide, doxorubicin, cisplatin, and methotrexate. Such co-administration of a nutritive polypeptide enriched in histidine with chemotherapy provides benefits including decreased incidence and severity of hemorrhagic cystitis compared to chemotherapy alone.

[1268] In an additional particular embodiment, provided are nutritive polypeptides having increased levels of arginine relative to other polypeptides, in particular polypeptides that are present in the food generally provided to human subjects undergoing chemotherapeutic treatments. Exemplary nutritive polypeptides that are essential amino acid complete with higher levels of arginine are provided in table E49M and in table E49N, and were identified in the edible and expressed nutritive protein databases, respectively.

TABLE E49M

| [[SEQID]]SEQ | | | |
|---|---|---|---|
| ID NO:s | EAAc | EAA | R |
| [[SEQID]]SEQ ID | 1 | 0.62 | 0.21 |
| NO:-03468 | | | |
| [[SEQID]]SEQ ID | 1 | 0.49 | 0.17 |
| NO:-03841 | | | |
| [[SEQID]]SEQ ID | 1 | 0.53 | 0.17 |
| NO:-03487 | | | |
| [[SEQID]]SEQ ID | 1 | 0.49 | 0.16 |
| NO:-03623 | | | |
| [[SEQID]]SEQ ID | 1 | 0.48 | 0.16 |
| NO:-03761 | | | |
| [[SEQID]]SEQ ID | 1 | 0.33 | 0.16 |
| NO:-03800 | | | |

TABLE E49N

| [[SEQID]]SEQ | | | |
|---|---|---|---|
| ID NO: | EAAc | EAA | R |
| [[SEQID]]SEQ | 1 | 0.42 | 0.22 |
| ID NO:-00567 | | | |
| [[SEQID]]SEQ | 1 | 0.47 | 0.22 |
| ID NO:-00636 | | | |
| [[SEQID]]SEQ | 1 | 0.42 | 0.22 |
| ID NO:-00637 | | | |
| [[SEQID]]SEQ | 1 | 0.42 | 0.21 |
| ID NO:-00492 | | | |
| [[SEQID]]SEQ | 1 | 0.45 | 0.20 |
| ID NO:-00328 | | | |

[1269] Formulations containing nutritive polypeptides provide essential metabolic support for life while selectively increasing arginine levels to postoperative infections in patients with burn and cancer caused by chemotherapy (Heyland D K, Cook D J, 1994, Crit Care Med: 22: 1192-202). In humans with cancers of the breast, prostate, lung, melanoma, CNS, leukemia, ovarian, or gastrointestinal tract, for example, such a nutritive polypeptide at an initial dose of 10-30 grams is administered orally to patients following surgery, concomitantly with a chemotherapeutic regimen. Examples of agents used in such chemotherapeutic regimens include 5-fluorouracil, cyclophosphamide, doxorubicin, cisplatin, and methotrexate. Such co-administration of a nutritive polypeptide enriched in histidine with chemotherapy provides benefits including decreased incidence of postoperational infection compared to chemotherapy alone.

### Example 55: Selection of Nutritive Polypeptides for Hepatic Diseases and Hepatocellular Carcinoma

[1270] Etiology of hepatocellular carcinoma (HCC), a disease with poor outcomes and limited therapeutic options, is multifactorial involving host genetic, viral (hepatitis B and C viruses (HBV and HVC, respectively)), nutritional (lipids, branched-chain amino acids, alcohol), an metabolic factors (diabetes mellitus (DM), metabolic syndrome) (Michelotti, Machado, & Diehl, 2013, Nature reviews. Gastroenterology & hepatology: 10: 656-65). Natural course of HCC progresses from liver inflammation, liver cirrhosis, and cancer. Among these causes of HCC, nutritional and metabolic factors play important roles in initiating and promoting progression of HCC. Non-alcoholic fatty liver disease (NAFLD) and non-alcoholic steatohepatitis (NASH) cause cirrhosis which can progress to HCC. As with other liver diseases that cause cirrhosis, such as HBV-, HCV-, alcohol-mediated cirrhosis, NAFLD further increases the risk of HCC (Michelotti et al., 2013, Nature reviews. Gastroenterology & hepatology: 10: 656-65). Furthermore, incidences of HCC and intrahepatic cholangiocarcinoma are also rising, and HCC is now the leading cause of obesity-related cancer deaths in middle-aged men in the USA (Michelotti et al., 2013, Nature reviews. Gastroenterology & hepatology: 10: 656-65). Dietary supplementation with branched-chain amino acids ameliorates cirrhosis and reduces HCC risk in animals (Cha et al., 2013, PLoS ONE: 8)(Terakura et al., 2012, Carcinogenesis: 33: 2499-2506) and humans (Yoshiji et al., 2013, Oncology Reports: 30: 545-552)(H. et al., 2013, Journal of Clinical Gastroenterology: 47: 359-366). Dietary supplementation with branched-chain amino acids decreases incidence of primary HCC and post-treatment recurrence of HCC (Yoshiji et al., 2013, Oncology Reports: 30: 545-552)(H. et al., 2013, Journal of Clinical Gastroenterology: 47: 359-366)(Ichikawa et al., 2012). Dietary supplementation with branched-chain amino acids decreases recurrent HCC in DM and insulin resistance (Yoshiji et al., 2013, Oncology Reports: 30: 545-552). Moreover, many patients with end-stage liver disease and cirrhosis are protein malnourished (Moriwaki et al., 2000, Journal of gastroenterology: 35 Suppl 1: 13-17). Supplementation with branched-chain amino acids alleviates chronic liver failure and hepatic encephalopathy (HE), improves the protein nutritional state, and subsequently prolongs survival (Moriwaki et al., 2000, Journal of gastroenterology: 35 Suppl 1: 13-17).

[1271] Provided are treatments for NAFLD, HASH, HBV- and HCV-mediated liver cirrhosis, end-stage liver disease, chronic liver failure, HE, and HCC with administration of nutritive polypeptides selected to provide nutritional support to specifically ameliorate the morbidity and mortality of these liver diseases.

[1272] In particular, nutritive polypeptides having increased levels of branched-chain amino acids and other amino acids relative to other polypeptides are provided to the STAM mouse model of HAFLD, HASH, and HCC (Fujii et al., 2013, Medical Molecular Morphology: 46: 141-152) (FIG. 1). STAM mice develop high fat diet-induced HAFLD, HASH, and HCC (Fujii et al., 2013, Medical Molecular Morphology: 46: 141-152). Exemplary nutritive polypeptides that are essential amino acid complete with higher levels of branched-chain amino acids are described herein.

### Example 56: Improvement of NAFLD, NASH and HCC in a Pre-Clinical Animal Model

[1273] Formulations of nutritive polypeptides mixed in mouse chow are provided to STAM mice starting at 6 weeks of age. Animals are euthanized at 9, 12, 15, and 18 weeks of age. Identical control groups are run using normal chow. Disease seventies of NAFLD, NASH, and HCC numbers are quantified by histological analysis within each treatment group and compared to control animals treated for the same amount of time.

### Example 57: Improvement of NAFLD, NASH and HCC in Humans

[1274] In an additional particular embodiment, nutritive polypeptides having increased levels of branched-chain amino acids are provided to human subjects with liver diseases such as NAFLD, HASH, HBV- and HCV-mediated liver cirrhosis, end-stage liver disease, chronic liver failure, HE, and HCC at an initial, oral dose of 10-30 grams (Yoshiji et al., 2013, Oncology Reports: 30: 545-552)(H. et al., 2013, Journal of Clinical Gastroenterology: 47: 359-366)(Ichikawa et al., 2012)(Moriwaki et al., 2000, Journal of gastroenterology: 35 Suppl 1: 13-17). Exemplary nutritive polypeptides with higher levels of branched-chain amino acids are described herein. Formulations containing nutritive polypeptides provide essential metabolic support for life while selectively increasing branched-chain amino acids levels.

### Example 58: In Vitro Assessment of Irisin Secretion and PGC-1a from C2C12 Myotubes

[1275] It has been shown that brown fat deposits in adult humans are composed of a combination of brown and beige adipocytes (Wu, Jun, et al. “Beige adipocytes are a distinct type of thermogenic fat cell in mouse and human.” Cell 150.2 (2012): 366-376). Brown fat generates heat via the mitochondrial uncoupling protein UCP1, defending against hypothermia and obesity. Beige adipocytes are white fat cells that switch into brown fat-like under specific stimulation (cold and exercise). The phenomenon of white fat “browning” is the process by which white adipose tissue depots acquire thermogenic, fat-burning properties, and is characterized by a significant increase in the gene expression of uncoupling protein UCP1. Initially, beige adipocytes have extremely low basal expression of UCP1, similar to white adipocytes, but they respond to cyclic AMP stimulation with high UCP1 expression and respiration rates, similar to brown adipocytes (Wu, Jun, et al. “Beige adipocytes are a distinct type of thermogenic fat cell in mouse and human.” Cell 150.2 (2012): 366-376). UCP1 is a transmembrane protein located in the inner membrane of the mitochondria that plays a major role in dissipating energy as heat instead of ATP. Restricted to brown or beige adipocytes, it provides a unique mechanism to generate heat by non-shivering thermogenesis. In vivo, prolonged cold exposure or exercises (adrenergic stimulation) turn on high levels of UCP1 expression. In vitro, cold treatment, electric pulses, beta3-adrenergic (epinephrine and norepinephrine) or retinoic acid, the active metabolite of vitamin A, stimulate UCP1 expression.

[1276] When muscles are contracting, PGC-1α (Peroxisome proliferator-activated receptor gamma coactivator 1-alpha), a transcriptional activator that regulates mitochondrial biogenesis and respiration, is activated. The increased levels of PGC-1α in muscle cells controls an extensive set of metabolic programs by binding to nuclear receptors and transcriptional factors. For example, PGC-1α induces the type I membrane protein FNDC5, which is cleaved to form the myokine hormone irisin. Once in circulation, irisin acts on WA and induces the expression of UCP1 and other brown adipose associated genes. Both irisin and α-aminoisobutyric acid (BAIBA), a metabolite of valine secreted from skeletal muscles, have been identified as agents involved in the conversion of white adipocytes (WA) into beige adipocytes (BeA), and both are expressed and released by skeletal muscle fibers during physical activity (Bostrom, Pontus, et al. “A PGC1-[agr]-dependent myokine that drives brown-fat-like development of white fat and thermogenesis.” Nature 481.7382 (2012): 463-468.; Roberts L. D. et al. B-Aminoisobutyric Acid Induces Browning of White Fat and Hepatic B-oxidation and Is Inversely Correlated with Cardiometabolic Risk Factors. Cell Metab. (2014) 19: 96-108). It has been shown that PGC1-α gene expression is induced after leucine treatment in C2C12 cells (Sun, Xiaocun, and Michael B. Zemel. “Leucine modulation of mitochondrial mass and oxygen consumption in skeletal muscle cells and adipocytes.” Nutr Metab (Lond) 6 (2009): 26.). Leucine enriched nutritive polypeptides are described herein.

[1277] Single amino acids, amino acid blends corresponding to the molar ratios found in nutritive polypeptides, nutritive polypeptide digests, and/or nutritive polypeptides are used to treat cultures of the murine myoblast cell line C2C12 described herein. Secreted irisin and/or BAIBA (β-aminoisobutyric acid) is measured in the supernatant and compared to other treatment groups as well as a basal amino acid mixture or vehicle to assess efficacy. BAIBA isolated from the supernatants of the treated cell culture is analyzed by LC-MS (liquid chromatography-mass spectrometry) and an ELISA assay is utilized to quantify Irisin secretion (AdipoGen; San Diego, Calif.).

[1278] The expression level of PGC-1α in treated C2C12 or rat skeletal muscle cells is quantified by mRNA extraction, subsequent cDNA synthesis and quantified using real-time PCR of PGC-1α and a constitutively expressed housekeeping gene. Increases in PGC-1α are compared to controls as above to determine the degree of pathway activation relative to other treatments.

### Example 59: In Vitro Assessment of Adipocyte Response to Treated C2C12 Myotubes

[1279] Molecules secreted from C2C12 myotubes that have been treated with single amino acids, amino acid blends corresponding to the molar ratios found in nutritive polypeptides, nutritive polypeptide digests, and/or nutritive polypeptides can be used to stimulate the conversion of white adipose tissue into beige adipocytes. The supernatants of treated C2C12 or primary muscle cells are harvested and applied to adipocyte culture (3T3-L1). Following a set treatment period, 3T3-L1 cells are lysed and mRNA extracted, cDNA amplified and relative gene expression assayed against a set that includes FoxC2 (transcription factor overexpressed in beige adipocytes, UCP-1 (a mitochondrial protein unique to beige adipocytes), CIDEA (cell death-inducing DFFA-like effector unique to beige adipocytes), PRDM16 (transcription coregulator that controls the development of brown adipocytes), and PPAR-γ (peroxisome proliferator-activated receptor gamma), to determine if a gene expression pattern similar to that of brown/beige adipocytes is stimulated.

[1280] Alternatively, C2C12 and 3T3-L1 cells are co-cultured while C2C12 is treated with PN (blends or digests) or peptides. The expression of UCP1 and CIDEA in 3T3-L1 can be measured by RT-PCR or ELISA.

### Example 60: In Vitro Assessment of Adipocyte Lipogenesis after Amino Acid and Nutritive Protein Treatment

[1281] The murine 3T3-L1 adipocyte cell line serves as a useful model for studying the differentiation of cells from preadipocytes to mature adipocytes. The contribution of single amino acids, amino acid blends corresponding to the molar ratios found in nutritive polypeptides, nutritive polypeptide digests, and/or nutritive polypeptides to the differentiation and accumulation of lipid in preadipocytes through terminal adipocytes are assayed by culturing 3T3-L1 cells in defined amino acid medium with its composition changed following two days at confluence to induce differentiation.

[1282] Fatty acid synthase (FAS) and acetyl-CoA carboxylase (ACC) two enzymes responsible for fatty acid synthesis and hormone-sensitive triacylglycerol lipase (HSTL) expression are measured by RT-PCR in response to acute dosing of amino acids, PN blends and PN digests during different stages of adipocyte differentiation normalized to NoNo, a stable adipocyte reference gene (Arsenijevic, et al. 2012. Murine 3T3-L1 adipocyte cell differentiation model: Validated reference genes for qPCR gene expression analysis. PLOS One. 7(5): e37517)

### Example 61: Body Weight Control in a Mouse Model of Diet-Induced Obesity

[1283] Leucine is useful for controlling body weight gain (Cota, Daniela, et al. “Hypothalamic mTOR signaling regulates food intake.” Science 312.5775 (2006): 927-930.) (Westerterp-Plantenga, Margriet S., et al. “Dietary protein, weight loss, and weight maintenance.” Annual review of nutrition 29 (2009): 21-41.), and nutritive polypeptides enriched in leucine are described herein. Effects of provided nutritive polypeptides on body weight control are examined in DIO mice as described herein. The diet-induced obesity (DIO) rodent model closely mimics the development of obesity prevalent in high-fat Western diets (C. Wang & Liao, 2012, Methods Mol Biol: 821: 421-433). DIO is induced in male C57BL/6 mice on high fat diet (HFD) with 60 kcal fat (Research Diets, New Brunswick, N.J.) starting at 6 weeks of age (C. Wang & Liao, 2012, Methods Mol Biol: 821: 421-433). In this study, Male C57BL/6 mice are fed with HFD for 12 weeks starting at 6 weeks of age. Nutritive polypeptide formulation or vehicle is administered via a daily dose of 2.85-5.7 g/kg for 4 weeks by oral gavage, starting at 18 weeks of age. Body weight and food intake are recorded every day. Within group body weight changes over time are compared by a 1-way ANOVA test, as are net changes in weight and/or food intake between nutritive polypeptides and/or vehicle. A p<0.05 is considered significant.

### Example 62: Body Weight Control by Nutritive Polypeptides in Obese Subjects

[1284] An average adult male or female requires daily protein intake 0.66-0.80 g/kg (Dietary reference intakes for energy, carbohydrate, fiber, fat, fatty acids, cholesterol, protein and amino acids, National Academy of Sciences, Institute of Medicine, Food and Nutrition Board, 2005). Diets with daily total protein intake >1.5 g/kg are effective for treatment of obesity in adult human subjects (Layman & Walker, 2006, The Journal of nutrition: 136: 319-323). Dietary supplementation of amino acids suppresses body weight gain, food intake, and adipose tissue mass in DIO mice (Hisamine Kobayashi, Hirabayashi, & Ueda, 2009, Kawasaki, Japan) (W. Wang et al., 2013, Amino acids: 45: 463-77). An ideal body weight control plan results in correction of body composition with increased skeletal muscle (lean) mass. Consumption of protein-rich diets not only facilitates body weight loss but also is more effective in correcting body composition during weight loss (Layman & Walker, 2006, The Journal of nutrition: 136: 319-323). Among the amino acids, the building blocks of proteins, leucine has the unique role in regulating energy metabolism. Dietary leucine reduces body weight gain associated with high-fat diet and improve glucose and cholesterol metabolism in the diet-induced obesity mouse model (Zhang et al., 2007, 56: 1647-1654). Moreover, leucine stimulates muscle protein synthesis (Layman & Walker, 2006, The Journal of nutrition: 136: 319-323).

[1285] Leucine-enriched nutritive polypeptides described herein are highly water soluble and readily digested and absorbed in human subjects. Single oral doses of such nutritive polypeptides increased fractional rate of muscle protein synthesis in apparently healthy human subjects as described herein. Obese human subjects (BMI>30) are enrolled to a 30-day study of effects of nutritive polypeptides on body weight control. Test diet is provided to subjects, and calorie need is calculated based upon the body weight, BMI, and daily activities. Subjects maintain routine daily activity throughout the trial period. Subjects are randomly assigned in a double-blind manner, starting treatment of vehicle or a nutritive polypeptide formulation for 30 days. Body weight is recorded daily. After a 30-day wash-out, dosing is repeated with shift to another treatment regimen for 30 days, as described herein. Change of body weight is calculated as the difference between day 1 and day 30. Body compositions of skeletal muscle mass and adipose tissue are measured by MRI or DEXA (Mitsiopoulos et al., 2014, Journal of Applied Physiology: 85: 115-122).

### Example 63: Nutritive Polypeptides for Improved Glycemic Control in Type 2 Diabetic Patients

[1286] The amino acids leucine and arginine have been shown to directly act on pancreatic B-cells to promote insulin secretion and improve glucose homeostasis (Newsholme P. et al. New insights into amino acid metabolism, B-cell function and diabetes. Clin. Sci. (2005) 108: 185-194)). Nutritive polypeptides enriched in leucine and arginine that were identified in the edible database are shown in table E48A.

TABLE E48A

| [[SEQID]]SEQ ID | | | |
|---|---|---|---|
| NO: | EAA | L | R |
| [[SEQID]]SEQ ID | 0.48 | 0.13 | 0.36 |
| NO:-03551 | | | |
| [[SEQID]]SEQ ID | 0.49 | 0.18 | 0.16 |
| NO:-03623 | | | |
| [[SEQID]]SEQ ID | 0.36 | 0.15 | 0.26 |
| NO:-03424 | | | |
| [[SEQID]]SEQ ID | 0.56 | 0.21 | 0.06 |
| NO:-03552 | | | |
| [[SEQID]]SEQ ID | 0.47 | 0.18 | 0.15 |
| NO:-03503 | | | |
| [[SEQID]]SEQ ID | 0.31 | 0.14 | 0.27 |
| NO:-03617 | | | |
| [[SEQID]]SEQ ID | 0.31 | 0.17 | 0.15 |
| NO:-03433 | | | |
| [[SEQID]]SEQ ID | 0.35 | 0.16 | 0.17 |
| NO:-03472 | | | |
| [[SEQID]]SEQ ID | 0.45 | 0.18 | 0.10 |
| NO:-03632 | | | |
| [[SEQID]]SEQ ID | 0.06 | 0.00 | 0.72 |
| NO:-03473 | | | |

[1287] Nutritive polypeptides enriched in leucine and arginine that were identified in the expressed nutritive polypeptide database are shown in table E48B.

TABLE E48B

| [[SEQID]]SEQ ID | | | |
|---|---|---|---|
| NO: | EAA | L | R |
| [[SEQID]]SEQ ID | 0.41 | 0.11 | 0.21 |
| NO:-00551 | | | |
| [[SEQID]]SEQ ID | 0.41 | 0.08 | 0.23 |
| NO:-00540 | | | |
| [[SEQID]]SEQ ID | 0.47 | 0.21 | 0.14 |
| NO:-00148 | | | |
| [[SEQID]]SEQ ID | 0.47 | 0.08 | 0.22 |
| NO:-00636 | | | |
| [[SEQID]]SEQ ID | 0.42 | 0.18 | 0.15 |
| NO:-00647 | | | |
| [[SEQID]]SEQ ID | 0.60 | 0.32 | 0.05 |
| NO:-00132 | | | |
| [[SEQID]]SEQ ID | 0.42 | 0.07 | 0.22 |
| NO:-00567 | | | |
| [[SEQID]]SEQ ID | 0.45 | 0.12 | 0.19 |
| NO:-00597 | | | |
| [[SEQID]]SEQ ID | 0.38 | 0.11 | 0.19 |
| NO:-00335 | | | |
| [[SEQID]]SEQ ID | 0.52 | 0.26 | 0.08 |
| NO:-00195 | | | |

[1288] Efficacy of the nutritive polypeptides on glycemic control is assessed by an oral glucose tolerance test (OGTT) in which glucose is given and blood samples taken afterward to determine how quickly it is cleared from the blood. An OGTT is used to measure how well the body can process a large amount of glucose, in order to diagnose diabetes mellitus (DM) and assess insulin intolerance (Drouin et al., 2009, Diabetes care: 32 Suppl 1: S62-7).

[1289] Patients with T2DM between the ages of 18 and 50 and body weight between 50 and 70 kg are randomly assigned in a double-blinded manner to a sequence of treatments, orally receiving 25 grams of each nutritive polypeptide formulation under study at 45 minutes prior to glucose ingestion of OGTT test. On the morning of study, OGTT test is conducted following an overnight fast (>8 hrs). Human subjects between the ages of 18 and 50 and body weight between 50 and 70 kg receive 50 gram of glucose (Glucola or equivalent). Blood sugar levels are measured by a glucometer at the following times relative to glucose dose: −45, −30, −15 minutes, 0 minutes (prior to glucose dose), 15, 30, 60, 90, 120, 150, and 180 minutes. Venous blood for plasma is collected at the following times relative to glucose dose: −45, −30, −15 minutes, 0 minutes (prior to glucose dose), 15, 30, 60, 90, 120, 150, and 180 minutes. 5 ml of whole blood is sampled at each time point, aliquoted into a K2EDTA tube that has been pre-filled with 50 ul of DPPIV Inhibitor (Millipore, DPPIV) and 50 ul Protease Inhibitor Cocktail (Sigma, P8340). Blood samples are spun at 2200×g for 10 minutes at 5° C.±3° C. Plasma is aliquoted into sample tubes and stored at −70° C. Blood hormone levels of insulin, GIP, GLP-1, PYY, CCK, amylin, glucagon, IGF, Ghrelin, leptin, pancreatic polypeptide, secretin are determined.

[1290] Levels and area under the curve (AUC of 0-180 minutes (blood glucose) or 0-60 minutes (hormones)) of blood sugar and hormone are compared. AUC is normalized to the glucose and hormone baseline levels at time 0. Outcome variables (blood glucose and hormone concentrations) are analyzed via ANCOVA, verified to meet the homogeneity of regression assumption (parallelism), and baseline scores and gender will be used as covariate(s). Area-under-the-curve analyses in a plot of plasma concentration of amino acid against time are also performed. Significance is set at P<0.05 and trends defined as 0.051<P<0.10.

[1291] After 7 days of wash out period, all subjects “crossed-over” from one treatment to the other and repeated the OGTT test/blood sampling protocol. Each subject serves as their own control in the within-subject cross-over comparison.

### Example 64: Selection of Nutritive Polypeptides for Increasing Renal Function and Treatment and Prevention of Renal Diseases

[1292] Nutritive polypeptides are selected from a database of edible proteins as described herein. As a result of inadequate metabolic and nutritional status high mortality and morbidity rates remain prevalent in patients suffering from chronic kidney disease (CKD, particularly in those with end-stage renal disease (ESRD) receiving dialysis. This altered status, deemed protein energy wasting (PEW), can be caused by inadequate dietary protein intake and utilization and has a significant effect on patient mortality rate. Dialysis depletes the body of amino acids and the compromised kidneys alter amino acid homeostasis in the human body. PEW can result in loss of muscle and protein stores compounding the effects of renal disease. Nutritive polypeptide compositions are useful for treatment of renal diseases. Also, CKD patients are known to have abnormal amino acid profiles in serum, in particular, essential amino acids (EAAs) and branched chain amino acids (BCAAs). Kim et. al. report lower serum BCAAs levels in ESRD dialysis patients compared to a control group. More specifically, lower levels of serine, tyrosine and lysine as well as the BCAAs-valine, leucine and isoleucine have been reported (Kim, D. H. Kor. Journ. Int. Med. 1998. 13(1): 33-40). Therefore, BCAA-enriched nutritive polypeptides and/or EAA-enriched nutritive polypeptides are of particular utility for patients with CKD.

[1293] Supplementation of BCAAs in the diet can improve the nutritional status and appetite of dialysis patients. (Hiroshige, K. Nephr. Dial. Transplant. 2001. 16:1856-62). Levels of BCAAs were normalized by 12 g/day oral supplements. Nutritive polypeptides high in BCAAs are an effective treatment for patients compromised by renal disease. PEW can be remedied by restoring the specific amino acids lost by dialysis and diminished metabolic function by nutritive polypeptide administration while diminishing stress on an already compromised patient. A nutritive polypeptide selected for improving the status of ESRD patients, particularly those with PEW, delivers optimal combinations of amino acids at a beneficial quantity. Specifically, a nutritive polypeptide high in BCAAs satisfies these requirements. The nutritive polypeptide optionally is low in glutamine and glutamic acid content, since patients with renal disease do not efficiently excrete ammonia, a by-product of glutamic acid and glutamine metabolism. Accumulation of ammonia in the blood, also known as hyperammonemia, is a dangerous condition that may lead to death (Sacks, G. S. Ann. Pharmacol. 1999. 33:348-354).

[1294] Uremic toxicity, where excess nitrogenous waste products exist in circulation often occurs in CKD and, must be monitored. CKD patients are sometimes placed on a low protein diet to prevent uremic toxicity. Urea, the main nitrogenous metabolite from ingestion of protein, may or may not be toxic alone, and can serve as an indicator of accumulation of other toxins as a consequence of altered renal function. Thus, a nutritive polypeptide is able to deliver amino acids optimally to meet a subject's nutritional needs while diminishing risks of these side effects. A high BCAA protein satisfies these requirements. Where some ESRD patients are placed on a low protein diet, dialysis patients are placed on a high protein diet due to loss of amino acids that occur during the dialysis process. Hyperphosphatemia is a complication of a poorly optimized high protein diet, where high phosphorous levels from food can become toxic in individuals with CKD (Mandayam, S. Nephrology. 2006. 11:53-57). Even mild increases in serum phosphorous levels increased mortality rates in CKD patients (Kestenbaum, B. I Am. Soc. Nephrol. 2005. 16: 520-28). A nutritive polypeptide is advantageous in CKD, as it counteracts the loss of amino acids, while sparing the kidneys of extraneous dietary phosphorous.

[1295] An exemplary list of nutritive polypeptides from the edible database described herein useful for treatment of renal disease are summarized in Table E43A. These are high in BCAA content and optionally low in glutamine and glutamic acid content.

TABLE E43A

| [[SEQID]]SEQ ID | | | | |
|---|---|---|---|---|
| NO: | EAA | BCAA | Q | E |
| [[SEQID]]SEQ ID | 0.55 | 0.24 | 0.00 | 0.00 |
| NO:-03580 | | | | |
| [[SEQID]]SEQ ID | 0.65 | 0.24 | 0.00 | 0.00 |
| NO:-03636 | | | | |
| [[SEQID]]SEQ ID | 0.56 | 0.31 | 0.06 | 0.04 |
| NO:-03629 | | | | |
| [[SEQID]]SEQ ID | 0.57 | 0.29 | 0.02 | 0.06 |
| NO:-03441 | | | | |
| [[SEQID]]SEQ ID | 0.54 | 0.28 | 0.04 | 0.03 |
| NO:-03620 | | | | |
| [[SEQID]]SEQ ID | 0.62 | 0.25 | 0.00 | 0.04 |
| NO:-03468 | | | | |
| [[SEQID]]SEQ ID | 0.47 | 0.27 | 0.00 | 0.06 |
| NO:-03553 | | | | |
| [[SEQID]]SEQ ID | 0.54 | 0.28 | 0.04 | 0.03 |
| NO:-03535 | | | | |
| [[SEQID]]SEQ ID | 0.50 | 0.25 | 0.04 | 0.00 |
| NO:-03476 | | | | |
| [[SEQID]]SEQ ID | 0.54 | 0.23 | 0.02 | 0.00 |
| NO:-03582 | | | | |

[1296] An exemplary list of nutritive polypeptides from the expressed database described herein useful for the treatment of renal disease are summarized in Table E43B.

TABLE E43B

| [[SEQID]]SEQ | | | | |
|---|---|---|---|---|
| ID NO: | EAA | BCAA | Q | E |
| [[SEQID]]SEQ | 0.64 | 0.53 | 0.02 | 0.02 |
| ID NO:-00162 | | | | |
| [[SEQID]]SEQ | 0.58 | 0.46 | 0.00 | 0.02 |
| ID NO:-00134 | | | | |
| [[SEQID]]SEQ | 0.60 | 0.43 | 0.02 | 0.02 |
| ID NO:-00169 | | | | |
| [[SEQID]]SEQ | 0.65 | 0.46 | 0.03 | 0.03 |
| ID NO:-00166 | | | | |
| [[SEQID]]SEQ | 0.68 | 0.36 | 0.02 | 0.03 |
| ID NO:-00561 | | | | |
| [[SEQID]]SEQ | 0.63 | 0.38 | 0.02 | 0.04 |
| ID NO:-00175 | | | | |
| [[SEQID]]SEQ | 0.64 | 0.39 | 0.00 | 0.07 |
| ID NO:-00137 | | | | |
| [[SEQID]]SEQ | 0.60 | 0.41 | 0.02 | 0.07 |
| ID NO:-00132 | | | | |
| [[SEQID]]SEQ | 0.52 | 0.36 | 0.00 | 0.07 |
| ID NO:-00195 | | | | |
| [[SEQID]]SEQ | 0.54 | 0.36 | 0.00 | 0.07 |
| ID NO:-00194 | | | | |

### Example 65: Effect of Amino Acids and Nutritive Polypeptides on Renal Fibrosis In Vitro

[1297] Efficacy of high-BCAA nutritive polypeptides is demonstrated by using an in vitro assay modeling kidney disease, which utilizes the pericyte to myofibroblast transition that occurs during kidney fibrosis. Fibrosis reflects pathology observed in end-stage renal failure. Myofibroblast formation is studied by quantitative polymerase chain reaction (qPCR) and Western Blot (WB) in cultured kidney cells (Wu, C. F. Am. Journ. Path. 2013. 182(1): 118-31). Normal kidney pericytes are incubated with TGF-β1 to induce the transition to myofibroblasts and α-smooth muscle actin (α-SMA) is used as a marker of myofibroblast differentiation. Incorporation of nutritive polypeptides into the assay as digests or free amino acid blends is the sole amino acid source in amino acid-free serum in cell culture as opposed to 20% fetal bovine serum. (Kuncio, G. S. Kidn. Int. 1991. 39:550-556).

### Example 66: Treatment of Chronic Kidney Disease with Nutritive Polypeptides in Rodents

[1298] Efficacy of high-BCAA nutritive polypeptides is demonstrated using a rat model of renal disease by ⅚ nephrectomy (Gao, X. Kidney Int. 2011. 79(9): 978-996. Nutritive polypeptides high in BCAAs and optionally low in glutamine and glutamic acid are orally administered to supplement a low-protein diet or a protein-free diet using low-protein and high-protein diet controls. Body weight, blood urea levels and renal lesions are measured to demonstrate improved parameters compared to the controls.

### Example 67: Treatment of Chronic Kidney Disease with Nutritive Polypeptides in Humans

[1299] A nutritive polypeptide high in BCAAs and low in glutamate and glutamine is selected and orally dosed to humans for improvement of symptoms resulting from ESRD. By administering a nutritive polypeptide for 2, 3, 4, 5 or 6 months or control and measuring parameters such as dry body weight, body mass index, body fat percentage, lean body mass, dietary protein intake, dietary caloric intake and plasma levels of urea, ammonia, phosphorous, albumin and BCAAs, nutritive polypeptides efficacy are assessed. A nutritive polypeptide for nutritional support is beneficial as concern exists for stress on the kidney by supply of excess protein.

### Example 68: Selection of Nutritive Polypeptides for the Treatment of Urea Cycle Disorders

[1300] Urea cycle disorder (UCD) patients are treated or symptoms prevented by administration of nutritive polypeptides. The urea cycle is the main nitrogenous waste disposal pathway in humans. UCD is a hereditary disorder caused by deficiency of one or more enzymes in the cycle, ultimately resulting in hyperammonemia. UCD patients present low BCAA serum levels. (Boneh, A. Mol. Genet. Metab. 2014. S1096-7192). Disruption of the normal urea cycle causes diminished synthesis of arginine, normally a nonessential amino acid (Leonard, J. V. Journ. Pediatrics. 2001. 138(1):540-45). Arginine plays a major role in the urea cycle. The synthetic pathway of arginine interacts closely with urea cycle enzymes in the liver and kidneys and is made from ornithine via citrulline (Barbul A. J Parenter Enteral Nutr. 1986. 10: 227-238). Citrulline and ornithine have been supplemented in UCD patients; however, they are not found in natural proteins and are not present in nutritive polypeptides. A nutritive polypeptide indicated for urea cycle disorders contains high levels of BCAAs and arginine. Supplementation of glutamine and glutamic acid produces the nitrogenous waste product ammonia, so a nutritive polypeptide useful for UCD is generally low in these amino acids. A nutritive polypeptide provides an optimized therapy for UCD patients, as it can deliver essential amino acids such as the BCAAs, as well as arginine, without delivering excess amino acids.

[1301] An exemplary list of nutritive polypeptides from the edible database useful for the treatment of urea cycle disorders are summarized in Table E47A. These are high in BCAA and arginine content and low in glutamine and glutamic acid content.

TABLE E47A

| [[SEQID]]SEQ ID | | | | | |
|---|---|---|---|---|---|
| NO: | EAA | BCAA | Q | R | E |
| [[SEQID]]SEQ ID | 0.48 | 0.16 | 0.02 | 0.36 | 0.00 |
| NO:-03551 | | | | | |
| [[SEQID]]SEQ ID | 0.43 | 0.24 | 0.04 | 0.25 | 0.01 |
| NO:-03554 | | | | | |
| [[SEQID]]SEQ ID | 0.44 | 0.23 | 0.04 | 0.26 | 0.01 |
| NO:-03568 | | | | | |
| [[SEQID]]SEQ ID | 0.43 | 0.21 | 0.04 | 0.27 | 0.01 |
| NO:-03434 | | | | | |
| [[SEQID]]SEQ ID | 0.62 | 0.25 | 0.00 | 0.21 | 0.04 |
| NO:-03468 | | | | | |
| [[SEQID]]SEQ ID | 0.43 | 0.23 | 0.04 | 0.24 | 0.01 |
| NO:-03560 | | | | | |
| [[SEQID]]SEQ ID | 0.37 | 0.19 | 0.06 | 0.35 | 0.03 |
| NO:-03578 | | | | | |
| [[SEQID]]SEQ ID | 0.39 | 0.19 | 0.06 | 0.34 | 0.03 |
| NO:-03593 | | | | | |
| [[SEQID]]SEQ ID | 0.40 | 0.22 | 0.06 | 0.32 | 0.03 |
| NO:-03435 | | | | | |
| [[SEQID]]SEQ ID | 0.54 | 0.23 | 0.02 | 0.18 | 0.00 |
| NO:-03582 | | | | | |

[1302] An exemplary list of nutritive polypeptides from the expressed database described herein useful for the treatment of renal disease are summarized in table E47B.

TABLE E47B

| [[SEQID]]SEQ | | | | | |
|---|---|---|---|---|---|
| ID NO: | EAA | BCAA | Q | R | E |
| [[SEQID]]SEQ | 0.58 | 0.46 | 0.00 | 0.06 | 0.02 |
| ID NO:-00134 | | | | | |
| [[SEQID]]SEQ | 0.64 | 0.53 | 0.02 | 0.00 | 0.02 |
| ID NO:-00162 | | | | | |
| [[SEQID]]SEQ | 0.65 | 0.46 | 0.03 | 0.04 | 0.03 |
| ID NO:-00166 | | | | | |
| [[SEQID]]SEQ | 0.60 | 0.43 | 0.02 | 0.00 | 0.02 |
| ID NO:-00169 | | | | | |
| [[SEQID]]SEQ | 0.47 | 0.23 | 0.02 | 0.22 | 0.04 |
| ID NO:-00636 | | | | | |
| [[SEQID]]SEQ | 0.52 | 0.36 | 0.00 | 0.08 | 0.07 |
| ID NO:-00195 | | | | | |
| [[SEQID]]SEQ | 0.54 | 0.36 | 0.00 | 0.08 | 0.07 |
| ID NO:-00194 | | | | | |
| [[SEQID]]SEQ | 0.41 | 0.21 | 0.03 | 0.23 | 0.05 |
| ID NO:-00540 | | | | | |
| [[SEQID]]SEQ | 0.60 | 0.41 | 0.02 | 0.05 | 0.07 |
| ID NO:-00132 | | | | | |
| [[SEQID]]SEQ | 0.57 | 0.41 | 0.02 | 0.08 | 0.09 |
| ID NO:-00043 | | | | | |

### Example 69: Effect of Amino Acids and Nutritive Polypeptides on Urea Cycle Disorders In Vitro

[1303] Efficacy of high-BCAA nutritive polypeptides for UCD is demonstrated by using an in vitro liver model of UCD assessing viability of murine-derived embryonic stem cells. Ornithine has been shown to increase cell viability (Tamai, M. Amino Acids. 2013. 45:1343-1351). Briefly, hepatocytes derived from mice are cultured. Nutritive polypeptides as digests or blends of free amino acids in the cell culture medium protected the cells against NH₄+ induced hepatocyte death. This is due to enhanced enzymatic conversion of ammonium to urea in the urea cycle. Urea was quantified in the media by a QuantiChrom™ Urea Assay Kit (BioAssay Systems, CA) and ammonia quantified by Ammonia Test Wako (Wako, Osaka, Japan). Cell viability was measured by a Cell Counting Kit (Dijindo Laboratories Kumamoto, Japan). A nutritive polypeptide intended for UCD therapy is supplemented against an L-ornithine control and cell viability and urea and ammonia concentrations quantified.

### Example 70: Treatment of Urea Cycle Disorders with Nutritive Polypeptides in Rodents

[1304] Efficacy of high-BCAA nutritive polypeptides for UCD is demonstrated by using a mouse gene knockout study. DeMars et. al. describe a mutation that reduces activity of the urea cycle enzyme ornithine transcarbamylase—a common deficiency in UCD patients (DeMars, R. Proc. Natl. Acad. Sci. 1976. 73: 1693-1697). Oral supplementation of high BCAA and arginine nutritive polypeptides in a mouse diet shows normalization of serum BCAA and arginine profiles in mice compared to the control diet.

### Example 71: Treatment of Urea Cycle Disorders with Nutritive Polypeptides in Humans

[1305] Human oral administration of nutritive polypeptides high in BCAAs and arginine and low in glutamine and glutamic acid is performed and measurements are made as described herein. Specifically, by administering a nutritive polypeptide for 2, 3, 4, 5 or 6 months or control and measuring parameters such as dry body weight, body mass index, body fat percentage, lean body mass, dietary protein intake, dietary caloric intake and plasma levels of urea, ammonia, phosphorous, albumin and BCAAs, nutritive polypeptides efficacy are assessed.

[1306] While the invention has been particularly shown and described with reference to a preferred embodiment and various alternate embodiments, it will be understood by persons skilled in the relevant art that various changes in form and details can be made therein without departing from the spirit and scope of the invention.

[1307] All references, issued patents and patent applications cited within the body of the instant specification are hereby incorporated by reference in their entirety, for all purposes.

The application's sequence listing, which the Patent Office published only in electronic form, follows.

SEQUENCE LISTING (4136 sequences)

SEQ ID NO: 1 - protein, 386 aa, Gallus gallus
MGSIGAASMEFCFDVFKELKVHHANENIFYCPIAIMSALAMVYLGAKDSTRTQINKVVRFDKLPGFGDSIEAQCGTSVNVHSSLRDILNQITKPNDVYSFSLASRLYAEERYPILPEYLQCVKELYRGGLEPINFQTAADQARELINSWVESQTNGIIRNVLQPSSVDSQTAMVLVNAIVFKGLWEKAFKDEDTQAMPFRVTEQESKPVQMMYQIGLFRVASMASEKMKILELPFASGTMSMLVLLPDEVSGLEQLESIINFEKLTEWTSSNVMEERKIKVYLPRMKMEEKYNLTSVLMAMGITDVFSSSANLSGISSAESLKISQAVHAAHAEINEAGREVVGSAEAGVDAASVSEEFRADHPFLFCIKHIATNAVLFFGRCVSP

SEQ ID NO: 2 - protein, 485 aa, Glycine max
MAKLVLSLCFLLFSGCFALREQAQQNECQIQKLNALKPDNRIESEGGFIETWNPNNKPFQCAGVALSRCTLNRNALRRPSYTNGPQEIYIQQGNGIFGMIFPGCPSTYQEPQESQQRGRSQRPQDRHQKVHRFREGDLIAVPTGVAWWMYNNEDTPVVAVSIIDTNSLENQLDQMPRRFYLAGNQEQEFLKYQQQQQGGSQSQKGKQQEEENEGSNILSGFAPEFLKEAFGVNMQIVRNLQGENEEEDSGAIVTVKGGLRVTAPAMRKPQQEEDDDDEEEQPQCVETDKGCQRQSKRSRNGIDETICTMRLRQNIGQNSSPDIYNPQAGSITTATSLDFPALWLLKLSAQYGSLRKNAMFVPHYTLNANSIIYALNGRALVQVVNCNGERVFDGELQEGGVLIVPQNFAVAAKSQSDNFEYVSFKTNDRPSIGNLAGANSLLNALPEEVIQHTFNLKSQQARQVKNNNPFSFLVPPQESQRRAVA

SEQ ID NO: 3 - protein, 178 aa, Bos taurus
MKCLLLALALTCGAQALIVTQTMKGLDIQKVAGTWYSLAMAASDISLLDAQSAPLRVYVEELKPTPEGDLEILLQKWENGECAQKKIIAEKTKIPAVFKIDALNENKVLVLDTDYKKYLLFCMENSAEPEQSLACQCLVRTPEVDDEALEKFDKALKALPMHIRLSFNPTQLEEQCHI

SEQ ID NO: 4 - protein, 214 aa, Bos taurus
MKLLILTCLVAVALARPKHPIKHQGLPQEVLNENLLRFFVAPFPEVFGKEKVNELSKDIGSESTEDQAMEDIKQMEAESISSSEEIVPNSVEQKHIQKEDVPSERYLGYLEQLLRLKKYKVPQLEIVPNSAEERLHSMKEGIHAQQKEPMIGVNQELAYFYPELFRQFYQLDAYPSGAWYYVPLGTQYTDAPSFSDIPNPIGSENSEKTTMPLW

SEQ ID NO: 5 - protein, 224 aa, Bos taurus
MKVLILACLVALALARELEELNVPGEIVESLSSSEESITRINKKIEKFQSEEQQQTEDELQDKIHPFAQTQSLVYPFPGPIPNSLPQNIPPLTQTPVVVPPFLQPEVMGVSKVKEAMAPKHKEMPFPKYPVEPFTESQSLTLTDVENLHLPLPLLQSWMHQPHQPLPPTVMFPPQSVLSLSQSKVLPVPQKAVPYPQRDMPIQAFLLYQEPVLGPVRGPFPIIV

SEQ ID NO: 6 - protein, 142 aa, Bos taurus
MMSFVSLLLVGILFHATQAEQLTKCEVFRELKDLKGYGGVSLPEWVCTTFHTSGYDTQAIVQNNDSTEYGLFQINNKIWCKDDQNPHSSNICNISCDKFLDDDLTDDIMCVKKILDKVGINYWLAHKALCSEKLDQWLCEKL

SEQ ID NO: 7 - protein, 54 aa, Pentadiplandra brazzeana
QDKCKKVYENYPVSKCQLANQCNYDCKLDKHARSGECFYDEKRNLQCICDYCEY

SEQ ID NO: 8 - protein, 150 aa, Homarus americanus
MDSLDEEQIGALQKAFDSFDTDSKGFITPETVGVILRMMGVKISEKNLQEVIAETDEDGSGELEFEEFVELAAKFLIEEDEEALKTELREAFRVYDKEGNGYITTDVLKEILRELDNRLTEEDLDSIIEEVDEDGSGTLDFNEFMEMMNG

SEQ ID NO: 9 - protein, 262 aa, Gallus gallus
MEMKKRLTLELRNKKPGEVKELVLDNCRSDDGKIVGLSSDFENLEFLSMINVNLLSISNLPKLNKLRKLELSDNRISGGLEVLAERTPNLTHLNLSGNKIKDINTLEPLKKLPNLHSLDLFNCEVTMLINYRESVFTLLPQLTYLDGFDADEQEAPDSDPEADGDGLEDEYENGEGEEEEDDDEEDDLDEEVIDEEDDEDDDLEGEEEEDGVDDEEEDEEEDGEDEEDDEADDDLPRGEKRKRNLEDEGEEDPEDEEDDEDD

SEQ ID NO: 10 - protein, 267 aa, Zea mays
MATKILSLLALLALFASATNASIIPQCSLAPSSIIPQFLPPVTSMAFEHPAVQAYRLQQAIAASVLQQPIAQLQQQSLAHLTIQTIATQQQQQQFLPALSHLAMVNPVAYLQQQLLASNPLALANVVANQQQQQLQQFLPALSQLAMVNPAAYLQQQQLLSSSPLAVANAPTYLQQELLQQIVPALTQLAVANPVAYLQQLLPFNQLTMSNSVAYLQQRQQLLNPLAVANPLVAAFLQQQQLLPYNRFSLMNPVLSRQQPIVGGAIF

SEQ ID NO: 11 - protein, 239 aa, Unknown
  Description of Unknown: YFP polypeptide
MVSKGEELFTGVVPILVELDGDVNGHKFSVSGEGEGDATYGKLTLKFICTTGKLPVPWPTLVTTFGYGLQCFARYPDHMKQHDFFKSAMPEGYVQERTIFFKDDGNYKTRAEVKFEGDTLVNRIELKGIDFKEDGNILGHKLEYNYNSHNVYIMADKQKNGIKVNFKIRHNIEDGSVQLADHYQQNTPIGDGPVLLPDNHYLSYQSALSKDPNEKRDHMVLLEFVTAAGITLGMDELYK

SEQ ID NO: 12 - protein, 54 aa, Pentadiplandra brazzeana; identical to SEQ ID NO: 7

SEQ ID NO: 13 - protein, 50 aa, Pentadiplandra brazzeana
KKVYENYPVSKCQLANQCNYDCKLDKHARSGECFYDEKRNLQCICDYCEY

SEQ ID NO: 14 - protein, 51 aa, Pentadiplandra brazzeana
QDKCKKVYENYPVSKCQLANQCNYDCKLDKHARSGECFYDEKRNLQCICDY

SEQ ID NO: 15 - protein, 47 aa, Pentadiplandra brazzeana
KKVYENYPVSKCQLANQCNYDCKLDKHARSGECFYDEKRNLQCICDY

SEQ ID NO: 16 - protein, 101 aa, Unknown
  Description of Unknown: polypeptide
SDISLCLLDAYSLAMAALLDIQELMKALALVETCGAQSAEILKPTPEGDLENGEQATMKEKGLPLCAKIDALNELQLFCMEIPAVFNSADTDYKWLELEEQ

SEQ ID NO: 17 - protein, 101 aa, Unknown
  Description of Unknown: polypeptide
SMEDVFMGSIGAAFCFKENENIFVHHAPEYCPIAIMSAELLAMVYLGAEPINFTQFDKGDSIEALKNQDQALPGFSFAERDILSLLYVEITKPNDVYWEDE

SEQ ID NO: 18 - protein, 100 aa, Bos taurus
RRLRLQQLATLIQKTYRGWRCRTHYQLMRKSQIVISSWFRGNMQKKHYRKMKASALLIQAFVRGWKARKNYRKYFRSGAALILSNFIYKSMVQKFLLGLK

SEQ ID NO: 19 - protein, 100 aa, Unknown
  Description of Unknown: polypeptide
RRRFLHLKKAAVVFQKQLRGQIARRRRRFLHLKKAAVVFQKQLRGQIARRRRRFLHLKKAAVVFQKQLRGQIARRRRRFLHLKKAAVVFQKQLRGQIARR

SEQ ID NO: 20 - protein, 102 aa, Unknown
  Description of Unknown: polypeptide
LKMGSIGAAKDSTRFCFKEINKNIFVHHALAQCVKYCPIAKAIMSAMVYASRLGATQFDKVVRRDILNQFKSFLPGFSLKGLERREQTAASKPVQLYFRKIK

SEQ ID NO: 21 - protein, 107 aa, Unknown
  Description of Unknown: polypeptide
LKPHIYMTLIRNLPLQLIYRYVSVNPYQQKYVLEKANMASGAGKLPIYYQRDRSLKESKIGNVLVADRQVNSVKRDYALNNNSSRTYCILVAAVCGKSRKRPPTAGA

SEQ ID NO: 22 - protein, 263 aa, Zea mays
MATKILALLALLALLVSATNAFIIPQCSLAPSASIPQFLPPVTSMGFEHPAVQAYRLQLALAASALQQPIAQLQQQSLAHLTLQTIATQQQQQQFLPSLSHLAMVNPVTYLQQQLLASNPLALANVAAYQQQQQLQQFMPVLSQLAMVNPAVYLQLLSSSPLAVGNAPTYLQQQLLQQIVPALTQLAVANPAAYLQQLLPFNQLAVSNSAAYLQQRQQLLNPLAVANPLVATFLQQQQQLLPYNQFSLMNPALQQPIVGGAIF

SEQ ID NO: 23 - protein, 100 aa, Zea mays
LSPAMSSVCENPILLPYRIQQAIAAGILPLSPLFLQQSSALLQQLPLVHLLAQNIRAQQLQQLVLANLAAYSQQQQLPLVHLLAQNIRAQQLQQLVLANL

SEQ ID NO: 24 - protein, 100 aa, Gallus gallus
LQQIATDGSFAFTALDIRNLAALRELLLPNIVGVAQRLILLEAPTIVTEVIEVNKKDIVFLIDGSTALGTGPFNSIRDFVAKIVQRLEVGPDLIQVAVAQ

SEQ ID NO: 25 - protein, 102 aa, Gallus gallus
IEEAVPQILVLISGGESSDDIREGLLAVKQASIFSFSIGVLNADSAELQQIATDGSFAFTALDIRNLAALRELLLPNIVGVAQRLILLEAPTIVTEVIEVNK

SEQ ID NO: 26 - protein, 104 aa, Unknown
  Description of Unknown: polypeptide
LLGLLLTWLLLLGLLFGLIALAEEVRLLGLLLTWLLLLGLLFGLIALAEEVRLLGLLLAWLLLLGLLFGLIALAEEVRLLGLLLTWLLLLGLLFGLIALAEEVR

SEQ ID NO: 27 - protein, 102 aa, Unknown
  Description of Unknown: polypeptide
LEGSVGVEMTLDLVLLEPLEQESLIRNLQLRYEKKEIYTYIGNVLVSVNPYQQLPIYDLEFVAKYLKPHIYALSLTFCILYELVMSYITGEQVNSVKLLLVL

SEQ ID NO: 28 - protein, 102 aa, Unknown
  Description of Unknown: polypeptide
ALTVIDFTEDEVEDLLSIVASVLHLTVLSDLIPEIEYVVSIASYDEVEESLALTVIDFTEDEVEDLLSIVASVLHLNEIILQVCSGVDEQLGELVSGEEVVE

SEQ ID NO: 29 - protein, 104 aa, Unknown
  Description of Unknown: polypeptide
LEGSVGVEDLMTLLEPLVLEQESLIRNLQLRYEKKEIYDLTYIGNVLEFVSVNPYRDYYEQQSLVADRDQLPIYLVMSYGETEARDRALEQYQLLEASKYMDIE

SEQ ID NO: 30 - protein, 100 aa, Gallus gallus
KVHKLQIEVENVTSLLNEAESKNIKLTKDVATLGSQLQDTQELLQEETRQKLNVTTKLRQLEDDKNSLQEQLDEEVEAKQNLERHISTLTIQLSDSKKKL

SEQ ID NO: 31 - protein, 100 aa, Bos taurus
EEEEEARRSLEKQLQALQAQLTDTKKKVDDDLGTIENLEEAKKKLLKDVEVLSQRLEEKALAYDKLEKTKTRLQQELDDLLVDLDHQRQIVSNLEKKQKK

SEQ ID NO: 32 - protein, 101 aa, Gallus gallus
NDLLLQLQAEQDTLADAEERCDLLIKSKIQLEAKVKELTERVEDEEEMNSELTSKKRKLEDECSELKKDIDDLEITLAKVEKEKHATENKVKNLTEEMATL

SEQ ID NO: 33 - protein, 101 aa, Unknown
  Description of Unknown: polypeptide
IKTVTSLDLPVLRWLKLSAEHGSLHKDGKLVSIIAELLSTKTDMVEKALLYRQKLQLEKVTAEAKIKKMEEEILLLKVTTEAKLKKLEEDVIVLEDQNLKL

SEQ ID NO: 34 - protein, 101 aa, Unknown
  Description of Unknown: polypeptide
MKLIVTQCLLLALALTCGAQATMKGLDIQKVAGTWYSLAMAASDISLLDAQSAPLRVYVEELKPTPEGDLEILLQKWENGECAQKKIIAEKTKKIDAKKLE

SEQ ID NO: 35 - protein, 100 aa, Gallus gallus
KLQAVAKDKLVMAEAVQKVNRANGKTVPRLLLLTTEHLVLADPKAAQPKMVLSLCDIQGASVSRFSDGLLALHLKETSTAGGKGDLLLVSPHLIELVTRL

SEQ ID NO: 36 - protein, 100 aa, Unknown
  Description of Unknown: polypeptide
MMSFVSLLLVGILLTKFHATQAEQLKCEVFREDLKGYGGVSLIVQYGLINNKWVCTTFIWCKFLPEDDDLKILHTSGYFQDKWLVGINYAHKALKLWLKL

SEQ ID NO: 37 - protein, 89 aa, Unknown
  Description of Unknown: polypeptide
VLLKLLLLKVLMVLLFVTIKHKIKILHLKLTLTKMTLLWTKFLVKIVKKIMTLKVIIKFTIIITILHMKLFMLKWKLLVLFWTVLVLLT

SEQ ID NO: 38 - protein, 106 aa, Gallus gallus
CPCGSCCSWWKWLLGLLLAWLLLLGLLFGLIALAEEVRKLKSRVDNLEKINHSFLTVNQGNPYLEKDVSKVDFLHGVAPSSTFPFENEESVWLMVKSRLNKEIERG

SEQ ID NO: 39 - protein, 103 aa, Gallus gallus
KEKDFQGMLEYKKEDEQKLVKNLILELKPRGVAVNLIPGLPAYILFMCVRHADYLNDDQKVRSLLTSTINGIKKVLKKRGDDFETVSFWLSNTCRFLHCLKQY

SEQ ID NO: 40 - protein, 100 aa, Gallus gallus
FTALDIRNLAALRELLLPNIVGVAQRLILLEAPTIVTEVIEVNKKDIVFLIDGSTALGTGPFNSIRDFVAKIVQRLEVGPDLIQVAVAQYADTVRPEFYF

SEQ ID NO: 41 - protein, 100 aa, Bos taurus
IRSPKTLFYLEEQRRLRLQQLATLIQKTYRGWRCRTHYQLMRKSQIVISSWFRGNMQKKHYRKMKASALLIQAFVRGWKARKNYRKYFRSGAALILSNFI

SEQ ID NO: 42 - protein, 102 aa, Bos taurus
NFSQPYPEEEEVDEGFEADDDAFKDSPNPSEHGHSDQRTSGIRTSDESSEEDPYMNDTVVPTSPSADSTVLLAPSEHDSSAGEPTYCLPQTPGALPAPEGDY

SEQ ID NO: 43 - protein, 50 aa, Gallus gallus
AFTALDIRNLAALRELLLPNIVGVAQRLILLEAPTIVTEVIEVNKKDIVF

SEQ ID NO: 44 - protein, 50 aa, Gallus gallus
FTALDIRNLAALRELLLPNIVGVAQRLILLEAPTIVTEVIEVNKKDIVFL

SEQ ID NO: 45 - protein, 53 aa, Gallus gallus
LDIRNLAALRELLLPNIVGVAQRLILLEAPTIVTEVIEVNKKDIVFLIDGSTA

SEQ ID NO: 46 - protein, 52 aa, Gallus gallus
DIRNLAALRELLLPNIVGVAQRLILLEAPTIVTEVIEVNKKDIVFLIDGSTA

SEQ ID NO: 47 - protein, 50 aa, Gallus gallus
NLAALRELLLPNIVGVAQRLILLEAPTIVTEVIEVNKKDIVFLIDGSTAL

SEQ ID NO: 48 - protein, 31 aa, Clupea harengus
ARRRRSSSRPIRRRRPRRRTTRRRRAGRRRR

SEQ ID NO: 49 - protein, 248 aa, Unknown
  Description of Unknown: polypeptide
MGHHHHHHGGASKGEELFTGVVPILVELDGDVNGHKFSVRGEGEGDATNGKLTLKFICTTGKLPVPWPTLVTTLTYGVQCFSRYPDHMKQHDFFKSAMPEGYVQERTISFKDDGTYKTRAEVKFEGDTLVNRIELKGIDFKEDGNILGHKLEYNFNSHNVYITADKQKNGIKANFKIRHNVEDGSVQLADHYQQNTPIGDGPVLLPDNHYLSTQSALSKDPNEKRDHMVLLEFVTAAGITHGMDELYK

SEQ ID NO: 50 - protein, 50 aa, Bos taurus
MKLLILTCLVAVALARPKHPIKHQGLPQEVLNENLLRFFVAPFPEVFGKE

SEQ ID NO: 51 - protein, 50 aa, Bos taurus
KLLILTCLVAVALARPKHPIKHQGLPQEVLNENLLRFFVAPFPEVFGKEK

SEQ ID NO: 52 - protein, 50 aa, Bos taurus
LLILTCLVAVALARPKHPIKHQGLPQEVLNENLLRFFVAPFPEVFGKEKV

SEQ ID NO: 53 - protein, 50 aa, Bos taurus
LILTCLVAVALARPKHPIKHQGLPQEVLNENLLRFFVAPFPEVFGKEKVN

SEQ ID NO: 54 - protein, 50 aa, Bos taurus
ILTCLVAVALARPKHPIKHQGLPQEVLNENLLRFFVAPFPEVFGKEKVNE

SEQ ID NO: 55 - protein, 50 aa, Bos taurus
LTCLVAVALARPKHPIKHQGLPQEVLNENLLRFFVAPFPEVFGKEKVNEL

SEQ ID NO: 56 - protein, 50 aa, Bos taurus
ESISSSEEIVPNSVEQKHIQKEDVPSERYLGYLEQLLRLKKYKVPQLEIV

SEQ ID NO: 57 - protein, 50 aa, Bos taurus
SISSSEEIVPNSVEQKHIQKEDVPSERYLGYLEQLLRLKKYKVPQLEIVP

SEQ ID NO: 58 - protein, 50 aa, Bos taurus
ISSSEEIVPNSVEQKHIQKEDVPSERYLGYLEQLLRLKKYKVPQLEIVPN

SEQ ID NO: 59 - protein, 50 aa, Bos taurus
IVPNSVEQKHIQKEDVPSERYLGYLEQLLRLKKYKVPQLEIVPNSAEERL

SEQ ID NO: 60 - protein, 248 aa, Unknown
  Description of Unknown: polypeptide
MGHHHHHHGGASKGEELFDGVVPILVELDGDVNGHEFSVRGEGEGDATEGELTLKFICTTGELPVPWPTLVTTLTYGVQCFSDYPDHMDQHDFFKSAMPEGYVQERTISFKDDGTYKTRAEVKFEGDTLVNRIELKGIDFKEDGNILGHKLEYNFNSHDVYITADKQENGIKAEFEIRHNVEDGSVQLADHYQQNTPIGDGPVLLPDDHYLSTESALSKDPNEDRDHMVLLEFVTAAGIDHGMDELYK

SEQ ID NO: 61 - protein, 248 aa, Unknown
  Description of Unknown: polypeptide
MGHHHHHHGGASKGERLFRGKVPILVELKGDVNGHKFSVRGKGKGDATRGKLTLKFICTTGKLPVPWPTLVTTLTYGVQCFSRYPKHMKRHDFFKSAMPKGYVQERTISFKKDGKYKTRAEVKFEGRTLVNRIKLKGRDFKEKGNILGHKLRYNFNSHKVYITADKRKNGIKAKFKIRHNVKDGSVQLADHYQQNTPIGRGPVLLPRNHYLSTRSKLSKDPKEKRDHMVLLEFVTAAGIKHGRDERYK

SEQ ID NO: 62 - protein, 101 aa, Feline enteric coronavirus
  strain 79-1683
MLVFLHAVLVTALILLLIGRIQLLERLLLSHLLNLTTVSNVLGVPDSSLRVNCLQLLKPDCLDFNILHKVLAETRLLVVVLRVIFLVLLGFSCYTLLGALF

SEQ ID NO: 63 - protein, 146 aa, Candida albicans
MSLISGIASILAIGLLSPVQSILALILLFVTVAINLYTSGYVLMGILYILVYVGAIAILFLFILSLLNIEYKPTGGMHPLVIVLILIPLIPLDIAFEPIAIVESVSTTYNELSIVGTLFYSEYAPMLVIIGIILIVSVIGAIAMTR

SEQ ID NO: 64 - protein, 155 aa, Candida albicans
MFLISGISSILAIGLLSPVQSIVCLIVLFVSAAISLYSNGFVLMGILYVLIYVGAIAILFLFILSLLNIEYNYKGTIHPLIFTILIICLIPLDLSYETYGIVENVNIAYPFNSLLDWDLELTTVGSLLYTEYAIPMILIGLILILSVIGAIAITK

SEQ ID NO: 65 - protein, 150 aa, Haemophilus influenzae
  ATCC 51907
MTLQLNTIALLLVILLILGVLSNNSTITISAAVLLIMQQTFLSSHIPLLEKYGVKIGIIILTIGVLSPLVSGKIQLPDLSGFLSWKMALSISVGVLVAWLAGKGVPLMGEQPILVTGLLIGTIIGVAFLGGIPVGPLIAAGILALLLGKI

SEQ ID NO: 66 - protein, 155 aa, Aquifex aeolicus
MTFLFLILVFIIEILQLSVFPPIFGNAYIVPSLAFLLVLFSSYKIKEKALLLAFLSGLFYDAVVNFLGFISLLNVVFTYLYLVLNNILFVKNPKVEVFLIMPLILLLRKLTIFLVVNTKFPLNIGLKDFGVVLLIDLIFLILLYKVFNKYVYEKA

SEQ ID NO: 67 - protein, 137 aa, Methanocaldococcus jannaschii
  ATCC 43067
MDTAIILGLLVAVFYGVGTFFAKIVCEKNPLFQWIVVNIVGIILCLIILLKYKNIIITDQKILTYAIISAVLVVIGSLLLYYALYKGKASIVVPLSSIGPAITVALSILFLKETLTLPQMIGIVLIIIGIILLSISN

SEQ ID NO: 68 - protein, 214 aa, Unknown
  Description of Unknown: polypeptide
MKLLILTCLVLVILVRVKHLIKHQVLVQEVLNENLLRVLVLILVEVLIKEKVNELSKDIVSESTEDQLIEDIKQVELESISSSEEIVLNSVEQKHIQKEDVISERYLIYLEQLLRLKKYKVLQLEIVLNSLEERLHSVKELIHIQQKELLILVNQELIYIYVELVRQIYQLDLYLSVILYYVILITQYTDLLSISDILNLILSENSEKTTLVLW

SEQ ID NO: 69 - protein, 103 aa, Unknown
  Description of Unknown: polypeptide
MIEEAVPQILVLISGGVSSDDIREGLLAVKLASILSFSIGVLNADLAELQLIATDGSLALTLLDIRNLAVLVELLLPNIVGVAQRLILLEVPTIVTEVIEVNK

SEQ ID NO: 70 - protein, 103 aa, Unknown
  Description of Unknown: polypeptide
MIEEAVPQILVLISGGESSDDIREGLLAVKQASILSFSIGVLNADSAELQQIATDGSLVFTLLDIRNLAALRELLLPNIVGVAQRLILLEAPTIVTEVIEVNK

SEQ ID NO: 71 - protein, 50 aa, Unknown
  Description of Unknown: polypeptide
AFTVLDIRNLAVLRELLLLNIVGVAQRLILLEAPTIVTEVIEVNKKDIVF

SEQ ID NO: 72 - protein, 161 aa, Gallus gallus
MDDIYKAAVEQLTEEQKNEFKAAFDIFVLGAEDGCISTKELGKVMRMLGQNPTPEELQEMIDEVDEDGSGTVDFDEFLVMMVRCMKDDSKGKTEEELSDLFRMFDKNADGYIDLEELKIMLQATGETITEDDIEELMKDGDKNNDGRIDYDEFLEFMKGVE

SEQ ID NO: 73 - protein, 152 aa, Mizuhopecten yessoensis
TEEFRASEKQILDAKQAFCNVDKKKEGTVSCKDLGAIFKSLGLLVKDDKIKDWSDEMDEEATGRLNCDAWIQLFERKLKEDLDERELKEAFRVLDKEKKGVIKVDVLRWILSSLGDELTEEEIENMIAETDTDGSGTVDYEEFKCLMMSSDA

SEQ ID NO: 74 - protein, 160 aa, Oryctolagus cuniculus
MTDQQAEARSYLSEEMIAEFKAAFDMFDADGGGDISVKELGTVMRMLGQTPTKEELDAIIEEVDEDGSGTIDFEEFLVMMVRQMKEDAKGKSEEELAECFRIFDRNADGYIDAEELAEIFRASGEHVTDEEIESLMKDGDKNNDGRIDFDEFLKMMEGVQ

SEQ ID NO: 75 - protein, 161 aa, Sus scrofa
MDDIYKAAVEQLTEEQKNEFKAAFDIFVLGAEDGCISTKELGKVMRMLGQNPTPEELQEMIDEVDEDGSGTVDFDEFLVMMVRCMKDDSKGKSEEELSDLFRMFDKNADGYIDLEELKIMLQATGETITEDDIEELMKDGDKNNDGRIDYDEFLEFMKGVE

SEQ ID NO: 76 - protein, 161 aa, Bos taurus; identical to SEQ ID NO: 75

SEQ ID NO: 77 - protein, 150 aa, Crangon crangon
MDSLEPDQIDALKKAFDSFDTENQGFITADTVATILRMMGVKISDKNLAEVIAETDEDGSGQLEFEEFVDLSSKFLIEEDEEALKAELREAFRIYDKEGQGFITTDVLKEILTEIDNKLTPEDLDGIIEEVDEDGSGTLDFDEFMEMMSG

SEQ ID NO: 78 - protein, 161 aa, Oncorhynchus mykiss
MNDIYKAAVEQLTDEQKNEFKAAFDIFIQDAEDGCISTKELGKVMRMLGQNPTPEELQEMIDEVDEDGSGTVDFDEFLVMMVRCMKDDSKGKTEEELADLFCMFDKNADGYIDLQELKVMLEATGEAITEDDIEELMKDGDKNNDGKIDYDEFLEFMKGVE

SEQ ID NO: 79 - protein, 53 aa, Oryza sativa
  subsp. japonica
MIPLELRPLPQRCRPWIKLFRGLDFTCLSMVPLRVLGIGVLYKCFAVLLSILL

SEQ ID NO: 80 - protein, 206 aa, Oryza sativa
  subsp. japonica
MRRLFLEQFYKQIFSSTPITSFFLFLLYIVVTPLMIGFEKDFLCYFHLGLIWIPLLFSFLSEPFFRNDKEFGTLELYYLSAYCLPKILLLQLVGHWVIQISCVFCAFPMLQLLYQFDRSGMDWLNILLGSLVLTLLCGIHSGLALGITSSSGWNSLQNLTTLPTLLPLTVFCTSIETEGFHVLLLIGYFFLFVSLYPILVSISLQD

SEQ ID NO: 81 - protein, 96 aa, Oryza sativa
  subsp. indica
RSSTLWSQLLRSLQRVSRVWEPRLLRMMSKLFIVICQLALSAYFHDSSHYAESKFGSLALAFCYLLLMIQDCIFLSAWNFDMFVNLLGYILHAIVL

SEQ ID NO: 82 - protein, 240 aa, Bos taurus
MRCRRLCAFDAARGPRRLMRVGLALILVGHVNLLLGAVLHGTVLRHVANPRGAVTPEYTTANVISVGSGLLSVSLGLVALLASRNLFRPRLHWALLALALVNLLLSAACSLGLLLAVSLTVANGGRRLIADCHPGLLDPLVPLDQGSGHADCPFDPTKIYDTALALWIPSVFMSAAEAALSGYCCVAALTLRGVGPCRKDGLQEQLEELTELEFPKRKWQENVQLLDQTREIRTSQKSWV

SEQ ID NO: 83 - protein, 69 aa, Bos taurus
MSVLTPLLLRGLTGPARRLPVPRAQIHSKPPREQLGTMDIAIGLTSCFLCFLLPSGWVLSHMENYKKRE

SEQ ID NO: 84 - protein, 61 aa, Zea mays
MRECISIHIGQAGIQVGNACWELYCLEHGIQADGQMPGDKTIGGGDAEFDEGEDGDEGDEY

SEQ ID NO: 85 - protein, 151 aa, Bos taurus
MCDFTEDQTAEFKEAFQLFDRTGDGKILYSQCGDVMRALGQNPTNAEVLKVLGNPKSDEMNVKVLDFEHFLPMLQTVAKNKDQGTYEDYVEGLRVFDKEGNGTVMGAEIRHVLVTLGEKMTEEEVEMLVAGHEDSNGCINYEAFVRHILSG

SEQ ID NO: 86 - protein, 151 aa, Gallus gallus
MCDFSEEQTAEFKEAFQLFDRTGDGKILYSQCGDVMRALGQNPTNAEVMKVLGNPKSDEMNLKTLKFEQFLPMMQTIAKNKDQGCFEDYVEGLRVFDKEGNGTVMGAEIRHVLVTLGEKMTEEEVEQLVAGHEDSNGCINYEELVRMVLSG

SEQ ID NO: 87 - protein, 150 aa, Gallus gallus
MSFSPDEINDFKEAFLLFDRTGDAKITLSQVGDIVRALGQNPTNAEINKILGNPSKEEMNAKKITFEEFLPMLQAAANNKDQGTFEDFVEGLRVFDKEGNGTVMGAELRHVLATLGEKMTEEEVEELMKGQEDSNGCINYEAFVKHIMSV

SEQ ID NO: 88 - protein, 90 aa, Phaseolus angularis
AADCNGACSPFQMPPCGSTDCLCIPAGLLFVGYCTYPSGLSSVAKMIDEHPNLCQSDDECMKKGSGNFCARYPNNYMDYGWCFDSDSEAL

SEQ ID NO: 89 - protein, 804 aa, Bos taurus
MRALWVLGLCCVLLTFGSVRADDEVDVDGTVEEDLGKSREGSRTDDEVVQREEEAIQLDGLNASQIRELREKSEKFAFQAEVNRMMKLIINSLYKNKEIFLRELISNASDALDKIRLISLTDENALAGNEELTVKIKCDKEKNLLHVTDTGVGMTREELVKNLGTIAKSGTSEFLNKMTEAQEDGQSTSELIGQFGVGFYSAFLVADKVIVTSKHNNDTQHIWESDSNEFSVIADPRGNTLGRGTTITLVLKEEASDYLELDTIKNLVKKYSQFINFPIYVWSSKTETVEEPAEEEEAAKEDKEESDDEAAVEEEEDEKKPKTKKVEKTVWDWELMNDIKPIWQRPSKEVEEDEYKAFYKSFSKESDDPMAYIHFTAEGEVTFKSILFVPTSAPRGLFDEYGSKKSDYIKLYVRRVFITDDFHDMMPKYLNFVKGVVDSDDLPLNVSRETLQQHKLLKVIRKKLVRKTLDMIKKIADEKYNDTFWKEFGTNIKLGVIEDHSNRTRLAKLLRFQSSHHPSDMTSLDQYVERMKEKQDKIYFMAGASRKEAESSPFVERLLKKGYEVIYLTEPVDEYCIQALPEFDGKRFQNVAKEGVKFDESEKSKESREAVEKEFEPLLNWMKDKALKDKIEKAVVSQRLTESPCALVASQYGWSGNMERIMKAQAYQTGKDISTNYYASQKKTFEINPRHPLIRDMLRRVKEDEDDKTVSDLAVVLFETATLRSGYLLPDTKAYGDRIERMLRLSLNIDPDAKVEEEPEEEPEETTEDTAEDTEQDEEEEMDAGTDEEEQETAEKSTAEKDEL

SEQ ID NO: 90 - protein, 445 aa, Zea mays
MREILHIQGGQCGNQIGAKFWEVICDEHGIDHTGKYAGDSDLQLERINVYYNEASGGRFVPRAVLMDLEPGTMDSVRSGPFGQIFRPDNFVFGQSGAGNNWAKGHYTEGAELIDSVLDVVRKEAENCDCLQGFQVCHSLGGGTGSGMGTLLISKIREEYPDRMMLTFSVFPSPKVSDTVVEPYNATLSVHQLVENADECMVLDNEALYDICFRTLKLATPTFGDLNHLISATMSGVTCCLRFPGQLNSDLRKLAVNLIPFPRLHFFMVGFAPLTSRGSQQYRALTVPELTQQMWDSKNMMCAADPRHGRYLTASAMFRGKMSTKEVDEQMLNVQNKNSSYFVEWIPNNVKSSVCDIPPIGLKMSSTFVGNSTSIQEMFRRVSEQFTAMFRRKAFLHWYTGEGMDEMEFTEAESNMNDLVAEYQQYQDATAEDEEYEEEEEEEEET

SEQ ID NO: 91 - protein, 322 aa, Gallus gallus
ADACSGLQGFLIFHSFGGGTGSGFTSLLMERLSVDYGKKSKLEFAIYPAPQVSTAVVEPYNSILTTHTTLEHSDCAFMVDNEAIYDICCRNLDIERPTYTNLNRLISQIVSSITASLRFDGALNVDLTEFQTNLVPYPRIHFPLVTYAPIISSERAYHEQLSVAEITSSCFEPNNQMVKCDPRHGKYMACCMLYRGDVVPKDVNVAIAAIKTKRNIQFVDWCPTGVKVGINYQPPTVVPGGDLAQVQRAVCMLSNTTAIAEAWARLDHKFDLMYAKRAFVHWYVSEGMEEGEFAEAREDLAALEKDYEEVGTDSFEDENDEE

SEQ ID NO: 92 - protein, 159 aa, Sus scrofa
TDQQAEARSYLSEEMIAEFKAAFDMFDADGGGDISVKELGTVMRMLGQTPTKEELDAIIEEVDEDGSGTIDFEEFLVMMVRQMKEDAKGKSEEELAECFRIFDRNMDGYIDAEELAEIFRASGEHVTDEEIESIMKDGDKNNDGRIDFDEFLKMMEGVQ

SEQ ID NO: 93 - protein, 162 aa, Meleagris gallopavo
PSMTDQQAEARAFLSEEMIAEFKAAFDMFDADGGGDISTKELGTVMRMLGQNPTKEELDAIIEEVDEDGSGTIDFEEFLVMMVRQMKEDAKGKSEEELANCFRIFDKNADGFIDIEELGEILRATGEHVTEEEIEDLMKDSDKNNDGRIDFDEFLKMMEGVQ

SEQ ID NO: 94 - protein, 163 aa, Gallus gallus
MASMTDQQAEARAFLSEEMIAEFKAAFDMFDADGGGDISTKELGTVMRMLGQNPTKEELDAIIEEVDEDGSGTIDFEEFLVMMVRQMKEDAKGKSEEELANCFRIFDKNADGFIDIEELGEILRATGEHVTEEDIEDLMKDSDKNNDGRIDFDEFLKMMEGVQ

SEQ ID NO: 95 - protein, 178 aa, Sus scrofa
MRCLLLTLGLALLCGVQAVEVTPIMTELDTQKVAGTWHTVAMAVSDVSLLDAKSSPLKAYVEGLKPTPEGDLEILLQKRENDKCAQEVLLAKKTDIPAVFKINALDENQLFLLDTDYDSHLLLCMENSASPEHSLVCQSLARTLEVDDQIREKFEDALKTLSVPMRILPAQLEEQCRV

SEQ ID NO: 96 - protein, 142 aa, Bos grunniens
MMSFVSLLLVGILFHATQAEQLTKCEVFRELKDLKGYGGVSLPEWVCTTFHTSGYDTQAIVQNNDSTEYGLFQINNKIWCKDDQNPHSSDICNISCDKFLDDDLTDDIMCVKKILDKVGINYWLAHKALCSEKLDQWLCEKL

SEQ ID NO: 97 - protein, 284 aa, Bos taurus
MEAIKKKMQMLKLDKENALDRAEQAEAEQKQAEERSKQLEDELAAMQKKLKGTEDELDKYSEALKDAQEKLELAEKKAADAEAEVASLNRRIQLVEEELDRAQERLATALQKLEEAEKAADESERGMKVIENRALKDEEKMELQEIQLKEAKHIAEEADRKYEEVARKLVIIEGDLERTEERAELAESKCSELEEELKNVTNNLKSLEAQAEKYSQKEDKYEEEIKILTDKLKEAETRAEFAERSVAKLEKTIDDLEDELYAQKLKYKAISEELDHALNDMTSI

SEQ ID NO: 98 - protein, 73 aa, Lactococcus lactis
MAVFEKVQDIIVDELGKEKEEVTLETSFEELDADSLDLFQIINDIEDEFDVEVDTEADMKTVADLVKYVENNK

SEQ ID NO: 99 - protein, 81 aa, Thermosynechococcus elongatus
MNQSEILEKVKAIVADQLSVDPEKVVPEASFAEDLNADSLDSVELIMALEEEFGVEIPDEEAEKLKTVQDVLDFINNKVAA

SEQ ID NO: 100 - protein, 80 aa, Lactobacillus acidophilus
MSEEEIFNKIKDLIADNFEVDKDSITENTNFMNDLDADSIDLVEFILQLEDEFGAEIPDDEAEKIKTVGDAVSYIKSHQG

SEQ ID NO: 101 - protein, 81 aa, Thermotoga maritima
MASREEIFSKVKSIISEKLGVDESQVTEEAKLIDDLGADSLDLVDLVMDFESEFGVKVDDADLEKISTVGDIVSYIEKKLG

SEQ ID NO: 102 - protein, 80 aa, Lactobacillus johnsonii
MTEEEIFNKIADMISERFSIDRDKITKDLNFQNDLDADSIDFVELVMDLEDTFGAEIPDDDAEKLQTVGEAVEYIKSHQN

SEQ ID NO: 103 - protein, 154 aa, Oryza sativa
MEGLTSEQMVAFQEAFLLFDKNGDGCITLEELAAVTRSLGLEPTDQELNDMMREVDTDGNGIIDFQEFLSLIARKMKDGDGDEELKEAFEVLDKDQNGFISPTELRTVMTNLGEKMTDEEVEQMIREADTDGDGQVNYDEFVIMMKNAERKISG

SEQ ID NO: 104 - protein, 149 aa, Zea mays
MADQLTDEQIAEFKEAFSLFDKDGDGCITTKELGTVMRSLGQNPTEAELQDMINEVDADGNGTIDFPELLNLMARKMKDTDSEEELKEAFRVFDKDQNGFISAAELRHVMTNLGEKLTDEEVDEMIREADVDGDGQINYEEFVKVMMAK

SEQ ID NO: 105 - protein, 147 aa, Saccharomyces cerevisiae
MSSNLTEEQIAEFKEAFALFDKDNNGSISSSELATVMRSLGLSPSEAEVNDLMNEIDVDGNHQIEFSEFLALMSRQLKSNDSEQELLEAFKVFDKNGDGLISAAELKHVLTSIGEKLTDAEVDDMLREVSDGSGEINIQQFAALLSK

SEQ ID NO: 106 - protein, 149 aa, Capsicum annuum
MADQLTDDQISEFKEAFSLFDKDGDGCITTKELGTVMRSLGQNPTEAELQDMINEVDADGNGTIDFPEFLNLMARKMKDTDSEEELKEAFRVFDKDQNGFISAAELRHVMTNLGEKLTDEEVDEMIREADVDGDGQINYDEFVKVMMAK

SEQ ID NO: 107 - protein, 417 aa, Bos taurus
MLLPVPLLLGLLGLAAADPTVYFKEQFLDGDGWTERWIESKHKPDFGKFVLSSGKFYGDQEKDKGLQTSQDARFYALSARFEPFSNKGQTLVVQFTVKHEQNIDCGGGYVKLFPAGLDQTDMHGDSEYNIMFGPDICGPGTKKVHVIFNYKGKNVLINKDIRCKDDEFTHLYTLIVRPNNTYEVKIDNSQVESGSLEDDWDFLPPKKIKDPDAAKPEDWDDRAKIDDPTDSKPEDWDKPEHIPDPDAKKPEDWDEEMDGEWEPPVIQNPEYKGEWKPRQIDNPEYKGIWIHPEIDNPEYSPDSNIYAYENFAVLGLDLWQVKSGTIFDNFLITNDEAYAEEFGNETWGVTKAAEKQMKDKQDEEQRLHEEEEEKKGKEEEEADKDDDEDKDEDEEDEDEKEEEEEEDAAAGQAKDEL

SEQ ID NO: 108 - protein, 420 aa, Zea mays
MAIRKGSSYAVAALLALASVAAVAGEVFFQEKFEDGWESRWVKSEWKKDENMAGEWNHTSGKWNGDAEDKGIQTSEDYRFYAISAEYPEFSNKDKTLVLQFSVKHEQKLDCGGGYVKLLGGDVDQKTLGGDTSYSIISRPDISRYSTKKVHTILTKDGKNHLIKKDVPCQTDQLTHVYTFIIRPDATYSILIDNEEKHTGSIYEHWDILPPKKIKDPEAKKPEDWDDKEYIPDPEDKKPEGYDDIPKEIPDPDAKKPEDWDDEEDGEWTAPTIPNPEYKGPWKQKKIKNPNYQGKWKAPMIDNPDFKDDPYIYAFDSLKYIGIELWQVKSGTLFDNIIITDDPALAKTFAEETWGKHKEAEKAAFDEAEKKKEEEDAAKGGDDEDDDLEDEEDDEKADEDKADSDAEDGKDSDDEKHDEL

SEQ ID NO: 109 - protein, 54 aa, Gallus gallus
LAWIPLDGGESEEVVLSGDADSYVIEGLLPNTEYEVSLLAVFDDETESEVVAVL

SEQ ID NO: 110 - protein, 50 aa, Bos taurus
LEYSREGLVWEDIDWIDNGECLDLIEKKLGLLALINEESHFPQATDSTLL

SEQ ID NO: 111 - protein, 50 aa, Sus scrofa
VPKCEWEYPEDCEQVHEGKKLMQCLPNLEEIKLALELYKLSLETKLLELQ

SEQ ID NO: 112 - protein, 51 aa, Gallus gallus
LQQQFNMHVFKLEQEEYMKEQIPWTLIDFYDNQPCINLIEAKMGVLDLLDE

SEQ ID NO: 113 - protein, 58 aa, Sus scrofa
LCINFANEHLQQFFVRHVFKLEQEEYDLESIDWLHIEFTDNQDALDMIANKPMNIISL

SEQ ID NO: 114 - protein, 50 aa, Gallus gallus
LFVKEPPILITHPLEDQMVMVGERVEFECEVSEEGATVKWEKDGVELTRE

SEQ ID NO: 115 - protein, 101 aa, Sus scrofa
EDEDDKTVSDLAVVLFETATLRSGYLLPDTKAYGDRIERMLRLSLNIDPDAKVEEEPEEEPEETTEDTTEDTEQDDDEEMDAGADEEEQETSETSTAEKDE

SEQ ID NO: 116 - protein, 100 aa, Sus scrofa
DEDDKTVSDLAVVLFETATLRSGYLLPDTKAYGDRIERMLRLSLNIDPDAKVEEEPEEEPEETTEDTTEDTEQDDDEEMDAGADEEEQETSETSTAEKDE

SEQ ID NO: 117 - protein, 100 aa, Gallus gallus
NWIVDHVNKALHSTVKQHSFIGVLDIYGFETFEINSFEQFCINYANEKLQQQFNMHVFKLEQEEYMKEQIPWTLIDFYDNQPCINLIEAKMGVLDLLDEE

SEQ ID NO: 118 - protein, 101 aa, Sus scrofa
EVKNPRRSIGLLDIFGFENFAVNSFEQLCINFANEHLQQFFVRHVFKLEQEEYDLESIDWLHIEFTDNQDALDMIANKPMNIISLIDEESKFPKGTDTTML

SEQ ID NO: 119 - protein, 100 aa, Gallus gallus
LMVEVANPDADVKWLKNGQEIQVSGSKYIFEAIGNKRILTINHCSLADDAAYECVVAEEKSFTELFVKEPPILITHPLEDQMVMVGERVEFECEVSEEGA

SEQ ID NO: 120 - protein, 101 aa, Gallus gallus
NGQEIQVSGSKYIFEAIGNKRILTINHCSLADDAAYECVVAEEKSFTELFVKEPPILITHPLEDQMVMVGERVEFECEVSEEGATVKWEKDGVELTREETF

SEQ ID NO: 121 - protein, 203 aa, Bos taurus
EPPVDEYAPEDIMEYDYEYGEAEYKEAESVTETPTVTEETIAQTEANIVDDFQEYNYGTESYQTEAPRSVSGSNEPNPVEEVFTEEYLTGEDYDSQRKNSEDMLYENKQIDGRDSDLLVDGDLGEYDFYEYKEYEDKPTSPTNEEFGPGVPAETDITETSINGHGAYGEKGQKGEPAVVEPGMLIEGPPGPAGPAGLMGPPGL

SEQ ID NO: 122 - protein, 201 aa, Bos taurus
  MOD_RES (9)..(9): Any amino acid
DYCEHYSPXCDSSAPEAAQAQEPPVDEYAPEDIMEYDYEYGEAEYKEAESVTETPTVTEETIAQTEANIVDDFQEYNYGTESYQTEAPRSVSGSNEPNPVEEVFTEEYLTGEDYDSQRKNSEDMLYENKQIDGRDSDLLVDGDLGEYDFYEYKEYEDKPTSPTNEEFGPGVPAETDITETSINGHGAYGEKGQKGEPAVVE

SEQ ID NO: 123 - protein, 201 aa, Bos taurus
ISLTDENALAGNEELTVKIKCDKEKNLLHVTDTGVGMTREELVKNLGTIAKSGTSEFLNKMTEAQEDGQSTSELIGQFGVGFYSAFLVADKVIVTSKHNNDTQHIWESDSNEFSVIADPRGNTLGRGTTITLVLKEEASDYLELDTIKNLVKKYSQFINFPIYVWSSKTETVEEPAEEEEAAKEDKEESDDEAAVEEEEDE

SEQ ID NO: 124 - protein, 202 aa, Gallus gallus
TDENALAGNEELTVKIKCDKEKNMLHVTDTGIGMTKEELIKNLGTIAKSGTSEFLNKMTEMQDDSQSTSELIGQFGVGFYSAFLVADRVIVTSKHNNDTQHIWESDSNEFSVIDDPRGNTLGRGTTITLVLKEEASDYLELDTVKNLVKKYSQFINFPIYVWSSKTETVEEPVEEEEAKEEKEETDDNEAAVEEEEEEKKPK

SEQ ID NO: 125 - protein, 201 aa, Spinacia oleracea
YEIETLTGWLLKQEMAGVIDAELTIVLSSISLACKQIASLVQRAGISNLTGIQGAVNIQGEDQKKLDVVSNEVFSSCLRSSGRTGIIASEEEDVPVAVEESYSGNYIVVFDPLDGSSNIDAAVSTGSIFGIYSPNDECIVDSDHDDESQLSAEEQRCVVNVCQPGDNLLAAGYCMYSSSVIFVLTIGKGVYAFTLDPMYGE

SEQ ID NO: 126 - protein, 203 aa, Bos taurus
TEASLQKLQQLRDEELRRLEDEACRAAQEFLESLNFDEIDECVRNIERSLSVGSGCTGEQGAGAEKPSFNFSQPYPEEEEVDEGFEADDDAFKDSPNPSEHGHSDQRTSGIRTSDESSEEDPYMNDTVVPTSPSADSTVLLAPSEHDSSAGEPTYCLPQTPGALPAPEGDYDYDQDDYEDGAITSGSSVTFSNSCSSQWSPDY

SEQ ID NO: 127 - protein, 178 aa, Sus scrofa; identical to SEQ ID NO: 95

SEQ ID NO: 128 - protein, 142 aa, Equus caballus
MALAAADRATVRALWKKMGSNVGVYATEALERMFLGFPSTTTYFLHLDLSLGSTQVKAHGQKVADALTLAVEHLEDLPRALSALRHRHVRELRVDPASFQLLGHCLLVTPARHFPGDFSPTLHASLVKFLSHVISALASDCR

SEQ ID NO: 129 - protein, 141 aa, Bos taurus
MLSAQERAHITQVWDLIAGHEAPFGAELLRRLFTVYPSTKVYFRHLGDHPDEVQLLSHGQRMLQAVGVAVQYMDNLRAVLSPLADLHAQVLRVDPTNFPLVIQCFQVVLASHLQGEFTVEMQAAWDKFLTGVAVVLTEKYR

SEQ ID NO: 130 - protein, 147 aa, Anas platyrhynchos
MVHWTAEEKQLITGLWGKVNVADCGAEALARLLIVYPWTQRFFASFGNLSSPTAILGNPMVRAHGKKVLTSFGDAVKNLDNIKNTFAQLSELHCDKLHVDPENFRLLGDILIIVLAAHFTKDFTPECQAAWQKLVRVVAHALARKYH

SEQ ID NO: 131 - protein, 162 aa, Ovis orientalis
IIVTQTMKGLDIQKVAGTWHSLAMAASDISLLDAQSAPLRVYVEELKPTPEGNLEILLQKWENGECAQKKIIAEKTKIPAVFKIDALNENKVLVLDTDYKKYLLFCMENSAEPEQSLACQCLVRTPEVDNEALEKFDKALKALPMHIRLAFNPTQLEGQCHV

SEQ ID NO: 132 - protein, 51 aa, Gallus gallus
LLGLLLAWLLLLGLLFGLIALAEEVRKLKSRVDNLEKINHSFLTVNQGNPY

SEQ ID NO: 133 - protein, 51 aa, Bos taurus
KWLLGLLLTWLLLLGLLFGLIALAEEVRKLKARVEELEKMRGRLSYNEKME

SEQ ID NO: 134 - protein, 53 aa, Saccharomyces cerevisiae
RPLLTLSSATRSVLFSLLASDMSIILSISPNTGILLCIGHLLASDIEDVVIVL

SEQ ID NO: 135 - protein, 52 aa, Equus grevyi
VGDALTLAVGHLDDLPGALSNLSDLHAHKLRVDPVNFKLLSHCLLSTLAVHL

SEQ ID NO: 136 - protein, 52 aa, Bubalus bubalis
VAAALTKAVGHLDDLPGALSELSDLHAHKLRVDPVNFKLLSHSLLVTLASHL

SEQ ID NO: 137 - protein, 52 aa, Bos taurus
ILAAILHLGNLKFVVDGDTTLIEDGKLVSIIAELLSTKTDMVEKALLYRTVA

SEQ ID NO: 138 - protein, 52 aa, Gallus gallus
SDGLLALHLKETSTAGGKGDLLLVSPHLIELVTRLHQTLMDATAQALPLSIA

SEQ ID NO: 139 - protein, 51 aa, Bos taurus
KLLKDVEVLSQRLEEKALAYDKLEKTKTRLQQELDDLLVDLDHQRQIVSNL

SEQ ID NO: 140 - protein, 51 aa, Gallus gallus
LHLPFLFDSQWHKLMISVETTSVTLFIDCIKVETLNIKPKGKISVDGFSVL

SEQ ID NO: 141 - protein, 52 aa, Saccharomyces cerevisiae
MIHGGVRYLEKAFWEFSKAQLDLVIEALNERKHLINTAPHLCTVLPILIPIY

SEQ ID NO: 142 - protein, 52 aa, Saccharomyces cerevisiae
LIMKRNFLSWKRGLQLNYNVTRLEEWCKTHGLTDGTECLQHLIQTAKLLQVR

SEQ ID NO: 143 - protein, 53 aa, Saccharomyces cerevisiae
LYLEEVSKNLVEINPLKLEVKAKPWFVYTPMHGVGFDIFSTIVKKTLCLVEGK

SEQ ID NO: 144 - protein, 51 aa, Saccharomyces cerevisiae
KLFTFLNEFDAVLCKFQVVDSMHTKIFNDTLKYLNVMLFNDLITKCPALNW

SEQ ID NO: 145 - protein, 51 aa, Zea mays
EMLVNLGVPWVILGHSERRALLGESNEFVGDKVAYALSQGLKVIACVGETL

SEQ ID NO: 146 - protein, 51 aa, Gallus gallus
GVDGSLQTASFLHLPFLFDSQWHKLMISVETTSVTLFIDCIKVETLNIKPK

SEQ ID NO: 147 - protein, 102 aa, Saccharomyces cerevisiae
VNVIRRESGNPDLLELLMDLNCYTLEVTEGYLKKVNVTEVNGDNVLGPIHVITTVVSSLVRNGLLIQSSKFISKVLLTVESIVMSLPKDETMLGGIFWLSNL

SEQ ID NO: 148 - protein, 103 aa, Bos taurus
LLWALAAALQRREPNLVSRLERHGVELKVAKAEVELSVKRLRAWGARVQAQGCALQVAELRGPVLRLREPLGVLAIVCPDEWPLLAFVSLLAPALAHGNTVVL

SEQ ID NO: 149 - protein, 101 aa, Gallus gallus
LQAVAKDKLVMAEAVQKVNRANGKTVPRLLLLTTEHLVLADPKAAQPKMVLSLCDIQGASVSRFSDGLLALHLKETSTAGGKGDLLLVSPHLIELVTRLHQ

SEQ ID NO: 150 - protein, 102 aa, Saccharomyces cerevisiae
LTLIYLNDLENETLKVFDKIYSTWLVKFMKHASAHIEIFDMVLNEKLFKNSGDEKFAKLFTFLNEFDAVLCKFQVVDSMHTKIFNDTLKYLNVMLFNDLITK

SEQ ID NO: 151 - protein, 101 aa, Bos taurus
VLMRNVALPEDIRGKCTALLQLYDASNSEWQLGKTKVFLRESLEQKLEKRQEEEVTRAAMVIRAHVLGYLARKQYKKVLDCVVIIQKNYRAFLLRRRFLHL

SEQ ID NO: 152 - protein, 101 aa, Ovis aries
WLLLCNPGLAELIAEKIGEDYVKDLSQLTKLNSFLGDDIFLREISNVKQENKLKFSQFLEKEYKVKINPSSMFDVQVKRIHEYKRQLLNCLHVVTMYNRIK

SEQ ID NO: 153 - protein, 102 aa, Sus scrofa
LDTQKVAGTWHTVAMAVSDVSLLDAKSSPLKAYVEGLKPTPEGDLEILLQKRENDKCAQEVLLAKKTDIPAVFKINALDENQLFLLDTDYDSHLLLCMENSA

SEQ ID NO: 154 - protein, 102 aa, Bos taurus
SLWAKVNVEVVGGESLARLLIVCPWTQRFFDSFGNLYSESAIMGNPKVKVYGRKVLNSFGNAIKHMDDLKGTFADLSELHCDKLHVDPENFRLLGNMILIVL

SEQ ID NO: 155 - protein, 106 aa, Sus scrofa
LLNRLADLIERDRTYLAALETLDNGKPYVISYLVDLDMVLKCLRYYAGWADKYHGKTLPIDGDYFSYTRHEPVGVCGQIIPWNFPLLMQAWKLGPALATGNVVVMK

SEQ ID NO: 156 - protein, 101 aa, Gallus gallus
QGMLEYKKEDEQKLVKNLILELKPRGVAVNLIPGLPAYILFMCVRHADYLNDDQKVRSLLTSTINGIKKVLKKRGDDFETVSFWLSNTCRFLHCLKQYSGE

SEQ ID NO: 157 - protein, 469 aa, Oryza sativa
MPREIITIQVGQCGNQIGMEFWKQLCLEHGIGKDGLLEDFATQGGDRKDVFFYQADDQHYIPRALLVDLEPRVINGIQNSEYRNLYNHENIFVAEHGGGAGNNWASGYHQGEQVVDDIMDMIDREADGSDSLEGFVLCHSIAGGTGSGMGSYLLETLNDRYSKKLVQTYSVFPNQMETSDVVVQPYNSLLTLKRLTLNADCVVVLDNTALNRIAVERLHLANPTFAQTNSLVSTVMSASTTTLRYPGYMNNDLVGLLASLIPTPRCHFLMTGYTPLTVERQVNMIRKTTVLDVMRRLLQTKNIMVSSYARNKEASQAKYISILNIIQGEVDPTQVHESLQRIRERKLVNFIEWGPASIQVALSRKSPYVQTTHRVSGLMLANHTSIRHLFSKCLGQYEKLRKKQAFLDNYRKFPMFEDNDLSEFDESREIIESLVDEYKACESPDYIKWGMEDAGEANVAAALDSKLVV

SEQ ID NO: 158 - protein, 202 aa, Saccharomyces cerevisiae
QVKPKLVNVIRRESGNPDLLELLMDLNCYTLEVTEGYLKKVNVTEVNGDNVLGPIHVITTVVSSLVRNGLLIQSSKFISKVLLTVESIVMSLPKDETMLGGIFWLSNLSRLPAFAANQKTLYEANGGDEKDKLTLIYLNDLENETLKVFDKIYSTWLVKFMKHASAHIEIFDMVLNEKLFKNSGDEKFAKLFTFLNEFDAVL

SEQ ID NO: 159 - protein, 202 aa, Oryza sativa
HVPRAVLMDLEPGTMDSLRSGPIGGIFRPDNFVFGQSGAGNNWAKGHYTEGAELIDSVLDVVRKEAENCDCLQGFQVCHSLGGGTGSGMGTLLISKIREEYPDRMMLTFSVFPSPKVSDTVVEPYNATLSVHQLVENADECMVLDNEALYDICFRTLKLTNPSFGDLNHLISATMSGVTCCLRFPGQLNSDLRKLAVNLIPF

SEQ ID NO: 160 - protein, 202 aa, Saccharomyces cerevisiae
TLEVTEGYLKKVNVTEVNGDNVLGPIHVITTVVSSLVRNGLLIQSSKFISKVLLTVESIVMSLPKDETMLGGIFWLSNLSRLPAFAANQKTLYEANGGDEKDKLTLIYLNDLENETLKVFDKIYSTWLVKFMKHASAHIEIFDMVLNEKLFKNSGDEKFAKLFTFLNEFDAVLCKFQVVDSMHTKIFNDTLKYLNVMLFNDL

SEQ ID NO: 161 - protein, 201 aa, Zea mays
YSKKLVQTYSVFPNQVETSDVVVQPYNSLLTLKRLTLNADCVVVLDNTALNRIAVERLHLSNPTFAQTNSLVSTVMSASTTTLRYPGYMNNDLVGLLASLIPTPRCHFLMTGYTPLTVERQVNMIRKTTVLDVMRRLLQTKNIMVSSYARTKEASQAKYISILNIIQGEVDPTQVHESLQRIRERKLVNFIDWAPASIQVA

SEQ ID NO: 162 - protein, 52 aa, Pinus thunbergii
MIIPNLLPNLLSNLLSNLLPILPSILVPLVGLLLPAITMVLSHLYIQKDEIL

SEQ ID NO: 163 - protein, 95 aa, Porphyra purpurea
MYKTLLAQVFFHSIAKKKLYFFWLPRLFSLLLVPGFLFDIEILFLFHPIILLHASLGLSVIIEDYIHIETIKFQYLSLIKLLLVLLINLNILYLL

SEQ ID NO: 164 - protein, 62 aa, Synechococcus elongatus
MVILFQLALLLLVVMSFVLIVGVPVLYATNGDRVQSNRLILVGGLAWTALVVLVGVLNYFVV

SEQ ID NO: 165 - protein, 62 aa, Porphyra purpurea
MIIAIQLLVLLLITLSTILVVGVPVVLASPGQWEQSKGLIYTGAGLWTGLVIVTSLVNSLVV

SEQ ID NO: 166 - protein, 105 aa, Salmo trutta
RNQPTAALGHLLPEGTPVPLIPVLIIIETISLFIRPLALGVRLTANLTAGHLLIQLIATAAFVLLPMMPTVAILTSIVLFLLTLLEIAVAMIQAYVFVLLLSLYL

SEQ ID NO: 167 - protein, 227 aa, Struthio camelus
MNLSFFDQFASPQLLGIPLILLSLLFPTLLLPSPNNRWINNRLSTLQLWFLQLITKQLMMPLNKAGHKWALILTSLMTFLLLINLLGLLPYTFTPTTQLSMNMALAFPLWLATLLTGLRNQPSISLGHLLPEGTPTPLIPALILIETTSLLIRPLALGVRLTANLTAGHLLIQLISTATLALLPTMPTISVLTATVLLLLTILELAVAMIQAYVFVLLLSLYLQENI

SEQ ID NO: 168 - protein, 225 aa, Alligator mississippiensis
MNLFDQFLTPSLLGISLLMPALLMTTILLLNPKNQWLSHPTTTIKSWFINQAAKQIMTPINPTGHKHSLILISLLILLSLTNLLGLLPYTFTPTTQLSMNMAIALPLWLVTVLIGLRTQPTTSLAHLLPEGTPMLLIPILILIETISLLIRPIALGVRLTANLTAGHLLIQLISIATLNLWFMMPPLSLLTSTVLILLLLLEFAVAMIQAYVFVLLLSLYLQENS

SEQ ID NO: 169 - protein, 56 aa, Pinus koraiensis
MIIPNLPFNLPFNLPFNLPFNLPSILPSILVPLVGLLLPAITMVLSHLYIQNDEIL

SEQ ID NO: 170 - protein, 227 aa, Gallus gallus
MNLSFFDQFSSPCLLGIPLILPSLLLPALLLPSPGNRWINNRLSTIQLWFTHLITKQLMTPLNKAGHKWALLLTSLILMLLSINLLGLLPYTFTPTTQLSMNMALALPLWLATLLTGLRNQPSASLGHLLPEGTPTPLIPALIMIETTSLLIRPLALGVRLTANLTAGHLLIQLISTATIALLPMMPSISALTALILFLLTILEVAVAMIQAYVFVLLLSLYLQENI

SEQ ID NO: 171 - protein, 219 aa, Oncorhynchus masou
FMSPTYLGIPLIAVALTLPWILFPTPSARWLNNRLITLQGWFINRFTQQLLLPLNLGGHKWAALLTSLMLFLITLNMLGLLPYTFTPTTQLSLNMGLAVPLWLATVIIGMRNQPTAALGHLLPEGTPVPLIPVLIIIETISLFIRPLALGVRLTANLTAGHLLIQLIATAAFVLLPLMPTVAILTSIVLFLLTLLEIAVAMIQAYVFVLLLSLYLQENV

SEQ ID NO: 172 - protein, 98 aa, Lagenorhynchus albirostris
MSLVHINVLIAFTVSLTGLLMYRSHLMSALLCLEGMVLSLFILAALTILNTHFTLANMMPIILLVFAACEAAIGLALLVMVSNTYGTDYVQNLNLLQC

SEQ ID NO: 173 - protein, 223 aa, Oncorhynchus mykiss
MTLSFFDQFMSPTYLGIPLIAVALTLPWILFPTPSARWLNNRLITLQGWFINRFTQQLLLPLNLGGHKWAALLTSLMLFLITLNMLGLLPYTFTPTTQLSLNMGLAVPLWLATVIIGMRNQPTAALGHLLPEGTPVPLIPVLIIIETISLFIRPALGVRLTANLTAGHQLIATAAFVLLPMMPTVAILTSIVLFLLTLLEIAVAMIQAYVFVLLLSLYLQENV

SEQ ID NO: 174 - protein, 133 aa, Thunnus obesus
LALTLPWVLFPTPTSRWLNNRLLTLQNWFIGRFGHELFTPVNLPGHKWAVLLTSLMLFLISLNMLGLLPYTFTPTTQLSLNMGLAFPLWLATVIIGMRNQPTEALGHLLPEGTPTLLIPVLIVIETISLFIRP

SEQ ID NO: 175 - protein, 58 aa, Brassica tournefortii
GFAWTMLCMNEIFYFIGALGPLFIVLALTGLELGVAILQAYVFTILICIYLNDAINLH

SEQ ID NO: 176 - protein, 226 aa, Bos indicus
MNENLFASFITPVILGLPLVTLIVLFPSLLFPTSNRLVSNRFVTLQQWMLQLVSKQMMSIHNSKGQTWALMLMSLILFIGSTNLLGLLPHSFTPTTQLSMNLGMAIPLWAGAVITGFRNKTKASLAHFLPQGTPTPLIPMLVIIETISLFIQPVALAVRLTANITAGHLLIHLIGGATLALMSISTTTALITFTILILLTILEFAVAMIQAYVFTLLVSLYLHDNT

SEQ ID NO: 177 - protein, 108 aa, Populus trichocarpa
VFLGLGLILGGLGVVLLTNPIFSAFSLGLVLVCISLFYILSNSHFVAAAQLLIYVGAINVLILFAVMFMNGSEYYKDFNLWTVGNGLTSLICTSLFVLLITIISNTTW

SEQ ID NO: 178 - protein, 103 aa, Brassica napus
HFFSFLLPAGVPLPLAPFLVLLELISYCFRALSLGIRLFANMMAGHSLVKILSGFAWTMLCMNEIFYFIGALGPLFIVLALTGLELGVAILQAYVFTILICIY

SEQ ID NO: 179 - protein, 101 aa, Triticum aestivum
CECYFDLSGLILCPVLGSIILLFIPNSSIRLIRLIGLCVSLITFLYSLVLWIQFDPSTAKFQFVESLRWLPYENIHLYMGIDGLSLFFVILTTFLIPICIL

SEQ ID NO: 180 - protein, 101 aa, Oncorhynchus mykiss
WFVASLANLALPPLPNLMGELMIITSMFNWSYWTLILTGLGTLITASYSLYLFLMTQRGPLPSHIIALEPTHTREHLLIILHLIPIVLLILKPELMWGWCF

SEQ ID NO: 181 - protein, 101 aa, Phoca vitulina
YSLLISLISLSFLNQLGDNCMSLSLLFFTDSLSAPLLALTTWLLPLMLMASQFHLSKEPLTRKKLYITMLILLQLFLIMTFTATELIMFYILFEATLVPTL

SEQ ID NO: 182 - protein, 102 aa, Equus asinus
WYFLFAYAILRSIPNKLGGVLALILSILILALIPTLHMSKQRSMMFRPLSQCVFWLLVADLLTLTWIGGQPVEHPYVIIGQLASILYFSLILIFMPLASTIE

SEQ ID NO: 183 - protein, 102 aa, Fagopyrum esculentum
QLLIYVGAINVLIIFAVMFINGLEYDKNLRLFTLGDGMTLVICTGIFFLLITTILNTSGYGIIWTTKLNQILEQDLINNSQQIGIHLSTDFFPPFELISIIL

SEQ ID NO: 184 - protein, 101 aa, Triticum aestivum
LYSLVLWIQFDPSTAKFQFVESLRWLPYENIHLYMGIDGLSLFFVILTTFLIPICILVGWSGMRSFGKEYIIAFLICEFLMIAVFCMLDLLLFYVFFESVL

SEQ ID NO: 185 - protein, 101 aa, Triticum aestivum
GSIILLFIPNSSIRLIRLIGLCVSLITFLYSLVLWIQFDPSTAKFQFVESLRWLPYENIHLYMGIDGLSLFFVILTTFLIPICILVGWSGMRSFGKEYIIA

SEQ ID NO: 186 - protein, 107 aa, Triticum aestivum
MIAVFCMLDLLLFYVFFESVLIPMFIIIGVWGSRQRKIKAAYQFFLYTLLGSVFMLLAILLILLQTGTTDLQILLTTEFSERRQILLWIAFFASFAVKVPMVPVHIW

SEQ ID NO: 187 - protein, 102 aa, Brassica napus
SFFLLLIHFITKKGGGNLVPNAWQSLVELLYDFVLNLVKEQIGGLSGNVKQMFFPCILVTFLFLLFCNLQGMIPYSFTVTSHFLITLALSFSIFIGITIVGF

SEQ ID NO: 188 - protein, 102 aa, Alligator mississippiensis
LPLWLVTVLIGLRTQPTTSLAHLLPEGTPMLLIPILILIETISLLIRPIALGVRLTANLTAGHLLIQLISIATLNLWFMMPPLSLLTSTVLILLLLLEFAVA

SEQ ID NO: 189 - protein, 101 aa, Coturnix coturnix
LMGMPLILPSLLLPTLLFPTPGRRWISNRLSTLQLWVINLITKQLMTPLNKTGHKWALLLTSLILLLLSINLMGLLPYTFTPTTQLSMNMALAFPLWLATL

SEQ ID NO: 190 - protein, 102 aa, Gallus gallus
WALLLTSLILMLLSINLLGLLPYTFTPTTQLSMNMALALPLWLATLLTGLRNQPSASLGHLLPEGTPTPLIPALIMIETTSLLIRPLALGVRLTANLTAGHL

SEQ ID NO: 191 - protein, 101 aa, Alligator mississippiensis
KQIMTPINPTGHKHSLILISLLILLSLTNLLGLLPYTFTPTTQLSMNMAIALPLWLVTVLIGLRTQPTTSLAHLLPEGTPMLLIPILILIETISLLIRPIA

SEQ ID NO: 192 - protein, 102 aa, Coturnix coturnix
LATLLIGLRNQPSASLAHLLPEGTPTPLIPILIMIETTSLLIRPLALGVRLTANLTAGHLLIQLISTATIALLPTMPSISTLTALILLLLTILEVAVAMIQA

SEQ ID NO: 193 - protein, 50 aa, Gallus gallus
LEFLSMINVNLLSISNLPKLNKLRKLELSDNRISGGLEVLAERTPNLTHL

SEQ ID NO: 194 - protein, 50 aa, Gallus gallus
FLSMINVNLLSISNLPKLNKLRKLELSDNRISGGLEVLAERTPNLTHLNL

SEQ ID NO: 195 - protein, 50 aa, Gallus gallus
LSMINVNLLSISNLPKLNKLRKLELSDNRISGGLEVLAERTPNLTHLNLS

SEQ ID NO: 196 - protein, 146 aa, Gallus gallus
MEMKKRLTLELRNKKPGEVKELVLDNCRSDDGKIVGLSSDFENLEFLSMINVNLLSISNLPKLNKLRKLELSDNRISGGLEVLAERTPNLTHLNLSGNKIKDINTLEPLKKLPNLHSLDLFNCEVTMLINYRESVFTLLPQLTYLD

SEQ ID NO: 197 - protein, 147 aa, Gallus gallus
MEMKKRLTLELRNKKPGEVKELVLDNCRSDDGKIVGLSSDFENLEFLSMINVNLLSISNLPKLNKLRKLELSDNRISGGLEVLAERTPNLTHLNLSGNKIKDINTLEPLKKLPNLHSLDLFNCEVTMLINYRESVFTLLPQLTYLDG

SEQ ID NO: 198 - protein, 148 aa, Gallus gallus
MEMKKRLTLELRNKKPGEVKELVLDNCRSDDGKIVGLSSDFENLEFLSMINVNLLSISNLPKLNKLRKLELSDNRISGGLEVLAERTPNLTHLNLSGNKIKDINTLEPLKKLPNLHSLDLFNCEVTMLINYRESVFTLLPQLTYLDGF

SEQ ID NO: 199 - protein, 149 aa, Gallus gallus
MEMKKRLTLELRNKKPGEVKELVLDNCRSDDGKIVGLSSDFENLEFLSMINVNLLSISNLPKLNKLRKLELSDNRISGGLEVLAERTPNLTHLNLSGNKIKDINTLEPLKKLPNLHSLDLFNCEVTMLINYRESVFTLLPQLTYLDGFD

SEQ ID NO: 200 - protein, 150 aa, Gallus gallus
MEMKKRLTLELRNKKPGEVKELVLDNCRSDDGKIVGLSSDFENLEFLSMINVNLLSISNLPKLNKLRKLELSDNRISGGLEVLAERTPNLTHLNLSGNKIKDINTLEPLKKLPNLHSLDLFNCEVTMLINYRESVFTLLPQLTYLDGFDA

SEQ ID NO: 201 - protein, 151 aa, Gallus gallus
MEMKKRLTLELRNKKPGEVKELVLDNCRSDDGKIVGLSSDFENLEFLSMINVNLLSISNLPKLNKLRKLELSDNRISGGLEVLAERTPNLTHLNLSGNKIKDINTLEPLKKLPNLHSLDLFNCEVTMLINYRESVFTLLPQLTYLDGFDAD

SEQ ID NO: 202 - protein, 152 aa, Gallus gallus
MEMKKRLTLELRNKKPGEVKELVLDNCRSDDGKIVGLSSDFENLEFLSMINVNLLSISNLPKLNKLRKLELSDNRISGGLEVLAERTPNLTHLNLSGNKIKDINTLEPLKKLPNLHSLDLFNCEVTMLINYRESVFTLLPQLTYLDGFDADE

SEQ ID NO: 203 - protein, 153 aa, Gallus gallus
MEMKKRLTLELRNKKPGEVKELVLDNCRSDDGKIVGLSSDFENLEFLSMINVNLLSISNLPKLNKLRKLELSDNRISGGLEVLAERTPNLTHLNLSGNKIKDINTLEPLKKLPNLHSLDLFNCEVTMLINYRESVFTLLPQLTYLDGFDADEQ

SEQ ID NO: 204 - protein, 154 aa, Gallus gallus
MEMKKRLTLELRNKKPGEVKELVLDNCRSDDGKIVGLSSDFENLEFLSMINVNLLSISNLPKLNKLRKLELSDNRISGGLEVLAERTPNLTHLNLSGNKIKDINTLEPLKKLPNLHSLDLFNCEVTMLINYRESVFTLLPQLTYLDGFDADEQE

SEQ ID NO: 205 - protein, 161 aa, Gallus gallus
MEMKKRLTLELRNKKPGEVKELVLDNCRSDDGKIVGLSSDFENLEFLSMINVNLLSISNLPKLNKLRKLELSDNRISGGLEVLAERTPNLTHLNLSGNKIKDINTLEPLKKLPNLHSLDLFNCEVTMLINYRESVFTLLPQLTYLDGFDADEQEAPDSDPE

SEQ ID NO: 206 - protein, 50 aa, Bos taurus
LKVLQRNCAAYLKLRHWQWWRVFTKVKPLLQVTRQEEELQAKDEELLKVK

SEQ ID NO: 207 - protein, 67 aa, Bos taurus
YLKLRHWQWWRVFTKVKPLLQVTRQEEELQAKDEELLKVKEKQTKVEGELEEMERKHQQLLEEKNIL

SEQ ID NO: 208 - protein, 55 aa, Bos taurus
EEELQAKDEELLKVKEKQTKVEGELEEMERKHQQLLEEKNILAEQLQAETELFAE

SEQ ID NO: 209 - protein, 105 aa, Bos taurus
LARKAFAKKQQQLSALKVLQRNCAAYLKLRHWQWWRVFTKVKPLLQVTRQEEELQAKDEELLKVKEKQTKVEGELEEMERKHQQLLEEKNILAEQLQAETELFAE

SEQ ID NO: 210 - protein, 100 aa, Bos taurus
YLKLRHWQWWRVFTKVKPLLQVTRQEEELQAKDEELLKVKEKQTKVEGELEEMERKHQQLLEEKNILAEQLQAETELFAEAEEMRARLAAKKQELEEILH

SEQ ID NO: 211 - protein, 105 aa, Bos taurus
YLKLRHWQWWRVFTKVKPLLQVTRQEEELQAKDEELLKVKEKQTKVEGELEEMERKHQQLLEEKNILAEQLQAETELFAEAEEMRARLAAKKQELEEILHDLESR

SEQ ID NO: 212 - protein, 50 aa, Bos taurus
LEEAKKKLLKDVEVLSQRLEEKALAYDKLEKTKTRLQQELDDLLVDLDHQ

SEQ ID NO: 213 - protein, 50 aa, Bos taurus
GTIENLEEAKKKLLKDVEVLSQRLEEKALAYDKLEKTKTRLQQELDDLLV

SEQ ID NO: 214 - protein, 70 aa, Bos taurus
QLQALQAQLTDTKKKVDDDLGTIENLEEAKKKLLKDVEVLSQRLEEKALAYDKLEKTKTRLQQELDDLLV

SEQ ID NO: 215 - protein, 55 aa, Bos taurus
KKLLKDVEVLSQRLEEKALAYDKLEKTKTRLQQELDDLLVDLDHQRQIVSNLEKK

SEQ ID NO: 216 - protein, 65 aa, Bos taurus
KKLLKDVEVLSQRLEEKALAYDKLEKTKTRLQQELDDLLVDLDHQRQIVSNLEKKQKKFDQLLAE

SEQ ID NO: 217 - protein, 55 aa, Bos taurus
VDDDLGTIENLEEAKKKLLKDVEVLSQRLEEKALAYDKLEKTKTRLQQELDDLLV

SEQ ID NO: 218 - protein, 55 aa, Bos taurus
GTIENLEEAKKKLLKDVEVLSQRLEEKALAYDKLEKTKTRLQQELDDLLVDLDHQ

SEQ ID NO: 219 - protein, 50 aa, Bos taurus
KKLLKDVEVLSQRLEEKALAYDKLEKTKTRLQQELDDLLVDLDHQRQIVS

SEQ ID NO: 220 - protein, 65 aa, Bos taurus
DTKKKVDDDLGTIENLEEAKKKLLKDVEVLSQRLEEKALAYDKLEKTKTRLQQELDDLLVDLDHQ

SEQ ID NO: 221 - protein, 60 aa, Bos taurus
LEEAKKKLLKDVEVLSQRLEEKALAYDKLEKTKTRLQQELDDLLVDLDHQRQIVSNLEKK

SEQ ID NO: 222 - protein, 50 aa, Bos taurus
EKANKLQNELDNVSTLLEEAEKKGIKFAKDAAGLESQLQDTQELLQEETR

SEQ ID NO: 223 - protein, 50 aa, Bos taurus
EKALAYDKLEKTKTRLQQELDDLLVDLDHQRQIVSNLEKKQKKFDQLLAE

SEQ ID NO: 224 - protein, 60 aa, Bos taurus
DTKKKVDDDLGTIENLEEAKKKLLKDVEVLSQRLEEKALAYDKLEKTKTRLQQELDDLLV

SEQ ID NO: 225 - protein, 100 aa, Bos taurus
RSLEKQLQALQAQLTDTKKKVDDDLGTIENLEEAKKKLLKDVEVLSQRLEEKALAYDKLEKTKTRLQQELDDLLVDLDHQRQIVSNLEKKQKKFDQLLAE

SEQ ID NO: 226 - protein, 100 aa, Bos taurus
QLQALQAQLTDTKKKVDDDLGTIENLEEAKKKLLKDVEVLSQRLEEKALAYDKLEKTKTRLQQELDDLLVDLDHQRQIVSNLEKKQKKFDQLLAEEKNIS

SEQ ID NO: 227 - protein, 100 aa, Bos taurus
DTKKKVDDDLGTIENLEEAKKKLLKDVEVLSQRLEEKALAYDKLEKTKTRLQQELDDLLVDLDHQRQIVSNLEKKQKKFDQLLAEEKNISARYAEERDRA

SEQ ID NO: 228 - protein, 112 aa, Bos taurus
DTKKKVDDDLGTIENLEEAKKKLLKDVEVLSQRLEEKALAYDKLEKTKTRLQQELDDLLVDLDHQRQIVSNLEKKQKKFDQLLAEEKNISARYAEERDRAEAEAREKETKAL

SEQ ID NO: 229 - protein, 51 aa, Bos taurus
GKSALLDEKRRLEARIAQLEEELEEEQSNMELLNDRFRKTTLQVDTLNTEL

SEQ ID NO: 230 - protein, 51 aa, Bos taurus
QNKELKAKLQELEGAVKSKFKATISALEAKIGQLEEQLEQEAKERAAANKL

SEQ ID NO: 231 - protein, 89 aa, Bos taurus
IAQLEEELEEEQSNMELLNDRFRKTTLQVDTLNTELAAERSAAQKSDNARQQLERQNKELKAKLQELEGAVKSKFKATISALEAKIGQL

SEQ ID NO: 232 - protein, 99 aa, Bos taurus
ELLNDRFRKTTLQVDTLNTELAAERSAAQKSDNARQQLERQNKELKAKLQELEGAVKSKFKATISALEAKIGQLEEQLEQEAKERAAANKLVRRTEKKL

SEQ ID NO: 233 - protein, 110 aa, Gallus gallus
ILVLISGGESSDDIREGLLAVKQASIFSFSIGVLNADSAELQQIATDGSFAFTALDIRNLAALRELLLPNIVGVAQRLILLEAPTIVTEVIEVNKKDIVFLIDGSTALGT

SEQ ID NO: 234 - protein, 105 aa, Gallus gallus
ILVLISGGESSDDIREGLLAVKQASIFSFSIGVLNADSAELQQIATDGSFAFTALDIRNLAALRELLLPNIVGVAQRLILLEAPTIVTEVIEVNKKDIVFLIDGS

SEQ ID NO: 235 - protein, 118 aa, Gallus gallus
YSTKADVLDAVKALSFRGGKEANTGAALEYVVENLFTQAGGSRIEEAVPQILVLISGGESSDDIREGLLAVKQASIFSFSIGVLNADSAELQQIATDGSFAFTALDIRNLAALRELLL

SEQ ID NO: 236 - protein, 65 aa, Bos taurus
ALQEAHQQTLDDLQAEEDKVNTLTKAKTKLEQQVDDLEGSLEQEKKLRMDLERAKRKLEGDLKLA

SEQ ID NO: 237 - protein, 50 aa, Bos taurus
EEDKVNTLTKAKTKLEQQVDDLEGSLEQEKKLRMDLERAKRKLEGDLKLA

SEQ ID NO: 238 - protein, 55 aa, Bos taurus
LEDECSELKKDIDDLELTLAKVEKEKHATENKVKNLTEEMAGLDETIAKLTKEKK

SEQ ID NO: 239 - protein, 50 aa, Bos taurus
LEQEKKLRMDLERAKRKLEGDLKLAQESTMDIENDKQQLDEKLKKKEFEM

SEQ ID NO: 240 - protein, 50 aa, Bos taurus
DLEGSLEQEKKLRMDLERAKRKLEGDLKLAQESTMDIENDKQQLDEKLKK

SEQ ID NO: 241 - protein, 115 aa, Bos taurus
SELKKDIDDLELTLAKVEKEKHATENKVKNLTEEMAGLDETIAKLTKEKKALQEAHQQTLDDLQAEEDKVNTLTKAKTKLEQQVDDLEGSLEQEKKLRMDLERAKRKLEGDLKLA

SEQ ID NO: 242 - protein, 50 aa, Struthio camelus
RFFLVAILFLLFDLEIALLLPLPWAIQLSQPLLTLLWTSILLLLLTLGLV

SEQ ID NO: 243 - protein, 50 aa, Bos taurus
GLEVGSLLLPLLLLLLLLLWYCQIQYRPFFPLTATLGLAGFTLLLSLLAF

SEQ ID NO: 244 - protein, 52 aa, Gallus gallus
LQGSSLITALLLSTLMKLPPITLLLLTSQSLNTTLLTLLAISSTLIGGWMGL

SEQ ID NO: 245 - protein, 52 aa, Gallus gallus
LGLVPFHFWFPEVLQGSSLITALLLSTLMKLPPITLLLLTSQSLNTTLLTLL

SEQ ID NO: 246 - protein, 51 aa, Gallus gallus
LGTLHQLAIVTGILISQVLGLDFLLGNDELWPLLLGLSGVAALLQFFLLLL

SEQ ID NO: 247 - protein, 99 aa, Gallus gallus
LLMGLAKMGPSHILIIAGRAITGLYCGLSSGLVPMYVSEVSPTALRGALGTLHQLAIVTGILISQVLGLDFLLGNDELWPLLLGLSGVAALLQFFLLLL

SEQ ID NO: 248 - protein, 54 aa, Alligator mississippiensis
LKLITKELTLPLLATPTLFILAPTAALMLALAMWSPLPMPSPLADLNLGLLLLL

SEQ ID NO: 249 - protein, 99 aa, Alligator mississippiensis
LLIISILMAVAFLTALERKIMGHMQLRKGPNIVGPLGLLQPFADGLKLITKELTLPLLATPTLFILAPTAALMLALAMWSPLPMPSPLADLNLGLLLLL

SEQ ID NO: 250 - protein, 51 aa, Bos taurus
LWETPTLLWEAPLLGLDTAQGLELLSLLGTVLALGALLTRQLHHPLVYLLL

SEQ ID NO: 251 - protein, 68 aa, Bos taurus
LLQVLIILTGNYNFFNLLTLVLTTALLDDTHLAAKSSTSRRKRMPSSWPKALLAMLTLLLELAVYGLL

SEQ ID NO: 252 - protein, 51 aa, Bos taurus
LLTVLWVVPTLGTDRLLLALLLTLYLGLAHGLDQHDLRYLRAQLQRKLHLL

SEQ ID NO: 253 - protein, 92 aa, Bos taurus
LLCFVLHVISWLLIFSILLVFDYAELMGLKQVYYHVLGLGEPLALKSPRALRLFSHLRHPVCVELLTVLWVVPTLGTDRLLLALLLTLYLGL

SEQ ID NO: 254 - protein, 81 aa, Bos taurus
LLIFSILLVFDYAELMGLKQVYYHVLGLGEPLALKSPRALRLFSHLRHPVCVELLTVLWVVPTLGTDRLLLALLLTLYLGL

SEQ ID NO: 255 - protein, 50 aa, Oryza sativa
  subsp. japonica
LVLAALVILLALLLTLVLSHFLPLLLNPKAPKGSFGWPLLGETLRFLSPH

SEQ ID NO: 256 - protein, 52 aa, Oryza sativa
  subsp. japonica
MVGGELVLAALVILLALLLTLVLSHFLPLLLNPKAPKGSFGWPLLGETLRFL

SEQ ID NO: 257 - protein, 54 aa, Salmo salar
LLLPLNLGGHKWAVLLTSLMLFLITLNMLGLLPYTFTPTTQLSLNMGLAVPLWL

SEQ ID NO: 258 - protein, 50 aa, Pisum sativum
IPLFLHLLLMSRKLLMKRRTKVVRRMNLMLLLTLLLSPLSLRQGKLHWRL

SEQ ID NO: 259 - protein, 51 aa, Saccharomyces cerevisiae
KAFTSLLCGLGLSTTLAKAISLQRPLGLDKDVLLQAAEKFGLDLDLDHLLK

SEQ ID NO: 260 - protein, 50 aa, Bos taurus
GLFLLKLGLSLLMLLAGPDHPGLLCLFIASNRVFTEGTCKLLTLVVTDLV

SEQ ID NO: 261 - protein, 52 aa, Saccharomyces cerevisiae
LLNLGFITLCLLILFESLNSTVLIPLRDDEHLQLFNVLFNYLPLLKSNLTTL

SEQ ID NO: 262 - protein, 55 aa, Bos taurus
VTFLSLTDLQKNETLDHLISLSGAVQLRHLSNNLETLLKRDFLKLLPLELSFYLL

SEQ ID NO: 263 - protein, 52 aa, Bos taurus
LPLQMLLCLSGTYYALYFLATLLLLVYKSQVFTYPHSCLVLDLTLLFLMGIL

SEQ ID NO: 264 - protein, 243 aa, Bos taurus
ADAEERCDQLIKTKIQLEAKIKEVTERAEDEEEINAELTAKKRKLEDECSELKKDIDDLELTLAKVEKEKHATENKVKNLTEEMAGLDETIAKLTKEKKALQEAHQQTLDDLQAEEDKVNTLTKAKTKLEQQVDDLEGSLEQEKKLRMDLERAKRKLEGDLKLAQESTMDIENDKQQLDEKLKKKEFEMSNLQSKIEDEQALAMQLQKKIKELQARIEELEEEIEAERASRAKAEKQRSDLSR

SEQ ID NO: 265 - protein, 270 aa, Bos taurus
SEGDRLRVELAEKANKLQNELDNVSTLLEEAEKKGIKFAKDAAGLESQLQDTQELLQEETRQKLNLSSRIRQLEEERSSLQEQQEEEEEARRSLEKQLQALQAQLTDTKKKVDDDLGTIENLEEAKKKLLKDVEVLSQRLEEKALAYDKLEKTKTRLQQELDDLLVDLDHQRQIVSNLEKKQKKFDQLLAEEKNISARYAEERDRAEAEAREKETKALSLARALEEALEAREEAERQNKQLRADMEDLMSSKDDVGKNVHELEKSKRALE

SEQ ID NO: 266 - protein, 65 aa, Unknown
  Description of Unknown: polypeptide
DTKKKVDDDLGTIENLEEAKKKLLKDLEVLSQRLEEKALAYDKLEKTKTRLQQELDDLLLDLDHQ

SEQ ID NO: 267 - protein, 65 aa, Unknown
  Description of Unknown: polypeptide
DTKKKLDDDLGTLENLEEAKKKLLKDLEVLSQRLEEKALAYDKLEKTKTRLQQELDDLLLDLDHQ

SEQ ID NO: 268 - protein, 65 aa, Unknown
  Description of Unknown: polypeptide
DTKKKLDDDLGTLENLEEAKKKLLKDLELLSQRLEELALAYDKLEKTKTRLQQELDDLLLDLDHQ

SEQ ID NO: 269 - protein, 65 aa, Unknown
  Description of Unknown: polypeptide
DLKKKLDDDLGTLENLEELKKKLLKDLELLSQRLEELALAYDKLEKTKTRLQQELDDLLLDLDHQ

SEQ ID NO: 270 - protein, 65 aa, Unknown
  Description of Unknown: polypeptide
DLKKKLDDDLGTLENLEELKKKLLKDLELLSQRLEELLLLYDKLEKTKTRLQQELDDLLLDLDHQ

SEQ ID NO: 271 - protein, 65 aa, Unknown
  Description of Unknown: polypeptide
DLKKKLDDDLGLLELLEELKKKLLKDLELLSQRLEELLLLYDKLEKTKTRLQQELDDLLLDLDHQ

SEQ ID NO: 272 - protein, 65 aa, Unknown
  Description of Unknown: polypeptide
DTKKKLDDDLGTLENLEEAKKKLLKDLELLSQRLEEKLLAYDKLEKTKTRLQQELDDLLLDLDHQ

SEQ ID NO: 273 - protein, 65 aa, Unknown
  Description of Unknown: polypeptide
DTKKKLDDDLGTLELLEEAKKKLLKDLELLSQRLEEKLLLYDKLEKTKTRLQQELDDLLLDLDHQ

SEQ ID NO: 274 - protein, 65 aa, Unknown
  Description of Unknown: polypeptide
DTKKKLDDDLLLLELLEEAKKKLLKDLELLSQRLEEKLLLYDKLEKTKTRLQQELDDLLLDLDHQ

SEQ ID NO: 275 - protein, 65 aa, Unknown
  Description of Unknown: polypeptide
DLKKKLDDDLLLLELLEELKKKLLKDLELLSQRLEEKLLLYDKLEKTKTRLQQELDDLLLDLDHQ

SEQ ID NO: 276 - protein, 65 aa, Unknown
  Description of Unknown: polypeptide
DTKKKLDDDLLLLELLEEAKKKLLKDLELLLQRLEEKLLLLDKLEKTKTRLQQELDDLLLDLDHQ

SEQ ID NO: 277 - protein, 94 aa, Ovis aries
IWVMAAALCLPELLYSQVKEEHGTAICTVVYSSNESTKLKSAVLTLKVTLGFFLPFVVMACCYAIIIHTLIRAKKSSKHKALKVTITVLTVFVL

SEQ ID NO: 278 - protein, 272 aa, Clostridium thermocellum
VVNTPFVAVFSNFDSSQWEKADWANGSVFNCVWKPSQVTFSNGKMILTLDREYGGSYPYKSGEYRTKSFFGYGYYEVRMKAAKNVGIVSSFFTYTGPSDNNPWDEIDIEFLGKDTTKVQFNWYKNGVGGNEYLHNLGFDASQDFHTYGFEWRPDYIDFYVDGKKVYRGTRNIPVTPGKIMMNLWPGIGVDEWLGRYDGRTPLQAEYEYVKYYPNGVPQDNPTPTPTIAPSTPTNPNLPLKGDVNGDGHVNSSDYSLFKRYLLRVIDRFPVGD

SEQ ID NO: 279 - protein, 65 aa, Unknown
  Description of Unknown: polypeptide
DTKKKLDDDLGLLELLEELKKKLLKDLELLSQRLEELLLLYDKLEKTKTRLQQELDDLLLDLDHQ

SEQ ID NO: 280 - protein, 65 aa, Unknown
  Description of Unknown: polypeptide
DLKKKLDDDLLLLELLEEAKKKLLKDLELLSQRLEEKLLLYDKLEKTKTRLQQELDDLLLDLDHQ

SEQ ID NO: 281 - protein, 603 aa, Escherichia coli
MLRPVETPTREIKKLDGLWAFSLDRENCGIDQRWWESALQESRAIAVPGSFNDQFADADIRNYAGNVWYQREVFIPKGWAGQRIVLRFDAVTHYGKVWVNNQEVMEHQGGYTPFEADVTPYVIAGKSVRITVCVNNELNWQTIPPGMVITDENGKKKQSYFHDFFNYAGIHRSVMLYTTPNTWVDDITVVTHVAQDCNHASVDWQVVANGDVSVELRDADQQVVATGQGTSGTLQVVNPHLWQPGEGYLYELCVTAKSQTECDIYPLRVGIRSVAVKGEQFLINHKPFYFTGFGRHEDADLRGKGFDNVLMVHDHALMDWIGANSYRTSHYPYAEEMLDWADEHGIVVIDETAAVGFNLSLGIGFEAGNKPKELYSEEAVNGETQQAHLQAIKELIARDKNHPSVVMWSIANEPDTRPQGAREYFAPLAEATRKLDPTRPITCVNVMFCDAHTDTISDLFDVLCLNRYYGWYVQSGDLETAEKVLEKELLAWQEKLHQPIIITEYGVDTLAGLHSMYTDMWSEEYQCAWLDMYHRVFDRVSAVVGEQVWNFADFATSQGILRVGGNKKGIFTRDRKPKSAAFLLQKRWTGMNFGEKPQQGGKQ

SEQ ID NO: 282 - protein, 25 aa, Schizosaccharomyces pombe
  strain 972 / ATCC 24843
LCERLKEQSWTIVFKTLIVFHVMLK

SEQ ID NO: 283 - protein, 53 aa, Arabidopsis thaliana
VRDTEFVHQITNVIKLRRAEPLRRSLKPYECKFKTDHLIWVLMKIKCDYRLVL

SEQ ID NO: 284 - protein, 113 aa, Arabidopsis thaliana
KLEHGVHVVSGTPGRVCDMIKRRSLRTRAIKLLILDESDEMLSRGFKDQIYDVYRYLPPDLQVCLVSATLPHEILEMTSKFMTEPVKILVKRDELTLEGIKQFFVAVEKEEWK

SEQ ID NO: 285 - protein, 60 aa, Gallus gallus
IFLRVTARHVIEVELKAARVLHKLELKCLQKIETSEMTWKRMDLERVFPVLTLHFTYIRK

SEQ ID NO: 286 - protein, 54 aa, Saccharomyces cerevisiae
  strain ATCC 204508 / S288c
LDVLKGKNQVCLFVSLRHKETGTIFVVLNTHLYWKYDEVKLTQCMIIMRELSKI

SEQ ID NO: 287 - protein, 73 aa, Saccharomyces cerevisiae
  strain ATCC 204508 / S288c
LVLGALLDTSHKFRNLDKDLCEKCAKCISMIGVLDVTKHEFKRTTYSENEVYDLNDSVQTIKFLIWVINDILV

SEQ ID NO: 288 - protein, 232 aa, Acipenser transmontanus
MQKVKVLQVCAWVLLLWRCWGVLGYPLDCKDEQGSIISCTSISLEKLLDRVIQHAELIYHVSEESCTLFEEMFVPVSMRTQQNRARNTCITKAFPIPGSKSEIQKISDKWLLHSVLMLVQSWIEPLVYLQKTLDRYDDAPDTILNKTKWVTNKLSSLEQGIVELIRKMLDEGLLAVDHQQTLTRFDVQPEVVESILRDYAVLTCFKKDAHKMEVFLKLLKCRHTDKMSCYIS

SEQ ID NO: 289 - protein, 206 aa, Arabidopsis thaliana
MANDVTKDPTPKSDIVEDIYLWRRKKLAFSTLLVSTSTWILLSFYGFTTITIVSWIGIAVVSMIFLWGSLLRLLSKVEPELSGLEVSEEFVVETVRSCRMLMEEMVRWMFRVGAESEWFVFARTVLGFWILSRIGNLLDFHTCLFIGLVMGLTVPKLWEEYGDQIQKHLGSLKDKSKGAYNTTHEKILEMKNKLHHGTEEKVKKSE

SEQ ID NO: 290 - protein, 361 aa, Arabidopsis thaliana
MKALILVGGFGTRLRPLTLSFPKPLVDFANKPMILHQIEALKAVGVDEVVLAINYQPEVMLNFLKDFETKLEIKITCSQETEPLGTAGPLALARDKLLDGSGEPFFVLNSDVISEYPLKEMLEFHKSHGGEASIMVTKVDEPSKYGVVVMEESTGRVEKFVEKPKLYVGNKINAGIYLLNPSVLDKIELRPTSIEKETFPKIAAAQGLYAMVLPGFWMDIGQPRDYITGLRLYLDSLRKKSPAKLTSGPHIVGNVLVDETATIGEGCLIGPDVAIGPGCIVESGVRLSRCTVMRGVRIKKHACISSSIIGWHSTVGQWARIENMTILGEDVHVSDEIYSNGGVVLPHKEIKSNILKPEIVM

SEQ ID NO: 291 - protein, 90 aa, Saccharomyces cerevisiae
  strain ATCC 204508 / S288c
LVLGALLDTSHKFRNLDKDLCEKCAKCISMIGVLDVTKHEFKRTTYSENEVYDLNDSVQTIKFLIWVINDILVPAFWQSENPSKQLFVAL

SEQ ID NO: 292 - protein, 70 aa, Saccharomyces cerevisiae
  strain ATCC 204508 / S288c
LVLGALLDTSHKFRNLDKDLCEKCAKCISMIGVLDVTKHEFKRTTYSENEVYDLNDSVQTIKFLIWVIND

SEQ ID NO: 293 - protein, 75 aa, Saccharomyces cerevisiae
  strain ATCC 204508 / S288c
TLVLGALLDTSHKFRNLDKDLCEKCAKCISMIGVLDVTKHEFKRTTYSENEVYDLNDSVQTIKFLIWVINDILVP

SEQ ID NO: 294 - protein, 76 aa, Saccharomyces cerevisiae
  strain ATCC 204508 / S288c
LVLGALLDTSHKFRNLDKDLCEKCAKCISMIGVLDVTKHEFKRTTYSENEVYDLNDSVQTIKFLIWVINDILVPAF

SEQ ID NO: 295 - protein, 74 aa, Saccharomyces cerevisiae
  strain ATCC 204508 / S288c
ITLVLGALLDTSHKFRNLDKDLCEKCAKCISMIGVLDVTKHEFKRTTYSENEVYDLNDSVQTIKFLIWVINDIL

SEQ ID NO: 296 - protein, 76 aa, Saccharomyces cerevisiae
  strain ATCC 204508 / S288c
SDITLVLGALLDTSHKFRNLDKDLCEKCAKCISMIGVLDVTKHEFKRTTYSENEVYDLNDSVQTIKFLIWVINDIL

SEQ ID NO: 297 - protein, 154 aa, Ovis aries
MGLSDGEWQLVLNAWGKVEADVAGHGQEVLIRLFTGHPETLEKFDKFKHLKTEAEMKASEDLKKHGNTVLTALGGILKKKGHHEAEVKHLAESHANKHKIPVKYLEFISDAIIHVLHAKHPSDFGADAQGAMSKALELFRNDMAAQYKVLGFQG

SEQ ID NO: 298 - protein, 154 aa, Bos taurus
MGLSDGEWQLVLNAWGKVEADVAGHGQEVLIRLFTGHPETLEKFDKFKHLKTEAEMKASEDLKKHGNTVLTALGGILKKKGHHEAEVKHLAESHANKHKIPVKYLEFISDAIIHVLHAKHPSDFGADAQAAMSKALELFRNDMAAQYKVLGFHG

SEQ ID NO: 299 - protein, 154 aa, Sus scrofa
MGLSDGEWQLVLNVWGKVEADVAGHGQEVLIRLFKGHPETLEKFDKFKHLKSEDEMKASEDLKKHGNTVLTALGGILKKKGHHEAELTPLAQSHATKHKIPVKYLEFISEAIIQVLQSKHPGDFGADAQGAMSKALELFRNDMAAKYKELGFQG

SEQ ID NO: 300 - protein, 402 aa, Sus scrofa
MSAADRMGARAVPGLRLALLLLLVLGTPKSGVHGEEGLDFPQYDGVDRVVNVNAKNYKNVFKKYEVLALLYHEPPEDDKASQKQFELEELILELAAQVLEDKGVGFGMVDSEKDAAVAKKLGLTEEDSIYVFKGDEVIEYDGEFSADTLVEFLLDVLEDPVELIEGERELQAFENIEDEIKLIGYFKNKDSEHYKAFEDAAEEFHPYIPFFATFDSKVAKKLTLKLNEIDFYEAFMEEPVTIPDKPNSEEEIVHFVEKHRRSTLRKLKPESMYETWEDDMDGIHIVAFAEEADPDGYEFLETLKSVAQDNTDNPDLSIIWIDPDDFPLLVPYWEKTFDIDLSAPQIGVVNVTDADSIWMEMDDEEDLPSAEELEDWLEDVLSGEINTEDDDEDDDDDDDDDD

SEQ ID NO: 301 - protein, 395 aa, Bos taurus
MSAADRMGARAVPGLRLALLLLMVLGTPKSGVQGEEGLDFPEYDGVDRVVNVNAKNYKNVFKKYEVLALLYHEPPEDDKASQRQFEMDELILELAAQVLEDKGVGFGMVDSEKDAAVAKKLGLTEEDSVYVFKGDEVIEYDGEFSADTLVEFLLDVLEDPVELIEGERELQAFENIEDDNKLIGYFKNKDSEHYKAYEDAAEEFHPYIPFFATFDSKVAKKLTLKLNEIDFYEAFMEEPVTIPDKPNSEEEIVSFVEAHKRSTLRKLKPESMYETWEDDLDGIHIVAFAEETDPDGYEFLETLKAVAQDNTDNPDLSIIWIDPDDFPLLVPYWEKTFNIDLSAPQIGVVNVTDADSVWMEMDDEEDLPSAEELEDWLEDVLEGEINTEDDDEEDD

SEQ ID NO: 302 - protein, 400 aa, Arthrospira platensis C1
MAKKTVANLSASELSGKKVLVRADFNVPLDNGSISDDTRIRAALPTIQDLTSKGAKVILSSHFGRPQGQVVESMRLTPVAARLSELLGKTVKKCDDCIGEEVAVAVGAMSDGDVLLLENVRFHAAEEKNDPEFAKQLASVADLYVNDAFGTAHRAHASTEGVTKYLSPCVAGYLIEKELQFLQGAIESPQRPLAAIIGGSKVSSKIGVIEALLDKCDKLLLGGGMIFTFYKARGLSVGNSLVEEDKLELAKSLEAKAKEKGVTMLLPTDVVLADKFAADADSQTVSVEAIPDGWMGLDIGPDSVKVFQEALGDCKTVLWNGPMGVFEFEKFAAGTRAIAQTLAELTSTGTTTIIGGGDSVAAVEQLNLGEKMSHISTGGGASLELLEGKQLPGIVALDDA

SEQ ID NO: 303 - protein, 437 aa, Arthrospira platensis C1
MYQVIEVKQVLAVILGGGAGTRLYPLTKMRAKPAVPLAGKYRLIDIPISNCINSEILKIYILTQFNSASLNRHIARTYNFSGFTDGFAEVLAAQQTSVTNPQWFQGTADAVRQYLWLMEEWDVEHFLILSGDHLYRMDYRDFVQRHIDTGADITLSVLPVDEKRASAFGLMKIDESTGRIIDFSEKPKGEALKQMAVDTSSLGLSPEEAAESPYIASMGIYVFKKDVLFKLLKDAPDQTDFGKEVIPGAAKDHNVQAYLFNDYWEDIGTIEAFFEANLALTQQPQPAFSFYDENAPIYTRSRYLPPSKMLDCQITESIIAEGCILKECRIDHSVLGLRSRVESGSLVEDTMLMGSDFYQPFAERQYGLEKGSVPIGIGNNTTIRRAIVDKNARIGRHVQIINKDHVQEAEREEDGFYIRGGITVILKNAVIPDGTII

SEQ ID NO: 304 - protein, 334 aa, Arthrospira platensis C1
MVNQPDRVVLIGVAGDSGCGKSTFLRRITDIFGEDFVTVICLDDYHSLDRKQRKETGITALDPRANNFDLMYEQIKTLKSGQSINKPIYNHETGLIDPPERIDPNHIVVIEGLHPLYDERVRGLLDFSVYLDISDEVKISWKIQRDMAERGHRYEDVLASINARRPDFEAYIDPQKQYADVVIQILPTKLIPDDKEHKVLRVRLMQRDGVEGFEPAYLFDEGSTIHWTPCGRKLTCSYPGIKMFYGPDGYYGNEVSVLEVDGKFDNLEEMIYVEGHMSNIATKYYGELTHLLREHQDYPGSNDGTGLFQVLVGLKMRSTYERLVGKGEKVAAAV

SEQ ID NO: 305 - protein, 364 aa, Bos taurus
MPHQYPALTPEQKKELCDIAHRIVAPGKGILAADESTGSIAKRLQSIGTENTEENRRFYRQLLLTADDRVNPCIGGVILFHETLYQKADDGRPFPQVIKAKGGVVGIKVDKGVVPLAGTNGETTTQGLDGLSERCAQYKKDGADFAKWRCVLKIGEHTPSSLAIMENANVLARYASICQQNGIVPIVEPEILPDGDHDLKRCQYVTEKVLAAVYKALSDHHIYLEGTLLKPNMVTPGHACTQKYSHEEIAMATVTALRRTVPPAVPGITFLSGGQSEEEASINLNAINKCPLLKPWALTFSYGRALQASALKAWGGKKENLKAAQEEYVKRALANSLACQGKYTPSGKAGAAASESLFISNHAY

SEQ ID NO: 306 - protein, 417 aa, Ovis aries
MSLSNKLTLDKLDVKGKRVVMRVDFNVPMKNNQITNNQRIKAAVPSIKYCLDSGAKSVVLMSHLGRPDGVPMPDKYSLQPVAVELKSLLGKDVLFLKDCVGPEVEKACADPAAGSVILLENLRFHVEEEGKGKDASGNKVKAEPTKIEAFRASLSKLGDVYVNDAFGTAHRAHSSMVGVNLPKKAGGFLMKKELNYFAKALESPERPFLAILGGAKVADKIQLISNMLDKVNEMIIGGGMAFTFLKVLNNMEIGTSLFDEEGSKIVKDLMSKADKNGVKITLPVDFVTADKFDENAKTGQATVASGIPVGWMGLDCGPESSKKYAEAVARAKQIVWNGPVGVFEWEAFARGTKALMDEVVKATSRGCITIIGGGDTATCCAKWNTEDKVSHVSTGGGASLELLEGKVLPGVDALSSV

SEQ ID NO: 307 - protein, 306 aa, Bacillus subtilis
  strain 168
MKLKTKASIKFGICVGLLCLSITGFTPFFNSTHAEAKSIEDTNMASCITNKKFVQLEKKFDARLGVYAIDIGSNKTIAYRPNERFAYASTYKVLAAAAVLKKNSIEKLNEVIHYSKDDLVTYSPITEKHLDTGMSLKEISEAAIRYSDNTAGNILLQQLGGPKGFEKSLKQIGDHVTKAKRFETDLNSAIPGDIRDTSTAKALATDLKAFTLDNTLTTDKRMILTDWMRGNATGDELIRAGAPIGWEVGDKSGAGSYGTRNDIAIVWPPNRAPIVVAILSNRFTKDANYDNALIAEAAKVVLNDLK

SEQ ID NO: 308 - protein, 455 aa, Bacillus subtilis
  strain 168
MKKLLTVMTMAVLTAGTLLLPAQSVTPAAHAVQISNSERELPFKAKHAYSTISQLSEAIGPRIAGTAAEKKSALLIASSMRKLKLDVKVQRFNIPDRLEGTLSSAGRDILLQAASGSAPTEEQGLTAPLYNAGLGYQKDFTADAKGKIALISRGDLTYYEKAKNAEAAGAKAVIIYNNKESLVPMTPNLSGNKVGIPVVGIKKEDGEALTQQKEATLKLKAFTNQTSQNIIGIKKPKNIKHPDIVYVTAHYDSVPFSPGANDNGSGTSVMLEMARVLKSVPSDKEIRFIAFGAEELGLLGSSHYVDHLSEKELKRSEVNFNLDMVGTSWEKASELYVNTLDGQSNYVWESSRTAAEKIGFDSLSLTQGGSSDHVPFHEAGIDSANFIWGDPETEEVEPWYHTPEDSIEHISKERLQQAGDLVTAAVYEAVKKEKKPKTIKKQMKAKASDIFEDIK

SEQ ID NO: 309 - protein, 288 aa, Bacillus subtilis
  strain 168
MTKKAWFLPLVCVLLISGWLAPAASASAQTTLSLNDRLASSPSGTGSLLSLAAPAAPYADTDTYYEGAEGKTGDSLKSTLHRIISGHTMLSYSEVWNALKETDEDPRNPNNVILLYTNESRSKNLNGGNVGDWNREHVWAKSHGDFGTSKGPGTDIHHLRPADVQVNSARGNMDFDNGGTEYAKAPGNYYDGDSWEPRDDVKGDVARMLFYMAVRYEGDDGYPDLELNDKTGNGSAPYHGKQSVLLEWNKQDPVDDRERKRNEIIYEKYQHNRNPFIDHPEWADEIWP

SEQ ID NO: 310 - protein, 143 aa, Bacillus halodurans
  strain ATCC BAA-125 / DSM 18197 / FERM 7344 / JCM 9153 / C-125
MAVIRTTSRDIDLLARLMRAEAEGEGDLGMLMAGNVMVNRVRVGCLDFADINTVERMVFQSPGGFEATQKGYFYQRAREKERRLAQRIVNGERTHPAEFSLWFFRPDGPCPEQWYGQWNSGRYKAHCFFNPTSADCPEVYGVF

SEQ ID NO: 311 - protein, 142 aa, Bacillus subtilis
  strain 168
MAVVRATSADVDLMARLLRAEAEGEGKQGMLLVGNVGINRLRANCSDFKGLRTIRQMIYQPHAFEAVTHGYFYQRARDSERALARRSINGERRWPAKFSLWYFRPQGDCPAQWYNQPFVARFKSHCFYQPTAETCENVYNTF

SEQ ID NO: 312 - protein, 161 aa, Bacillus pseudofirmus
  strain OF4
MKGKVVLLSALLILLVLVGGYAFSSQPASSSLDDQESMGKVERGEQTQEINGLKMTVNNVRTEESEQEGMHNVIIDITLENASSTVQEFSLFKMSLADPEGYAYTHSSRVETKGILGGQLHPERKNRGEIAFEVPVHEEYEMIYTDHLRTGQVTWPITLDQ

SEQ ID NO: 313 - protein, 491 aa, Bacillus subtilis [sequence omitted]

SEQ ID NO: 314 - protein, 389 aa, Bacillus subtilis
  strain 168
MKRLLSTLLIGIMLLTFAPSAFAKQDGKRTSELAHEAKSAVLIERDTGKVLYNKNSNERLAPASMTKIMTMLLIMEALDKGKIKMSDKVRTSEHAASMGGSQIFLEPGEEMTVKEMLKGIAIASGNDASVAMAEFISGSEEEFVKKMNKKAKELGLKNTSFKNPTGLTEEGHYSSAYDMAIMAKELLKYESITKFTGTYEDYLRENTDKKFWLVNTNRLIKFYPGVDGVKTGYTGEAKYCLTASAKKGNMRAIAVVFGASTPKERNAQVTKMLDFAFSQYETHPLYKRNQTVAKVKVKKGKQKFIELTTSEPISILTKKGEDMNDVKKEIKMKDNISAPIQKGQELGTLVLKKDGEVLAESPVAAKEDMKKAGFITFLKRTMGDWTKFK

SEQ ID NO: 315 - protein, 350 aa, Bacillus subtilis
  strain 168
MKSLLACLALMIAGIATALFIGFHDHTGNKKIVYDDDQEGLQDQIVFKFSHVVAENTPKGLAANKFADLVNEKSGGKIKIEVFPNGSLYSDIEEIEALQNGDVQFIAPSTSKLGMLSPEWGVLDLPYAFTDYNAVKKGLNGSIGTQLFDSLKKNQLKGLAYWTNGFKQITTNQGPVKTPDDLKGQDLRIMQSDVIEDQFKLLGATPHQESFNSTFQLLENNVVDGEENTISNIYSKKFYNVQDYLTISSHGYLGYAVMTDEHFWKAQTPETRRILTEAMKETTEWNETYAEQMNKEQLEEIKKNSAIHIYELSDKEKQEWMKRLDPVYRQYEPIFGRELIRELLELRKDS

SEQ ID NO: 316 - protein, 416 aa, Bacillus subtilis
  strain 168
MSDEQKKPEQIHRRDILKWGAMAGAAVAIGASGLGGLAPLVQTAAKPSKKDEKEEEQIVPFYGKHQAGITTAHQTYVYFAALDVTAKDKSDIITLFRNWTSLTQMLTSGKKMSAEQRNQYLPPQDTGESADLSPSNLTVTFGFGPGFFEKDGKDRFGLKSKKPKHLAALPAMPNDNLDEKQGGGDICIQVCADDEQVAFHALRNLLNQAVGTCEVRFVNKGFLSGGKNGETPRNLFGFKDGTGNQSTKDDTLMNSIVWIQSGEPDWMTGGTYMAFRKIKMFLEVWDRSSLKDQEDTFGRRKSSGAPFGQKKETDPVKLNQIPSNSHVSLAKSTGKQILRRAFSYTEGLDPKTGYMDAGLLFISFQKNPDNQFIPMLKALSAKDALNEYTQTIGSALYACPGGCKKGEYIAQRLLES

SEQ ID NO: 317 - protein, 532 aa, Bacillus halodurans
  strain ATCC BAA-125 / DSM 18197 / FERM 7344 / JCM 9153 / C-125
MRIGGIASGIDTESMIKQLMQVERIPLNKFTQRKITLEWQRDAYREVNLLLKKLDDAAANIRLRSSLNTKEASTTSKAFTAQPNAQVRNGSYQLKVNQIATQSRNISSEAISNGSTKISTTRALNEQNVYADGLNIEDYHGQTFTITTYNSSGAAVEKSFTIDTSKSLDSLFKDINSAGLGVRMSYNSTYDKVIIERTETGAFNAADGSNDYQIVFGGDTGFLNDVLKLNQANEVSGTNAEVEFIDPIMSSEPIVVSDSRTNRVTVGGITFSLTGTTEGFETLNVSSNTDAAFEKVMEFVDTYNATITELRSLLSEPRYRDYPPLTEEQRRELSEREAELWDEKAKSGLLRNDSMLNSLLAQMRADLYAPVQTNGQFSSITQIGITTSSDYRLGGFLEVDEDKLRAALEADPDSVHQLLNGTANSSLTSIPVKDRTSQQRSEIYSQTGLVGRIRSSLSSTMNDIVARAGNERRTEQQFTIGRQILDVDKRIDHFQQRLIQIENRYWAQFSRMEQMMNQANAQYASLQQFFVT

SEQ ID NO: 318 - protein, 362 aa, Bacillus subtilis
  strain 168
MFKKHTISLLIIFLLASAVLAKPIEAHTVSPVNPNAQQTTKTVMNWLAHLPNRTENRVLSGAFGGYSHDTFSMAEADRIRSATGQSPAIYGCDYARGWLETANIEDSIDVSCNGDLMSYWKNGGIPQISLHLANPAFQSGHFKTPITNDQYKKILDSSTVEGKRLNAMLSKIADGLQELENQGVPVLFRPLHEMNGEWFWWGLTSYNQKDNERISLYKQLYKKIYHYMTDTRGLDHLIWVYSPDANRDFKTDFYPGASYVDIVGLDAYFQDAYSINGYDQLTALNKPFAFTEVGPQTANGSFDYSLFINAIKQKYPKTIYFLAWNDEWSAAVNKGASALYHDSWTLNKGEIWNGDSLTPIVE

SEQ ID NO: 319 - protein, 677 aa, Bacillus cellulosilyticus
  strain ATCC 21833 / DSM 2522 / FERM P-1141 / JCM 9156 / N-4
MDRGYKMWLRYNQITNQEVLEEYQSCLQHLHFSVNTATILAAVDELQAGLSSMINHSLHVLKTKDQRATLLLTIEESIAKEENVQVEIEDEGYVIKSIKNNRLIIFGKTDIGVLYGVFHLLRLMQTQCSLKHIYIVEQPKNSLRMLNEWDNMDGSIERGYAGVSIFFENNQFTKDWERVKDYARLLASVGINGIAFNNVNVHEQETKLITPEYLPTVAKVANIFRMYGIKTFLSINYASPISLGGMDTADPLNEEVRQWWKDKAKEIYRFIPDFGGVLVKADSEHRPGPFTYNRTHADGANMLAGAFAPFDGIVLWRCFVYDCMQDWRDRSTDRARAAYDHFKPIDGKFHKNVVLQIKNGPMDFQVREAVSPLFGAMPNTNQMLELQITQEYTGQQKHLCYLVPQWKEILDFDTYANGVNTPIKSIVDGSQYKYDHCGITAVSNVGNDDNWTGHTLAQANLYGYARLAWNPDLSAELITDEWAKLTFGVDEQVVQVVSNMLLQSWHIYEKYTSPLGVGWMVNPGHHYGPNVDGYEYSVWGTYHFADSKGIGVDRTVATGTGFTNQYFKENKELYETLNNCPDELLLFFHHVPYTHQLKSGDTVIQHIYNTHFEGVEEAIGLKKSWLSLEAKISPSIFNGVSERLQHQIEHAKEWRDVINTYFYRKSGIEDEKNRKIY

SEQ ID NO: 320 - protein, 490 aa, Bacillus halodurans
  strain ATCC BAA-125 / DSM 18197 / FERM 7344 / JCM 9153 / C-125
MARKKNREYWIGRHQQWLNRQDNKDEKATRKLKKEYDRIARELEKEIADYFQRYGRDNVIEFRVMMQELSEEDRELLFRNMDAFAEKYPEFAHLLPVRESIYQLNRLQGLHYSTMLKLLELGAIENRELERHLRETYGYHYEQMMRELGLGHRFLAMNEAILRDTIYSGWINEENFSDRIWNNKEKLLNHLQNRYRDALARGDNYEKLIKEVRERFGVSYYDARRLVWTEAAFILNQAHLHAYKNAGVEEYELVAIIDRKTSDICRRMHGKVFRFDELEVGVNFPPFHPHCRTTFIGVFEPRTIDPKRFESPDEVREWLGKDDLNWIKGLSADENEAIREYTGTAYRKINGYLRGKRPGSERVKEQIKHIDEAIRKFELKDGIMVYRNVGRDALPSSSERLKDLEGTIYKDDGYMSTSVLREGAFSSYDVMFEITVPGGKGRGAYINEISLFKDEEYEFLIKRGASFRITEVVEEGRMTVIRMEMIDDVE

SEQ ID NO: 321 - protein, 290 aa, Bacillus subtilis
  strain 168
MQFQIGDMVARKSYQMDVLFRIIGIEQTSKGNSIAILHGDEVRLIADSDFSDLVAVKKDEQMMRKKKDESRMNESLELLRQDYKLLREKQEYYATSQYQHQEHYFHMPGKVLHLDGDEAYLKKCLNVYKKIGVPVYGIHCHEKKMSASIEVLLDKYRPDILVITGHDAYSKQKGGIDDLNAYRHSKHFVETVQTARKKIPHLDQLVIFAGACQSHFESLIRAGANFASSPSRVNIHALDPVYIVAKISFTPFMERINVWEVLRNTLTREKGLGGIETRGVLRIGMPYKSN

SEQ ID NO: 322 - protein, 620 aa, Bacillus subtilis
  strain 168
MRRSCLMIRRRKRMFTAVTLLVLLVMGTSVCPVKAEGAARQMEALNRGLVAVKTDGGIFVSWRFLGTENASVLFNVYRDGQKLNAAPVKTTNYVDKNGSAGSTYTVRAVVNGTEQPASEKASVWAQPYHSVPLDKPAGGTTPKGESYTYSANDASVGDVDGDGQYELILKWDPSNSKDNSQDGYTGDVLIDAYKLDGTKLWRINLGKNIRAGAHYTQFMVYDLDGDGKAEVAMKTADGTKDGTGKVIGNANADYRNEQGRVLSGPEYLTVFQGSTGKELVTANFEPARGNVSDWGDSYGNRVDRFLAGIAYLDGQRPSLIMTRGYYAKTMLVAYNFRDGKLSKLWTLDSSKSGNEAFAGQGNHNLSIADVDGDGKDEIIFGSMAVDHDGKGMYSTGLGHGDALHTGDLDPGRPGLEVFQVHEDKNAKYGLSFRDAATGKILWGVYAGKDVGRGMAADIDPRYPGQEVWANGSLYSAKGVKIGSGVPSSTNFGIWWDGDLLREQLDSNRIDKWDYQNGVSKNMLTASGAAANNGTKATPTLQADLLGDWREEVVWRTEDSSALRIYTTTIPTEHRLYTLMHDPVYRLGIAWQNIAYNQPPHTSFFLGDGMAEQPKPNMYTP

SEQ ID NO: 323 - protein, 363 aa, Bacillus subtilis
  strain 168
MITLGFMSLSRQHEADYSAELAKRAPEFGIRFIRFTPFDISPDTLRVKASVYHSASSTWNETEMAIPDYIYDRCFYGKDSHSQKAKPIVEWLKKYPKTEFIGRGLPDKWTVLHDLQQHSVINPYIPETIKVSRYEQIHSFLSKEKACILKPAFGAGGRGVILLKLGKKNITATYHIGKDKQTKTFSNQTSFKTWCKKVLQHQYLLQPYLNIQDKEQYPCDIRLFMEKNEAGEWNTVGKAVRRGYKHGLLANLSGGSDALTFDSWFEDIPKKQQVVLLDDVFSITQSVPYYLDERYGPLFELGLDICLAKDGRIWILDINSKPGRKSILRVSPEQKEQLYTCPLKRCQYLFSEQSQKGVLPRES

SEQ ID NO: 324 - protein, 339 aa, Bacillus subtilis
  strain 168
MVKGTIKEKYGIHIRQLSMYQHTYQCFQTPNSYFLIVPVSQFSETELAELYYMSQYLQEQSDPYVSVFIFTKEGELTFEHEGKTYALLKAAPPYSNRAFSIGAELAEFHRKGRGYPYEVKAAGRIGQWKDLWGKRIDQLEAFWQRKVQTPPHEPFDKKMIESFPYYLGLSENAIQYLVDTELDDKPQAADSGTICHQRMERHTWSPESLIRIPADWVFDHASRDLAEYMRHTFLHHRQDFNQQGFLFLQEYEQVTPLSSFSKRLLYSRLLFPLHYFEIVESYYMSSESEKHYFEEQLDFILNDCGRYEQFLNTAQEFMNMRAQKLFVPRVSWLGKGSSR

SEQ ID NO: 325 - protein, 105 aa, Saccharomyces cerevisiae
  strain ATCC 204508 / S288c
MLMPKQERNKIHQYLFQEGVVVAKKDFNQAKHEEIDTKNLYVIKALQSLTSKGYVKTQFSWQYYYYTLTEEGVEYLREYLNLPEHIVPGTYIQERNPSQRPQRRY

SEQ ID NO: 326 - protein, 111 aa, Arthrospira platensis C1
MQTLPKERRYETLSYLPPLTDAQTQKQLQYILEQGFIAGVEFSESSAPEQHYWTLWKLPLFNATSVREVMAEIDECRREYPKCFIRVMGFDNVKQCQVLSFIVHRPTGSLY

SEQ ID NO: 327 - protein, 113 aa, Bacillus mycoides Rock1-4
MQVYRGTDIKPFKDLIELGKDGRSDFESLINKTIKDDGFVSTAILKASSFDYMEVSWEINVPKGASAAYVGKISQFSNEAELLLNASHEMIIKSVNVERNGKLHVTLDLILKK

SEQ ID NO: 328 - protein, 118 aa, Arthrospira platensis NIES-39
MTRVKRGNVARKRRKKILKLAKGFRGSQSKNFRIANQRVMQALRNAYRDRKKRKRDFRRLWITRINAAARVHGISYSQLMGNLKKADIEINRKMLAEMAVLDPDTFEKVVAKAAQAQS

SEQ ID NO: 329 - protein, 121 aa, Zea mays
MKRNPRVTSSRRKCRKAHFTAPSSVRRVLMSAGLSTELRHKYNVRSIPIRKDDEVQVVRGTYKGREGKVVQVYRRRWVIHVERITREKVNGSTVNVGIHPSKVIVTKLKLDKDRKALLDPQ

SEQ ID NO: 330 - protein, 146 aa, Saccharomyces cerevisiae
  strain ATCC 204508 / S288c
MSLVVQEQGSFQHILRLLNTNVDGNIKIVYALTTIKGVGRRYSNLVCKKADVDLHKRAGELTQEELERIVQIMQNPTHYKIPAWFLNRQNDITDGKDYHTLANNVESKLRDDLERLKKIRAHRGIRHFWGLRVRGQHTKTTGRRRA

SEQ ID NO: 331 - protein, 157 aa, Bacillus amyloliquefaciens
MMKMEGIALKKRLSWISVCLLVLVSAAGMLFSTAAKTETSSHKAHTEAQVINTFDGVADYLQTYHKLPDNYITKSEAQALGWVASKGNLADVAPGKSIGGDIFSNREGKLPGKSGRTWREADINYTSGFRNSDRILYSSDWLIYKTTDHYQTFTKIR

SEQ ID NO: 332 - protein, 176 aa, Arthrospira platensis NIES-39
MTSTQTKTRLYSSRIDLPEDTRSQVITILNQSLATTLDLKTQVKQAHWNVKGLNFYSLHLLFDELAGELEGYVDMIAERVTALGGYAMGTARRAASESILPEYPLDIDNGTDHIVALADRFGVYAKSLREAIDKTDNLGDADTADLYTEISRTADMRLWFLEAHLQGDSNQPLRSH

SEQ ID NO: 333 - protein, 179 aa, Bacillus mycoides Rock3-17
MLKKKTVQFFENLNLNGGSKKPLSNLVEAHEWGSKHFDSWIESLTESERSAIRQYTGDDYRKINNYLRGIADSLDGVESSVIDNIKSGLNKASVPYDIQVYRGTDLNSFENLMSRFFYFKKKSALILLSLLQWTKRFQCCHIFYIKSIFSKKVYMLSAQVVKYVLAIPHWNHTYSLILL

SEQ ID NO: 334 - protein, 197 aa, Glycine max
MVHVSFYRNYGKTFKKPRRPYEKERLDAELKLVGEYGLRCKRELWRVQYALSRIRNNARNLLTLDEKNPRRIFEGEALLRRMFRYGLLDETQNKLDYVLALTVENFLERRLQTLVFKSGMAKSIHHARVLIKQRHIRVGRQVVNIPSFLVRVDSQKHIDFSLTSPLGGGRPGRVKRRNQRAAAKKAAGGDGDEEDED

SEQ ID NO: 335 - protein, 202 aa, Arthrospira platensis NIES-39
MSRYRGPRLRVARRLGDLPGLTRKTARRAYPPGQHGQARRKRSEYAVRLEEKQKLRFNYGLSERQLLRYVRKARRASGSTGQVLLQYLEMRLDNTVFRLGMAPTIPAARQLVNHGHITVNGKVVDIASYQCRPGEIIGVRNRDKSREMVKANLQYPGLANVPSHLELDKNNLTATVNGVIEREWVALSINELLVVEYYSRMA

SEQ ID NO: 336 - protein, 207 aa, Zea mays
MVSLKLQKRLAASVLKCGKGKVWLDPNEVSEISMANSRQNIRKLVKDGFIIRKPQKVHSRSRARRAHEAKQKGRHSGYGKRRGTREARLPTKILWMRRMRVLRRLLRKYREAKKIDKHMYHDMYMKVKGNMFKNKRVLMESIHKSKAEKAREKTLSDQFEAKRAKSKASRERKIARREERLAQGPREPTAPVAAPAPSTGVPKKAKK

SEQ ID NO: 337 - protein, 221 aa, Glycine max
MALPNQQTVDYPSFKLVIVGDGGTGKTTFVKRHLTGEFEKKYEPTIGVEVHPLDFFTNCGKIRFYCWDTAGQEKFGGLRDGYYIHGQCAIIMFDVTARLTYKNVPTWHRDLCRVCENIPIVLCGNKVDVKNRQVKAKQVTFHRKKNLQYYEISAKSNYNFEKPFLYLARKLAGDANLHFVESPALAPPEVQIDLAAQQQHEAELLAAASQPLPDDDDDQFE

SEQ ID NO: 338 - protein, 222 aa, Saccharomyces cerevisiae
  strain ATCC 204508 / S288c
MSSSESIRMVLIGPPGAGKGTQAPNLQERFHAAHLATGDMLRSQIAKGTQLGLEAKKIMDQGGLVSDDIMVNMIKDELTNNPACKNGFILDGFPRTIPQAEKLDQMLKEQGTPLEKAIELKVDDELLVARITGRLIHPASGRSYHKIFNPPKEDMKDDVTGEALVQRSDDNADALKKRLAAYHAQTEPIVDFYKKTGIWAGVDASQPPATVWADILNKLGKD

SEQ ID NO: 339 - protein, 230 aa, Lactobacillus acidophilus
  strain 30SC
MSKLVLIRHGQSEWNLSNQFTGWVDVNLSEKGVEEAKKAGRLIKEHGLEFDQAYTSLLTRAIKTLHYALEESGQLWIPETKTWRLNERHYGALQGLNKKKTAEKYGDEQVHIWRRSYDVLPPAIDDDNKYSQAHDRRYANLDPHIVPKAENLHVCLDRVMPFWEDHIAPDLLDGKNVIIAAHGNSLRALTKYIENISDDDIMNLEMKTGEPVVYTFDENLDVVNKEKLDD

SEQ ID NO: 340 - protein, 242 aa, Arthrospira platensis C1
MGQKIHPIGFRLGVTQEHKSRWFADASQYPQLLQEDHTIRKYIQKNLSNAGISDVRIERKADQIDLEVLTARPGVVVGRGGAGIDSLRQGLQKELGSNRQIRINVVEVSRVDADATLIAENIAAQLEKRVSFRRVVRQAITRAQKAGIEGIKIQVSGRLNGAEIARTEWTREGRVPLHTLRADIDYAYCTALTIYGILGVKVWVFKGEIIPGQEETPAPNTRAPKSRRTPIRQKYDDRSSDT

SEQ ID NO: 341 - protein, 267 aa, Saccharomyces cerevisiae
  strain ATCC 204508 / S288c
MSTSREDSVYLAKLAEQAERYEEMVENMKTVASSGQELSVEERNLLSVAYKNVIGARRASWRIVSSIEQKEESKEKSEHQVELICSYRSKIETELTKISDDILSVLDSHLIPSATTGESKVFYYKMKGDYHRYLAEFSSGDAREKATNASLEAYKTASEIATTELPPTHPIRLGLALNFSVFYYEIQNSPDKACHLAKQAFDDAIAELDTLSEESYKDSTLIMQLLRDNLTLWTSDMSESGQAEDQQQQQQHQQQQPPAAAEGEAPK

SEQ ID NO: 342 - protein, 301 aa, Bacillus circulans
MHMSNARPSKSRTKFLLAFLCFTLMASLFGATALFGPSKAAAASPDDNFSPETLQFLRNNTGLDGEQWNNIMKLINKPEQDDLNWIKYYGYCEDIEDERGYTIGLFGATTGGSRDTHPDGPDLFKAYDAAKGASNPSADGALKRLGINGKMKGSILEIKDSEKVFCGKIKKLQNDAAWRKAMWETFYNVYIRYSVEQARQRGFTSAVTIGSFVDTALNQGATGGSDTLQGLLARSGSSSNEKTFMKNFHAKRTLVVDTNKYNKPPNGKNRVKQWDTLVDMGKMNLKNVDSEIAQVTDWEMK

SEQ ID NO: 343 - protein, 312 aa, Glycine max
MATLIAPSHHSRVEDAEALRNAFKGWGADDKAIIAILGHRNVHQRQEIRKAYEEIYQEDLIKRLESEISGDFERAMYRWMLQPADRDAVLVNVAIKNGTKDYHVIAEIACVLSAEELLAVRRAYHRRYKCSLEEDVAANTTGNLRQLLVGLVTSYRYEGDEINVKFSQTEANVLHESVKEKKGNSEEVIRILTTRSKTQLVATFNRYRDEHGISISKKLLDQTSDDFHKVLHTAIRCINDHKKYYEKVLRNAVKKFGTDEDGLSRVIVTRAEKDLKDIKELYYKRNSVHLEDEVSKETSGDYKKFLLTLLGK

SEQ ID NO: 344 - protein, 312 aa, Arthrospira platensis NIES-39
MRPPSSPHRKSGPNRGKVKPSSSRSHSPREDKPAIHPRRRDRPVASAETEPPEEDLIYGRHTVLAALENGRSLNRVWVISQLRSDTRFQPLLQEAKAKGAIVDGASYQRLDQITRGASHQGIVAQVTPYKYWDLTTLITQAKSANSQPVLVAVDGITDPHNLGAIIRTAEAIGAQGLILPQRRAVGINATVMKVAAGALETFPVARVINLNRTFTELKSAGFWIYGTVAGEYQPLYKADLSGAIVLVVGSEGEGLSHAIAENCDVLLSIPLSGVTPSLNVSVATGMALYEIFRQRQSQSQSQNQNQNQNQHQ

SEQ ID NO: 345 - protein, 315 aa, Arthrospira platensis NIES-39
MNTLDLQNQRILVTGGAGFLGKQVIDQLLKAGAKSENISVPRSHNCDLRNLEACQQAAKGQDIIIHLAAHVGGIGLNQVKPAELFYDNLMMGTQLIHSAYQAGVKKFVCVGTICAYPKFTPVPFQEDDLWNGYPEETNAPYGIAKKALLVQLQAYRQQYGFNGIYLLPVNLYGPEDNFNPKSSHVIPALVRKVYEAQQRGDKQLPVWGDGSPSREFLYSTDAARGIVMATQHYDEPDPVNLGTNSEVTIRDLVELICELMEFQGEIVWETDKPNGQPRRCLDTNRAKERFGFVAEVEFRQGLKNTIDWYRQNPDL

SEQ ID NO: 346 - protein, 329 aa, Arthrospira platensis NIES-39
MYYDADANLDLLAGKTIAIVGYGSQGHAHALNLKDSGMNVIVGLYPGSKSATKAKDAGLTVYPVDEAAKIADLIMILLPDEVQKTVYKNEIEPNLSEGKTLAFAHGFNIHFGQVVPPENVDVIMVAPKGPGHLVRRTYQEGQGVPCLFAVYQDASGQARDRAMAYAKGIGGTRGGILETTFREETETDLFGEQAVLCGGLSALIKAGFETLVEAGYQPELAYFECLHEVKLIVDLVVEGGLAQMRDSISNTAEYGDYTRGPRVITDATRAEMRKILKEIQTGQFAREFVLENQSGKAGFTAMRRQEAEHPIEEVGHDLRAMFSWLKKKA

SEQ ID NO: 347 - protein, 331 aa, Bacillus amyloliquefaciens
  subsp. plantarum YAU B9601-Y2
MSIKKMSALFFILLLTAFTAACSSETSGGQESSTAKVKIKDTAWAASDDTEHSAALKVTVTVKNTGKDPLTVKSSDFSLYQDDAKTAKADKEDLLQSGTLHAGKTVTGNLYFTADEGKSYELVYQPQAKDAKPLSYKLKVKGTASNAKPDPADALSAYIDVMLYGKHNKDFTRLTGVNEKMTAAAYQESAKASFIASAGISQEQADSKAITAIIDAMSSALRDNTELKVHTKSMSGKKAVLEAKVTPLDMSPLAGQLQDRVQDYAGKHPDADENEIVSHLLSVYPEEFMRLKPASSSVTREIEMKKNARGQWYLDTDADLEGLTEAFLKTS

SEQ ID NO: 348 - protein, 332 aa, Salmo salar
MTTKEKLITHVLVGEPVGSRSKVTVVGVGMVGMASAVSVLLKDLCDELCLIDVMEEKLKGEVMDLQHGSLFCKTHKIVGDKDYSTTAHSKVVVVTAGARQQEGESRLNLVQRNVNIFKFIIPQIVKYSPNAILLVVSNPVDILTYVAWKLSGFPRHRVIGSGTNLDSGRFRHLMGEKLHLHPSSCHGWIIGEHGDSSVPVWSGVNVAGVSLKGLNPHMGTDADKEDWKHLHKMVVDGAYEVIKLKGYTSWAIGMSVADLVESILKNLHKVHPVSTLVKGMHGVKDEVFLSVPCVLGNSGLTDVIHMTLKPEEEKQLINSAETLWGVQKELTL

SEQ ID NO: 349 - protein, 342 aa, Arthrospira platensis NIES-39
MSNNKPALITGITGQDGSYLSELLLEKGYEVHGIIRRSSSFNTDRIEHIYKDPHHPNARLFLHYGDLTDGTTLRRILEEVKPVEIYNLGAQSHVRVSFDCPEYTVDTVGLGVLRLLEAIRDYQHRTGIQVRFYQAGSSEMFGKVQEIPQKETTHFYPRSPYACAKVYGHWQTVNYRESYGLFACNGILFNHESPRRGPTFVTRKITRAVARIVKGMQKELYLGNLDAKRDWGYAKDYVRGMWMMLQHDQPDDYVLATNETHSIREFLDVAFNYVNLDWHDYVKFDERYLRPAEVELLIGDSSKAQNVLGWKPLVSFEELVKLMVDSDLTLLEEPHQEGDHFD

SEQ ID NO: 350 - protein, 357 aa, Gallus gallus
MRLVLLFVLLLPVCLATRFHQKGLFDFMIEDEGSADMAPTDDPVISGFGPVCPFRCQCHLRVVQCSDLGLERVPKDLPPDTTLLDLQNNKITEIKEGDFKNLKNLHALILVNNKISKISPAAFAPLKKLERLYLSKNNLKELPENMPKSLQEIRAHENEISKLRKAVFNGLNQVIVLELGTNPLKSSGIENGAFQGMKRLSYIRIADTNITSIPKGLPPSLTELHLDGNKISKIDAEGLSGLTNLAKLGLSFNSISSVENGSLNNVPHLRELHLNNNELVRVPSGLGEHKYIQVVYLHNNKIASIGINDFCPLGYNTKKATYSGVSLFSNPVQYWEIQPSAFRCIHERSAVQIGNYK

SEQ ID NO: 351 - protein, 401 aa, Glycine max
MATKRSVGTLKEGDLKGKRVFVRVDLNVPLDDNLNITDDTRVRAAVPTIKYLTGYGAKVILSSHLGRPKGVTPKYSLKPLVPRLSQLLGIEVTMANDSIGEEVEKLVTQLPEGGVLLLENVRFYKEEEKNDPEFAKKLASLADLYVNDAFGTAHRAHASTEGVAKYLKPSVAGFLMQKELDYLVGAVSNPKRPFAAIVGGSKVSSKIGVIESLLEKVNVLLLGGGMIFTFYKAQGYSVGSSLVEEDKLSLATTLLEKAKAKGVSLLLPTDVVIADKFAADANSKTVPASSIPDGWMGLDIGPDSIKTFGEALDTTQTIIWNGPMGVFEFDKFATGTEAIAKKLAELSGKGVTTIIGGGDSVAAVEKVGLADKMSHISTGGGASLELLEGKQLPGVLALDDA

SEQ ID NO: 352 - protein, 402 aa, Zea mays
MATKRSVGTLGEADLKGKKVFVRADLNVPLDDAQKITDDTRIRASVPTIKFLLEKGAKVILASHLGRPKGVTPKYSLKPLVPRLSELLGVEVVMANDCIGEEVEKLAAALPEGGVLLLENVRFYKEEEKNEPEFAKKLASVADLYVNDAFGTAHRAHASTEGVTKYLKPAVAGFLMQKELDYLVGAVANPKKPFAAIVGGSKVSTKIGVIESLLAKVDILILGGGMIYTFYKAQGYSVGKSLVEEDKLELATSLIEKAKAKGVSLLLPTDIVVADKFAADAESKIVPATAIPDDWMGLDVGPDATKTFDEALDTTKTVIWNGPMGVFEFQKFAAGTEAIAKKLAELTTTKGVTTIIGGGDSVAAVEKAGLADKMSHISTGGGASLELLEGKTLPGVLALDDA

SEQ ID NO: 353 - protein, 409 aa, Paenibacillus thiaminolyticus
MSKVKGFIYKPLMVMLALLLVVVSPAGAGAAHSDASSDITLKVAIYPYVPDPARFQAAVLDQWQRQEPGVKLEFTDWDSYSADPPDDLDVFVLDSIFLSHFVDAGYLLPFGSQDIDQAEDVLPFALQGAKRNGEVYGLPQILCTNLLFYRKGDLKIGQVDNIYELYKKIGTSHSEQIPPPQNKGLLINMAGGTTKASMYLEALIDVTGQYTEYDLLPPLDPLNDKVIRGLRLLINMAGEKPSQYVPEDGDAYVRASWFAQGSGRAFIGYSESMMRMGDYAEQVRFKPISSSAGQDIPLFYSDVVSVNSKTAHPELAKKLANVMASADTVEQALRPQADGQYPQYLLPARHQVYEALMQDYPIYSELAQIVNKPSNRVFRLGPEVRTWLKDAKQVLPEALGLTDVSSLAS

SEQ ID NO: 354 - protein, 417 aa, Ovis aries; identical to SEQ ID NO: 306

SEQ ID NO: 355 - protein, 468 aa, Bos taurus
MASRLTPLTLLLLLLLAGDRVTSDMIVGPGNLQEGESEGDSQKGGILDGESIQGNEDSPTLPITNLTVVPATVTKPFSQPATEPVQSTIQPTAEPFCLAPVTSCSDSEIRSAEAVLGEALTDFSLRLYQDFSVLKKRETNFIFSPFSIASLLTQILLGAGGETRVSLEHLLSYPQNFSCVHHALRAFMSEGFTSFSQIFHSSDLTIKDTFAEASQRLYGSSPRPLGNDSTASLELINDWVAKKTNLRIRRLLDSLPEDTRLILLNAVALSAKWKIAFDKGRTSTKPFHLKSSAIKVPMMNSKKYPVASFTDRTLNRPGGRLQLSHNLSFVILVPQTVKHHLQDLEQALSTAVFKAVIKKLEMTKFHPTHLTMPRIKVQSSQDMLDYFDFIYDVNLCGLTEDPDVQVSGIRHQATLELTESGVDATAASVVSVARNLLLFEVQQPFLFLLWDQQHKFPVFMGRVYDPKG

SEQ ID NO: 356 - protein, 469 aa, Glycine max
MATAAEKLSALKSAVAGLNEISENEKNGFISLVGRYLSGEAQHVEWSKIQTPTDEVVVPYDTLAPTPEGSSEVKNLLDKLVVLKLNGGLGTTMGCTGPKSVIEVRDGLTFLDLIVIQIENLNSKYGSNVPLLLMNSFNTHDDTQKIVEKYQNSNIEIHTFNQSQYPRLVVEDFLPLPSKGHTDKDGWYPPGHGDVFPSLLNSGKLDALLSQGKEYVFVANSDNLGAIVDLKILNHLIQNKNEYCMEVTPKTLADVKGGTLISYEGRVQLLEIAQVPDEHVNEFKSIEKFKIFNTNNLWVNLNAVKRLVEADALKMEIIPNPKEVDGIKVLQLETAAGAAIRFFDKAIGINVPRSRFLPVKATSDLLLVQSDLYTLEDGFVIRNKARENPENPSIELGPEFKKVSNFLGRFKSIPSIVELDSLKVAGDVWFGAGVILKGKVSIVSKPGVKLEVPDGVAIVDKEINGPEDL

SEQ ID NO: 357 - protein, 473 aa, Arthrospira platensis NIES-39
MKPLNRRTKIVATIGPASNSREVLYQMIQAGMNVVRLNFSHGSHEQHTKTVALLKEISQELKTSITLLQDLQGPKIRVGQLPDGGIQLMAGEYITLVPIDQYESKPNTIAIDYLHLGEEAEIGAQVLLDDGLLELKVEEISGNQVKCKIIEGGTLKSRKGVNLPSLTLRLPSLTEKDQQDLEFGISLGVDWVSLSFVRNAEDVRVLKDFLASKNASQISVMAKIEKPQAIANLEEIISECNGLMVARGDLGVEMSPERVPLLQKQIIRLCNQKGIPVITATQMLDSMINNPRPTRAEASDVANAIIDGTDAVMLSGESAVGKYPIRAVEMLAKIAEDVEPEINFINYPPAFNDETHAISEAINTIDKIIDLHCIIAYTCSGYTGQLAAAERPKAPVVALTPNPKVYHRLNLVWGVKPLLLEQEVESFEELINQAQTYLLVRQMASPGDKILIIGGIPSGKAKGTNFIKIHTIG

SEQ ID NO: 358 - protein, 476 aa, Arthrospira platensis NIES-39
MSYSQTQTKSKAGYQAGVKDYKLTYYTPDYTPKDTDILAAFRVSPQPGVPPEEAGAAVAAESSTGTWTTVWTDLLTDLDRYKGRCYHIEPVPGEDNQFFCFVAYPLDLFEEGSVTNMLTSIVGNVFGFKALRGLRLEDMRIPIAYLKTFQGPPHGITVERDKLNKYGRPLLGCTIKPKLGLSAKNYGRAVYECLRGGLDFTKDDENINSQPFMRWRDRFLFVQEAIEKAQAETNEIKGHYLNVTAPTCEEMMKRAEFAKEIGTPIIMHDFFTAGFTANTTLARWCRDNGLLLHIHRAMHAVVDRQRNHGIHFRVLAKCLRMSGGDHLHSGTVVGKLEGEKGITMGFVDLMREDHIEEDRSRGIFFTQDWASMPGVMPVASGGIHVWHMPALVEIFGDDSCLQFGGGTLGHPWGNAPGATANRVALEACIQARNEGRNLFREGGDVIREACKWSPELAVACELWKEIKFEFEAMDTL

SEQ ID NO: 359 - protein, 484 aa, Arthrospira platensis NIES-39
MLELGSQRNRAKNNHIGDLMSQSFESLGISEQRARHLETLGFTEPTPVQIQAIPEMLSGRDVVGMAQTGTGKTAAFSLPILEQIDVHAAGIQALVLTPTRELAMQVKEAIRTFSDDNALYVLTVYGGQSIDRQIQRLRRGVQVVVGTPGRILDLLNRGELKLDLLRWLVLDEADEMLSMGFIQDVEKILESADSEHRQTAFFSATMDASISKLVRRHLKSPVTVKVETPKATPKRIEQSVYMVPRGWSKARALEPILELEDPESAIIFVRTKQSAADLTNQLQAAGHSVDEYHGNLNQSQRERLLMRLRRRQVRWIVATDIAARGLDVDHLTHVINYDLPDQVDSYVHRIGRTGRAGREGKAITLIQPIDRRKLRNIERHLRQTLSIQSIPKRAEIEARYIDRLKDRVRDALAGERMASFLPIVSQLSEEYDPHAIAAAALQLAYDQTRPASIGRDDYEDDDDAVSNKPKLIKRRRPASVSNNS

SEQ ID NO: 360 - protein, 496 aa, Glycine max
MATSDSNMLLNYVPVYVMLPLGVVNVDNVFEDPDGLKEQLLQLRAAGVDGVMVDVWWGIIELKGPKQYDWRAYRSLFQLVQECGLTLQAIMSFHQCGGNVGDIVNIPIPQWVLDIGESNHDIFYTNRSGTRNKEYLTVGVDNEPIFHGRTAIEIYSDYMKSFRENMSDFLESGLIIDIEVGLGPAGELRYPSYPQSQGWEFPGIGEFQCYDKYLKADFKAAVARAGHPEWELPDDAGKYNDVPESTGFFKSNGTYVTEKGKFFLTWYSNKLLNHGDQILDEANKAFLGCKVKLAIKVSGIHWWYKVENHAAELTAGYYNLNDRDGYRPIARMLSRHHAILNFTCLEMRDSEQPSDAKSGPQELVQQVLSGGWREDIRVAGENALPRYDATAYNQIILNARPQGVNNNGPPKLSMFGVTYLRLSDDLLQKSNFNIFKKFVLKMHADQDYCANPQKYNHAITPLKPSAPKIPIEVLLEATKPTLPFPWLPETDMKVDG

SEQ ID NO: 361 - protein, 501 aa, Ovis aries
MPSANASRRSQEKPREIMDAAEDYAKERYGVSSMIQSQEKPDRVLVRISDLTVQKAGEVVWVRARVHASRAKGKQCFLVLRQQQFNVQALVAVGDHASKQMVKFAANINKESIVDVEGVVRKVNQKIGSCTQQDVELRVQKVYVISSAEPRLPLQLDDAVRPEVEGEEEGRATVNQDTRLDNRVIDLRTSTSQAIFRLQSGICHLFRETLTNKGFVEIQTPKIISAASEGGANVFTVSYFKNNAYLAQSPQLYKQMCICADFEKVFCIGPVFRAEDSNTHRHLTEFVGLDIEMAFNYHYHEVVEEIADTLVQIFKGLQKRFQTEIQMVNKQFPCEPFKFLEPTLRLEYCEALAMLREAGIEMGDEEDLSTPNEKLLGRLVKEKYDTDFYILDKYPLAVRPFYTMPDPRNPKQSNSYDMFMRGEEILSGAQRIHDPQLLTERALHHGIDLEKIKAYIDSFRFGAPPHAGGGIGLERVTMLFLGLHNVRQTSMFPRDPKRLTP

SEQ ID NO: 362 - protein, 505 aa, Saccharomyces cerevisiae
  strain ATCC 204508 / S288c
MSEGPVKFEKNTVISVFGASGDLAKKKTFPALFGLFREGYLDPSTKIFGYARSKLSMEEDLKSRVLPHLKKPHGEADDSKVEQFFKMVSYISGNYDTDEGFDELRTQIEKFEKSANVDVPHRLFYLALPPSVFLTVAKQIKSRVYAENGITRVIVEKPFGHDLASARELQKNLGPLFKEEELYRIDHYLGKELVKNLLVLRFGNQFLNASWNRDNIQSVQISFKERFGTEGRGGYFDSIGIIRDVMQNHLLQIMTLLTMERPVSFDPESIRDEKVKVLKAVAPIDTDDVLLGQYGKSEDGSKPAYVDDDTVDKDSKCVTFAAMTFNIENERWEGVPIMMRAGKALNESKVEIRLQYKAVASGVFKDIPNNELVIRVQPDAAVYLKFNAKTPGLSNATQVTDLNLTYASRYQDFWIPEAYEVLIRDALLGDHSNFVRDDELDISWGIFTPLLKHIERPDGPTPEIYPYGSRGPKGLKEYMQKHKYVMPEKHPYAWPVTKPEDTKDN

SEQ ID NO: 363 - protein, 616 aa, Aspergillus niger
ATLDSWLSNEATVARTAILNNIGADGAWVSGADSGIVVASPSTDNPDYFYTWTRDSGLVLKTLVDLFRNGDTSLLSTIENYISAQAIVQGISNPSGDLSSGAGLGEPKFNVDETAYTGSWGRPQRDGPALRATAMIGFGQWLLDNGYTSTATDIVWPLVRNDLSYVAQYWNQTGYDLWEEVNGSSFFTIAVQHRALVEGSAFATAVGSSCSWCDSQAPEILCYLQSFWTGSFILANFDSSRSGKDANTLLGSIHTFDPEAACDDSTFQPCSPRALANHKEVVDSFRSIYTLNDGLSDSEAVAVGRYPEDTYYNGNPWFLCTLAAAEQLYDALYQWDKQGSLEVTDVSLDFFKALYSDAATGTYSSSSSTYSSIVDAVKTFADGFVSIVETHAASNGSMSEQYDKSDGEQLSARDLTWSYAALLTANNRRNSVVPASWGETSASSVPGTCAATSAIGTYSSVTVTSWPSIVATGGTTTTATPTGSGSVTSTSKTTATASKTSTSTSSTSCTTPTAVAVTFDLTATTTYGENIYLVGSISQLGDWETSDGIALSADKYTSSDPLWYVTVTLPAGESFEYKFIRIESDDSVEWESDPNREYTVPQACGTSTATVTDTWR

SEQ ID NO: 364 - protein, 73 aa, Gallus gallus
EKPKEVKITSMARREEIHEEKMEIYEKPKKVYEEWEEDYGEDHDYYFKEEGYDEGEEEWEETYDKREVAYEEE

SEQ ID NO: 365 - protein, 81 aa, Bos taurus
YRFNWDHCGKMEPACKRHFIQDTCLYECSPNLGPWIREVNQRWRKERVLGVPLCKEDCQSWWEDCRTSYTCKSNWHKGWNW

SEQ ID NO: 366 - protein, 69 aa, Saccharomyces cerevisiae
  strain ATCC 204508 / S288c
WFKESRSSKTNPKRDWFFWRPPKGYDAEGKPIPPNNWKSFFGGSAWTFDETTNEFYLRLFASRQVDLNW

SEQ ID NO: 367 - protein, 70 aa, Saccharomyces cerevisiae
  strain ATCC 204508 / S288c
YYYQFPGQAYYYSPEYGYDDEDGEEEDQDEDMVGDSGTTRQEDGGEDSNSRRYPSYYHCNTARNNRTNQQ

SEQ ID NO: 368 - protein, 76 aa, Sus scrofa
LEEMRKTTIDLLEIESMELSRLYFLLETIPNSVSRELEECVRDARRLNLFEINQLHLKITRINNEIEFWKKKILDL

SEQ ID NO: 369 - protein, 69 aa, Bos taurus
QQTQLIHDLNMQKARLQTQNGELSHQVEEKAALISQLTKGKQVLTQQLEDLKRQLEEETKAKSALAHAL

SEQ ID NO: 370 - protein, 73 aa, Oreochromis niloticus
LNEMEIQLSQANRQAAEAQKQVKTLQAFLKDTQLQLDDTQHGNDDLKENIALLERRNNLIQAELEEVRAALEQ

SEQ ID NO: 371 - protein, 85 aa, Zea mays
MQEHTDLQHEKHELEQQLLEVRKELDGAYHTIVNQEEQASLREIKWDTFRIYSEDRLEAEQQRAEELELQVAALKQQLQEAEEEQ

SEQ ID NO: 372 - protein, 70 aa, Arthrospira platensis NIES-39
TVEEIKTFLYEQLRNAYDIKEAQVNQIRPGLMRDAERFFILQQIDSLWREHLQQMDALRESVGLRGYGQK

SEQ ID NO: 373 - protein, 77 aa, Arthrospira platensis NIES-39
QASLLHTGFDEIEPWNQIMEELSVRSRSCYRALIYEQPDLVDFFEQVTPIQEISQLQISSRPARRQSDKKKDISGLR

SEQ ID NO: 374 - protein, 84 aa, Saccharomyces cerevisiae
  strain ATCC 204508 / S288c
QTREYARHFLQTSNRLLMADVVHDEELKYNGRVVSVRFTPVGIDAFDLQSQLKDGSVMQWRQLIRERWQGKKLIVCRDQFDRIR

SEQ ID NO: 375 - protein, 69 aa, Bos taurus
ITDLRGMLRRLKRMRRVEKKSAAFARILDPAYQVDKGGRVRFVVELADPKLEVKWYKNGQEIRPSTKYI

SEQ ID NO: 376 - protein, 114 aa, Glycine max
RGRGRRRGPRREEEEKWVPVTKLGRLVKEGRIRSLEQIYLHSLPIKEHQIIDTLVGPTLKDEVMKITPVQKQTRAGQRTRFKAFVVVGDNNGHVGLGVKCSKEVATAIRGAIIL

SEQ ID NO: 377 - protein, 230 aa, Arthrospira platensis C1
QEQLQQELEQTKSELRDVWEELERVQSQFEQVSGELQQAQTQIPQQETASDTDCQQELEAVRSQLNQVLAELEQAKTQIHQQEAEKAQLESLQQELQTTQDSLNTTRTQLDQVQTQIQQGETDKAELESVQQQLQETQAKLTSTTEELEKAKTQIQEAQGSKAQLESVQQHLQETQAKLTSTTEELEKVNCQFDEVLGELEETHFKLHQIQQETASDTESKQELERVNSQ

SEQ ID NO: 378 - protein, 181 aa, Oreochromis niloticus
VTTAIQQESEKAAAVEQLEESKSKIEGLLDWISNVGNKNKSSLDQTDHVSQENGNLPEEPSAKGLITEDDDANGNALQTTDKDFGRETNGENNESPNLDKQYQRLKAHHQEILSQQQDLIMATQSAQAMLDKQANVLSPQEKEALQKNIQELKERYETSLTQAEQQMKQVQCVQEELKKFQ

SEQ ID NO: 379 - protein, 127 aa, Gallus gallus
QEQQVALLDLQNTLFSTQLEVQKLKRAQRQKEHQLVEAKRAAQLLETTVHEEEQQKEATWKHNQELRAVVQQLQVELQDKAQQIQAMEWEKCRELQAQEQRVQCLSQHLARKEQLLQESRELLQCQQ

SEQ ID NO: 380 - protein, 74 aa, Gallus gallus
LERAVDEKFCALEEKEQELQQLRLSIKERGGDLERLRNVLSSNEATIHSLESLLKAKTLELEQMSATCENLRWL

SEQ ID NO: 381 - protein, 113 aa, Bos taurus
LLLKSLMLAKAKECWEQEHEEREAEKKRYLAERIPALQTRGLSLSALQDLCRDLHAKVEVVDEERYDIEAKCLHNTREIKDLKLKVLDLRGKFKRPPLRRVRVSADAMLRALL

SEQ ID NO: 382 - protein, 71 aa, Bos taurus
REIKDLKLKVLDLRGKFKRPPLRRVRVSADAMLRALLGSKHKVSMDLRANLKSVKKEDTEKERPVEVGDWR

SEQ ID NO: 383 - protein, 70 aa, Glycine max
RPYEKERLDAELKLVGEYGLRCKRELWRVQYALSRIRNNARNLLTLDEKNPRRIFEGEALLRRMFRYGLL

SEQ ID NO: 384 - protein, 99 aa, Glycine max
RELWRVQYALSRIRNNARNLLTLDEKNPRRIFEGEALLRRMFRYGLLDETQNKLDYVLALTVENFLERRLQTLVFKSGMAKSIHHARVLIKQRHIRVGR

SEQ ID NO: 385 - protein, 67 aa, Saccharomyces cerevisiae
  strain ATCC 204508 / S288c
MDSKTPVTLAKVIKVLGRTGSRGGVTQVRVEFLEDTSRTIVRNVKGPVRENDILVLMESEREARRLR

SEQ ID NO: 386 - protein, 127 aa, Arthrospira platensis NIES-39
MTLQSRSSSPQRGVPMSTSGSSLADILERVLDKGIVIAGDISVSVGSTELLSIRIRLLIASVDKAKEIGINWWESDPYLSSQAQQLSQSNQQLLEEVKRLQEEVRSLKALTSQSSQPVTPPNSENDD

SEQ ID NO: 387 - protein, 170 aa, Zea mays
MPPKLDPSQVVEVFVRVTGGEVGAASSLAPKIGPLGLSPKKIGEDIAKETAKDWKGLRVTVKLTVQNRQAKVSVVPSAAALVIKALKEPERDRKKVKNIKHSGNISLDDVIEIARTMRPRSMAKEMSGCVKEILGTCVSVGCTVDGKDPKDLQQEIDDGEDWSLGGLSVY

SEQ ID NO: 388 - protein, 169 aa, Zea mays
MPPKLDPSQVVEVFVRVTGGEVGAASSLAPKIGPLGLSPKKIGEDIAKETAKDWKGLRVTVKLTVQNRQAKVSVVPSAAALVIKALKEPERDRKKVKNIKHSGNISLDDVIEIARTMRPRSMAKEMSGCVKEILGTCVSVGCTVDGKDPKDLQQEIDDGEDWSLGGLSV

SEQ ID NO: 389 - protein, 179 aa, Arthrospira platensis NIES-39
MSRIGKRPIPIPAKVTLTLDGQKVTVKGPKGELSRVLPNEVILSLEGDTLIVKRRDESLVARQRHGLCRTLVANMVDGVSQGFERRLEIQGVGYRAQVQGKNLILNVGYSKPVEMVPPEGCSVAVENNTNVIVSGINKELVGNMAAKIRAVRPPEPYKGKGIRYAGEQVRRKAGKAGKK

SEQ ID NO: 390 - protein, 270 aa, Bacillus subtilis
  strain 168
KSIEDTNMASCITNKKFVQLEKKFDARLGVYAIDIGSNKTIAYRPNERFAYASTYKVLAAAAVLKKNSIEKLNEVIHYSKDDLVTYSPITEKHLDTGMSLKEISEAAIRYSDNTAGNILLQQLGGPKGFEKSLKQIGDHVTKAKRFETDLNSAIPGDIRDTSTAKALATDLKAFTLDNTLTTDKRMILTDWMRGNATGDELIRAGAPIGWEVGDKSGAGSYGTRNDIAIVWPPNRAPIVVAILSNRFTKDANYDNALIAEAAKVVLNDLK

SEQ ID NO: 391 - protein, 462 aa, Bacillus subtilis
  strain 168
AEKQDALSGQIDKILADHPALEGAMAGITVRSAETGAVLYEHSGDTRMRPASSLKLLTAAAALSVLGENYSFTTEVRTDGTLKGKKLNGNLYLKGKGDPTLLPSDFDKMAEILKHSGVKVIKGNLIGDDTWHDDMRLSPDMPWSDEYTYYGAPISALTASPNEDYDAGTVIVEVTPNQKEGEEPAVSVSPKTDYITIKNDAKTTAAGSEKDLTIEREHGTNTITIEGSVPVDANKTKEWISVWEPAGYALDLFKQSLKKQGITVKGDIKTGEAPSSSDVLLSHRSMPLSKLFVPFMKLSNNGHAEVLVKEMGKVKKGEGSWEKGLEVLNSTLPEFGVDSKSLVLRDGSGISHIDAVSSDQLSQLLYDIQDQSWFSAYLNSLPVAGNPDRMVGGTLRNRMKGTPAQGKVRAKTGSLSTVSSLSGYAETKSGKKLVFSILLNGLIDEEDGKDIEDQIAVILANQ

SEQ ID NO: 392 - protein, 332 aa, Bacillus subtilis
  strain 168
LFIGFHDHTGNKKIVYDDDQEGLQDQIVFKFSHVVAENTPKGLAANKFADLVNEKSGGKIKIEVFPNGSLYSDIEEIEALQNGDVQFIAPSTSKLGMLSPEWGVLDLPYAFTDYNAVKKGLNGSIGTQLFDSLKKNQLKGLAYWTNGFKQITTNQGPVKTPDDLKGQDLRIMQSDVIEDQFKLLGATPHQESFNSTFQLLENNVVDGEENTISNIYSKKFYNVQDYLTISSHGYLGYAVMTDEHFWKAQTPETRRILTEAMKETTEWNETYAEQMNKEQLEEIKKNSAIHIYELSDKEKQEWMKRLDPVYRQYEPIFGRELIRELLELRKDS

SEQ ID NO: 393 - protein, 388 aa, Bacillus subtilis
  strain 168
IGASGLGGLAPLVQTAAKPSKKDEKEEEQIVPFYGKHQAGITTAHQTYVYFAALDVTAKDKSDIITLFRNWTSLTQMLTSGKKMSAEQRNQYLPPQDTGESADLSPSNLTVTFGFGPGFFEKDGKDRFGLKSKKPKHLAALPAMPNDNLDEKQGGGDICIQVCADDEQVAFHALRNLLNQAVGTCEVRFVNKGFLSGGKNGETPRNLFGFKDGTGNQSTKDDTLMNSIVWIQSGEPDWMTGGTYMAFRKIKMFLEVWDRSSLKDQEDTFGRRKSSGAPFGQKKETDPVKLNQIPSNSHVSLAKSTGKQILRRAFSYTEGLDPKTGYMDAGLLFISFQKNPDNQFIPMLKALSAKDALNEYTQTIGSALYACPGGCKKGEYIAQRLLES

SEQ ID NO: 394 - protein, 336 aa, Bacillus subtilis
  strain 168
HTVSPVNPNAQQTTKTVMNWLAHLPNRTENRVLSGAFGGYSHDTFSMAEADRIRSATGQSPAIYGCDYARGWLETANIEDSIDVSCNGDLMSYWKNGGIPQISLHLANPAFQSGHFKTPITNDQYKKILDSSTVEGKRLNAMLSKIADGLQELENQGVPVLFRPLHEMNGEWFWWGLTSYNQKDNERISLYKQLYKKIYHYMTDTRGLDHLIWVYSPDANRDFKTDFYPGASYVDIVGLDAYFQDAYSINGYDQLTALNKPFAFTEVGPQTANGSFDYSLFINAIKQKYPKTIYFLAWNDEWSAAVNKGASALYHDSWTLNKGEIWNGDSLTPIVE

SEQ ID NO: 395 - protein, 379 aa, Paenibacillus thiaminolyticus
AHSDASSDITLKVAIYPYVPDPARFQAAVLDQWQRQEPGVKLEFTDWDSYSADPPDDLDVFVLDSIFLSHFVDAGYLLPFGSQDIDQAEDVLPFALQGAKRNGEVYGLPQILCTNLLFYRKGDLKIGQVDNIYELYKKIGTSHSEQIPPPQNKGLLINMAGGTTKASMYLEALIDVTGQYTEYDLLPPLDPLNDKVIRGLRLLINMAGEKPSQYVPEDGDAYVRASWFAQGSGRAFIGYSESMMRMGDYAEQVRFKPISSSAGQDIPLFYSDVVSVNSKTAHPELAKKLANVMASADTVEQALRPQADGQYPQYLLPARHQVYEALMQDYPIYSELAQIVNKPSNRVFRLGPEVRTWLKDAKQVLPEALGLTDVSSLAS

SEQ ID NO: 396 - protein, 96 aa, Bacillus subtilis
  strain 168
QYISRCMFEKETKELYIGENLLQNGVLLSIRHVLEERKGQEGTQQFLYGRVSYYIHDTSIKEQKEINLRVSTDSGTERTAQIVFDQKQKKLLRWTE

SEQ ID NO: 397 - protein, 206 aa, Bacillus subtilis
  strain 168
KFVKNPNTSESWHFTVDDSVIYQHLPIDENGWHAGDGTNGTGNRKSIGIEICENADGDFEKATSNAQWLIRKLMKENNIPLNRVVPHKKWSGKECPRKLLDHWNSFLNGISSSDTPPKETSPSYPLPSGVIKLTSPYRKGTNILQLQKALAVLHFYPDKGAKNNGIDGVYGPKTANAVKRFQLMNGLTADGIYGPKTKAKLKSKLK

SEQ ID NO: 398 - protein, 267 aa, Bacillus subtilis
  strain 168
ASKGNLLSPDRILTVAHRGASGYVPEHTILSYETAQKMKADFIELDLQMTKDGKLIVMHDEKLDRTTNGMGWVKDHTLADIKKLDAGSWFNEAYPEKAKPQYVGLKVPTLEEVLDRFGKHANYYIETKSPDTYPGMEEKLIASLQKHKLLGKHSKPGQVIIQSFSKESLVKVHQLQPNLPTVQLLEAKQMASMTDAALEEIKTYAVGAGPDYKALNQENVRMIRSHGLLLHPYTVNNEADMHRLLDWGVTGVFTNYPDLFHKVKKGY

SEQ ID NO: 399 - protein, 289 aa, Bacillus subtilis
  strain 168
DSKGDKLHVVTTFYPMYEFTKQIVKDKGDVDLLIPSSVEPHDWEPTPKDIANIQDADLFVYNSEYMETWVPSAEKSMGQGHAVFVNASKGIDLMEGSEEEHEEHDHGEHEHSHAMDPHVWLSPVLAQKEVKNITAQIVKQDPDNKEYYEKNSKEYIAKLQDLDKLYRTTAKKAEKKEFITQHTAFGYLAKEYGLKQVPIAGLSPDQEPSAASLAKLKTYAKEHNVKVIYFEEIASSKVADTLASEIGAKTEVLNTLEGLSKEEQDKGLGYIDIMKQNLDALKDSLLVKS

SEQ ID NO: 400 - protein, 244 aa, Bacillus subtilis
  strain 168
ASSAHEKHLNVSKMNVDDEFKDTDGTFILHDLQKDQTFVYNRKRANQRQTPQSTFKVVNALIGLQVKAVRDEYDVKRWDGVKREFESWNRDHTLGSAMRESAIWYYQALARDIGEERMKTWLHTLSYGNEDISGGIDQFWLQSSLTISPLEQETFLEKLAKEELPFDKPVMKIVKRMMIQEEGDHYTLYGKTGTRLTDMGLGWFVGFIKTEHGSYVFVTNVDDSGTKAKNITVDILKKYGLITS

SEQ ID NO: 401 - protein, 124 aa, Bacillus subtilis
  strain 168
QSASIEAKTVNSTKEWTISDIEVTYKPNAVLSLGAVEFQFPDGFHATTRDSVNGRTLKETQILNDGKTVRLPLTLDLLGASEFDLVMVRKTLPRAGTYTIKGDVVNGLGIGSFYAETQLVIDPR

SEQ ID NO: 402 - protein, 287 aa, Bacillus subtilis
  strain 168
QNNNGSGKSESKDSRVIHDEEGKTTVSGTPKRVVVLELSFLDAVHNLGITPVGIADDNKKDMIKKLVGSSIDYTSVGTRSEPNLEVISSLKPDLIIADAERHKNIYKQLKKIAPTIELKSREATYDETIDSFTTIAKALNKEDEGKEKLAEHKKVINDLKAELPKDENRNIVLGVARADSFQLHTSSSYDGEIFKMLGFTHAVKSDNAYQEVSLEQLSKIDPDILFISANEGKTIVDEWKTNPLWKNLKAVKNGQVYDADRDTWTRFRGIKSSETSAKDVLKKVYNK

SEQ ID NO: 403 - protein, 431 aa, Bacillus subtilis
  strain 168
VTPAAHAVQISNSERELPFKAKHAYSTISQLSEAIGPRIAGTAAEKKSALLIASSMRKLKLDVKVQRFNIPDRLEGTLSSAGRDILLQAASGSAPTEEQGLTAPLYNAGLGYQKDFTADAKGKIALISRGDLTYYEKAKNAEAAGAKAVIIYNNKESLVPMTPNLSGNKVGIPVVGIKKEDGEALTQQKEATLKLKAFTNQTSQNIIGIKKPKNIKHPDIVYVTAHYDSVPFSPGANDNGSGTSVMLEMARVLKSVPSDKEIRFIAFGAEELGLLGSSHYVDHLSEKELKRSEVNFNLDMVGTSWEKASELYVNTLDGQSNYVWESSRTAAEKIGFDSLSLTQGGSSDHVPFHEAGIDSANFIWGDPETEEVEPWYHTPEDSIEHISKERLQQAGDLVTAAVYEAVKKEKKPKTIKKQMKAKASDIFEDIK

SEQ ID NO: 404 - protein, 153 aa, Bacillus subtilis
  strain 168
AESTSTKAHTESTMRTQSTASLFATITGASKTEWSFSDIELTYRPNTLLSLGVMEFTLPSGFTANTKDTLNGNALRTTQILNNGKTVRVPLALDLLGAGEFKLKLNNKTLPAAGTYTFRAENKSLSIGNKFYAEASIDVAKRSTPPTQPCGCN

SEQ ID NO: 405 - protein, 291 aa, Bacillus subtilis
  strain 168
AFWGASNELLHDPTMIKEGSSWYALGTGLTEERGLRVLKSSDAKNWTVQKSIFTTPLSWWSNYVPNYGQNQWAPDIQYYNGKYWLYYSVSSFGSNTSAIGLASSTSISSGGWKDEGLVIRSTSSNNYNAIDPELTFDKDGNPWLAFGSFWSGIKLTKLDKSTMKPTGSLYSIAARPNNGGALEAPTLTYQNGYYYLMVSFDKCCDGVNSTYKIAYGRSKSITGPYLDKSGKSMLEGGGTILDSGNDQWKGPGGQDIVNGNILVRHAYDANDNGIPKLLINDLNWSSGWPSY

SEQ ID NO: 406 - protein, 234 aa, Bacillus subtilis
  strain 168
AFNDIKSKDATFASGTLDLSAKENSASVNLSNLKPGDKLTKDFQFENNGSLAIKEVLMALNYGDFKANGGSNTSPEDFLSQFEVTLLTVGKEGGNGYPKNIILDDANLKDLYLMSAKNDAAAAEKIKKQIDPKFLNASGKVNVATIDGKTAPEYDGVPKTPTDFDQVQMEIQFKDDKTKDEKGLMVQNKYQGNSIKLQFSFEATQWNGLTIKKDHTDKDGYVKENEKAHSEDKN

SEQ ID NO: 407 - protein, 626 aa, Bacillus subtilis
  strain 168
ETANKSNELTAPSIKSGTILHAWNWSFNTLKHNMKDIHDAGYTAIQTSPINQVKEGNQGDKSMSNWYWLYQPTSYQIGNRYLGTEQEFKEMCAAAEEYGIKVIVDAVINHTTSDYAAISNEVKSIPNWTHGNTQIKNWSDRWDVTQNSLLGLYDWNTQNTQVQSYLKRFLDRALNDGADGFRFDAAKHIELPDDGSYGSQFWPNITNTSAEFQYGEILQDSASRDAAYANYMDVTASNYGHSIRSALKNRNLGVSNISHYASDVSADKLVTWVESHDTYANDDEESTWMSDDDIRLGWAVIASRSGSTPLFFSRPEGGGNGVRFPGKSQIGDRGSALFEDQAITAVNRFHNVMAGQPEELSNPNGNNQIFMNQRGSHGVVLANAGSSSVSINTATKLPDGRYDNKAGAGSFQVNDGKLTGTINARSVAVLYPDDIAKAPHVFLENYKTGVTHSFNDQLTITLRADANTTKAVYQINNGPETAFKDGDQFTIGKGDPFGKTYTIMLKGTNSDGVTRTEKYSFVKRDPASAKTIGYQNPNHWSQVNAYIYKHDGSRVIELTGSWPGKPMTKNADGIYTLTLPADTDTTNAKVIFNNGSAQVPGQNQPGFDYVLNGLYNDSGLSGSLPH

SEQ ID NO: 408 - protein, 247 aa, Aspergillus niger
  strain CBS 513.88 / FGSC A1513
FPQQGAPHPLPWSPPGPNDVRAPCPMLNTLANHGYLPHNGKDITERHTINALYNALGIEEELAIYLHQEAVTTNPAPNATTFSLNDLSRHDILEHDASLSRQDAYFGDNHDFNQTIFDETRSYWTSPIIDVKQAAVSRQARVNTSMATNPNYTMSELGDSFSYGETAAYIIVLGDKEKGLVNRSRVEYLFENERLPLDLGWSRAKENITFDDLSTMLQRIINATGGEMDFRATIALPRLVYIYYEEA

SEQ ID NO: 409 - protein, 427 aa, Aspergillus niger
  strain CBS 513.88 / FGSC A1513
LVRPDGVGRTPALGWNSWNAYSCDIDADKIVTAANEVVNLGLKDLGYEYINIDDCWSVKSGRNTTTKRIIPDPDKFPNGISGVADQVHALGLKLGIYSSAGLTTCAGYPASLGYEEIDAQSFAEWGIDYLKYDNCGVPTNLTDQYTYCVPDSTDGSNYPNGTCVNLTDAAPQGYDWATSTTAKRYQRMRDALLSVNRTILYSLCDWGQADVNAWGNATGNSWRMSGDITATWSRIAEIANENSFLMNYANFWGYPDPDMLEVGNGNLTLPENRAHFALWAMMKAPLIIGTPLDSIDTSHLTILSNKPLLTFHQDAVIGRPAYPYKWGYNPDWTFDPEHPAEYWSGPTSSGEVFVLMLNSEGEVKTRSAVWEEVPELKDRGTKKNSKEKKGFKVTDAWTGKDLGCVKDKYEVKLQAHDVAVLVVGGQC

SEQ ID NO: 410 - protein, 318 aa, Aspergillus niger
  strain CBS 513.88 / FGSC A1513
SPLMDTLLQIPDLSTYAEVYNLTGGIVEINPLFLKRYNYDEDKRNYTFLAPTNDAWAKIPDAIFTTLMTQQAYPLTEALLRTHIIEARLTASELVKLSESEGAGGISTSLQLSNTTEQYHNGVLTKTVQGYYIDSVISSNGTVQIDDQAAIVTANIVADNGLIHAIDQVIDPFLIYGGGPSNRTLAPTSETTNLTIGELLKIDSRLVNSSKILTENSPDTLRRLSKQTGSMQFFVAPQNEAYDLMPTILPIFHTLVAPYKSPFNTLMWQYGWLDSDGETFADLNFTRPVTVASDVTGLNITVTQEKSAIFIMNAGLVT

SEQ ID NO: 411 - protein, 373 aa, Aspergillus niger
  strain CBS 513.88 / FGSC A1513
SSIPQTDYDVIVVGGGPAGLSVLSSLGRMRRKTVMFDSGEYRNGVTREMHDVLGFDGTPPAQFRGLARQQISKYNSTSVIDIKIDSITPVEDAAANSSYFRAVDANGTQYTSRKVVLGTGLVDVIPDVPGLREAWGKGIWWCPWCDGYEHRDEPLGILGGLPDVVGSVMETHTLYSDIIAFTNGTYTPANEVALAAKYPNWKQQLEAWNVGIDNRSIASIERLQDGDDHRDDTGRQYDIFRVHFTDGSSVVRNTFITNYPTAQRSTLPEELSLVMVDNKIDTTDYTGMRTSLSGVYAVGDCNSDGSTNVPHAMFSGKRAGVYVHVEMSREESNAAISKRDFDRRALEKQTERMVGNEMEDLWKRVLENHHRRS

SEQ ID NO: 412 - protein, 851 aa, Aspergillus niger
  strain CBS 513.88 / FGSC A1513
AVIGPRANSQSCPGYKASNVQKQARSLTADLTLAGTPCNSYGKDLEDLKLLVEYQTDERLHVMIYDADEEVYQVPESVLPRVGSDEDSEDSVLEFDYVEEPFSFTISKGDEVLFDSSASPLVFQSQYVNLRTWLPDDPYVYGLGEHSDPMRLPTYNYTRTLWNRDAYGTPNNTNLYGSHPVYYDHRGKSGTYGVFLLNSNGMDIKINQTTDGKQYLEYNLLGGVLDFYFFYGEDPKQASMEYSKIVGLPAMQSYWTFGVCPPPPNPITVRVVVYNYSQAKIPLETMWTDIDYMDKRRVFTLDPQRFPLEKMRELVTYLHNHDQHYIVMVDPAVSVSNNTAYITGVRDDVFLHNQNGSLYEGAVWPGVTVFPDWFNEGTQDYWTAQFQQFFDPKSGVDIDALWIDMNEASNFCPYPCLDPAAYAISADLPPAAPPVRPSSPIPLPGFPADFQPSSKRSVKRAQGDKGKKVGLPNRNLTDPPYTIRNAAGVLSMSTIETDLIHAGEGYAEYDTHNLYGTRLVMSSASRTAMQARRPDVRPLVITRSTFAGAGAHVGHWLGDNFSDWVHYRISIAQILSFASMFQIPMVGADVCGFGSNTTEELCARWASLGAFYTFYRNHNELGDISQEFYRWPTVAESARKAIDIRYKLLDYIYTALHRQSQTGEPFLQPQFYLYPEDSNTFANDRQFFYGDALLVSPVLNEGSTSVDAYFPDDIFYDWYTGAVVRGHGENITLSNINITHIPLHIRGGNIIPVRTSSGMTTTEVRKQGFELIIAPDLDDTASGSLYLDDGDSLNPSSVTELEFTYSKGELHVKGTFGQKAVPKVEKCTLLGKSARTFKGFALDAPVNFKLK

SEQ ID NO: 413 - protein, 358 aa, Aspergillus niger
  strain CBS 513.88 / FGSC A1513
VRPRSTACNNSPDLCSKSYGEITHLGAHDSPFLRDASTDYSTFGDQYYNTTLQLDAGVRLVTAQVHKSNSQWRLCHSSCDYLDAGLLSTWLSDIKSWLDSNPNDVVTVLLVNSDDATASDLHSQFETANLTNYTYTPTSQTSAPSSWPTLQELINNGTRLMTFVASLDASSNTVAPYLMDEFTFIWENNYDVTSASNFSCEPDRPTSLQNELSTALSSNRLPFMNHFLYQETLDIEYPNVSYISTTNAASGGTGNLGDTATKCKKEYNGRQPTFILVDFFDKGPAIDTVDSLNNVTNATGRKNLTSVSVTSSASTYSNVFKGLVEVVQKAKDGANPSMGEWIWAGGDWGSLLGGGIAV

SEQ ID NO: 414 - protein, 989 aa, Aspergillus niger
  strain CBS 513.88 / FGSC A1513
ASIKHRINGFTLTEHSDPAKRELLQKYVTWDDKSLFINGERIMIFSGEFHPFRLPVKELQLDIFQKVKALGFNCVSFYVDWALVEGKPGEYRADGIFDLEPFFDAASEAGIYLLARPGPYINAESSGGGFPGWLQRVNGTLRSSDKAYLDATDNYVSHVAATIAKYQITNGGPIILYQPENEYTSGCCGVEFPDPVYMQYVEDQARNAGVVIPLINNDASASGNNAPGTGKGAVDIYGHDSYPLGFDCANPTVWPSGDLPTNFRTLHLEQSPTTPYAIVEFQGGSYDPWGGPGFAACSELLNNEFERVFYKNDFSFQIAIMNLYMIFGGTNWGNLGYPNGYTSYDYGSAVTESRNITREKYSELKLLGNFAKVSPGYLTASPGNLTTSGYADTTDLTVTPLLGNSTGSFFVVRHSDYSSEESTSYKLRLPTSAGSVTIPQLGGTLTLNGRDSKIHVTDYNVSGTNIIYSTAEVFTWKKFADGKVLVLYGGAGEHHELAISTKSNVTVIEGSESGISSKQTSSSVVVGWDVSTTRRIIQVGDLKILLLDRNSAYNYWVPQLATDGTSPGFSTPEKVASSIIVKAGYLVRTAYLKGSGLYLTADFNATTSVEVIGVPSTAKNLFINGDKTSHTVDKNGIWSATVDYNAPDISLPSLKDLDWKYVDTLPEIQSSYDDSLWPAADLKQTKNTLRSLTTPTSLYSSDYGFHTGYLLYRGHFTATGNESTFAIDTQGGSAFGSSVWLNGTYLGSWTGLYANSDYNATYNLPQLQAGKTYVITVVIDNMGLEENWTVGEDLMKTPRGILNFLLAGRPSSAISWKLTGNLGGEDYEDKVRGPLNEGGLYAERQGFHQPEPPSQNWKSSSPLEGLSEAGIGFYSASFDLDLPKGWDVPLFLNIGNSTTPSPYRVQVYVNGYQYAKYISNIGPQTSFPVPEGILNYRGTNWLAVTLWALDSAGGKLESLELSYTTPVLTALGEVESVDQPKYKKRKGAY

SEQ ID NO: 415 - protein, 910 aa, Aspergillus niger
  strain CBS 513.88 / FGSC A1513
QYIRDLSTEKWTLSSRALNRTVPAQFPSQVHLDLLRAGVIGEYHGLNDFNLRWIAAANWTYTSQPIKGLLDNYDSTWLVFDGLDTFATISFCGQQIASTDNQFRQYAFDVSTALGSCKGDPVLSINFGSAPNIVDAIAQDSNSQKWPDDVQLTYEYPNRWFMRKEQSDFGWDWGPAFAPAGPWKPAYIVQLDKKESVYVLNTDLDIYRKGQINYLPPDQSQPWVVNASIDILGPLPTKPTMSIEVRDTHSGTILTSRTLNNVSVAGNAITGVTVLDGLTPKLWWPQGLGDQNLYNVSITVQSRGNQTVASVNKRTGFRTIFLNQRNITEAQRAQGIAPGANWHFEVNGHEFYAKGSNLIPPDSFWTRVTEEKMSRLFDAVVVGNQNMLRVWSSGAYLHDYIYDLADEKGILLWSEFEFSDALYPSDDAFLENVAAEIVYNVRRVNHHPSLALWAGGNEIESLMLPRVKDAAPSSYSYYVGEYEKMYISLFLPLVYENTRSISYSPSSTTEGYLYIDLSAPVPMAERYDNTTSGSYYGDTDHYDYDTSVAFDYGSYPVGRFANEFGFHSMPSLQTWQQAVDTEDLYFNSSVVMLRNHHDPAGGLMTDNYANSATGMGEMTMGVVSYYPIPSKSDHISNFSAWCHATQLFQADMYKSQIQFYRRGSGMPERQLGSLYWQLEDIWQAPSWAGIEYGGRWKVLHHVMRDIYQPVIVSPFWNYTTGSLDVYVTSDLWSPAAGTVDLTWLDLSGRPIAGNAGTPKSVPFTVGGLNSTRIYGTNVSSLGLPDTKDAVLILSLSAHGRLPNSDRTTNLTHENYATLSWPKDLKIVDPGLKIGHSSKKTTVTVEATSGVSLYTWLDYPEGVVGYFEENAFVLAPGEKKEISFTVLEDTTDGAWVRNITVQSLWDQKVRG

SEQ ID NO: 416 - protein, 380 aa, Aspergillus niger
  strain CBS 513.88 / FGSC A1513
KSTGDPFQLYTISAENITAKLIPYGARLTSLLVPDRDGNFQDVVVGYDDPKQYLKDTETNHTYFGAVVGRYANRIKNGTFSIGSDVYHIPENENDGEDTLHGGTVGYDQRNWTVTAYSNSSITFTLVDRAFEDFPGDVITHATFSVQTKVTPENPQGLPQLTTKLVSLALTETTPIMLANHIYWNLNAFKDETILEDTWLQLPLSKRLIGTNGILIPNGTILDVDVYDGAPDFVSGKLVGQDIEKTDGLCGTDCIGYDNCFIVDRPPQYAARNSIVPIIHMNSSTTGISLDVATNQQALQIYACNSQNGTIPVKQSQVQRNKAEGVDGAEYVNQHGCIVIETEGWIDGINNPQWGQLPDQIYSPETGPAVNWATYQFGTV

SEQ ID NO: 417 - protein, 308 aa, Aspergillus niger
  strain CBS 513.88 / FGSC A1513
EPIEPRQASVSIDTKFKAHGKKYLGNIGDQYTLTKNSKTPAIIKADFGALTPENSMKWDATEPSRGQFSFSGSDYLVNFAQSNNKLIRGHTLVWHSQLPSWVQSITDKNTLIEVMKNHITTVMQHYKGKIYAWDVVNEIFNEDGSLRDSVFYKVIGEDYVRIAFETARAADPNAKLYINDYNLDSASYPKLTGMVSHVKKWIAAGIPIDGIGSQTHLSAGGGAGISGALNALAGAGTKEIAVTELDIAGASSTDYVEVVEACLNQPKCIGITVWGVADPDSWRSSSTPLLFDSNYNPKPAYTAIANAL

SEQ ID NO: 418 - protein, 394 aa, Aspergillus niger
  strain CBS 513.88 / FGSC A1513
VPRVRRQGASSSFDYKSQIVRGVNLGGWLVTEPWITPSLYDSTGGGAVDEWTLCQILGKDEAQAKLSSHWSSFITQSDFDRMAQAGLNHVRIPIGYWAVAPIDGEPYVSGQIDYLDQAVTWARAAGLKVLVDLHGAPGSQNGFDNSGHRGPIQWQQGDTVNQTMTAFDALARRYAQSDTVTAIEAVNEPNIPGGVNEDGLKNYYYGALADVQRLNPSTTLFMSDGFQPVESWNGFMQGSNVVMDTHHYQVFDTGLLSMSIDDHVKTACSLATQHTMQSDKPVVVGEWTGALTDCAKYLNGVGNAARYDGTYMSTTKYGDCTGKSTGSVADFSADEKANTRRYIEAQLEAYEMKSGWLFWTWKTEGAPGWDMQDLLANQLFPTSPTDRQYPHQCS

SEQ ID NO: 419 - protein, 841 aa, Aspergillus niger
  strain CBS 513.88 / FGSC A1513
DELAYSPPYYPSPWANGQGDWAEAYQRAVDIVSQMTLAEKVNLTTGTGWELELCVGQTGGVPRLGIPGMCAQDSPLGVRDSDYNSAFPAGVNVAATWDKNLAYLRGQAMGQEFSDKGADIQLGPAAGPLGRSPDGGRNWEGFSPDPALSGVLFAETIKGIQDAGVVATAKHYIAYEQEHFRQAPEAQGYGFNITESGSANLDDKTMHELYLWPFADAIRAGAGAVMCSYNQINNSYGCQSSYTLNKLLKAELGFQGFVMSDWAAHHAGVSGALAGLDMSMPGDVDYDSGTSYWGTNLTISVLNGTVPQWRVDDMAVRIMAAYYKVGRDRLWTPPNFSSWTRDEYGFKYYYVSEGPYEKVNQFVNVQRNHSELIRRIGADSTVLLKNDGALPLTGKERLVALIGEDAGSNPYGANGCSDRGCDNGTLAMGWGSGTANFPYLVTPEQAISNEVLKNKNGVFTATDNWAIDQIEALAKTASVSLVFVNADSGEGYIDVDGNLGDRRNLTLWRNGDNVIKAAASNCNNTIVIIHSVGPVLVNEWYDNPNVTAILWGGLPGQESGNSLADVLYGRVNPGAKSPFTWGKTREAYQDYLYTEPNNGNGAPQEDFVEGVFIDYRGFNKRNETPIYEFGYGLSYTTFNYSNLQVEVLSAPAYEPASGETEAAPTFGEVGNASDYLYPDGLQRITKFIYPWLNSTDLEASSGDASYGQDASDYLPEGATDGSAQPILPAGGGAGGNPRLYDELIRVTVTIKNTGKVAGDEVPQLYVSLGGPNEPKIVLRQFERITLQPSEETQWSTTLTRRDLANWNVETQDWEITSYPKMVFVGSSSRKLPLRASLPTVH

SEQ ID NO: 420 - protein, 344 aa, Aspergillus niger
  strain CBS 513.88 / FGSC A1513
AAAPLEKRSCTFTSASAAKSGKSSCSTITLDNIAVPAGETLDLTGLKKGTTVIFEGETTFGYKEWKGPLISMSGTDITVKQASGAKINCDGARWWDGKGSNGGKTKPKFFQAHKLDQSSITGLKVYNTPVQGFSILADHLTITDVTIDNSAGTSKGHNTDAFDIGQSTYITIDGATVYNQDDCLAINSGEHITFTNGYCDGGHGLSIGSIGGRSDNTVNDVTISNSKVLNSQNGVRIKTIYGKTGTVENVKFEDITLSDISKYGIVVEQDYENGSPTGTPTNGVKVEDITFKKVTGSVKSSGTDIYILCGSGSCSNWTWSGVDVTGGKKSSKCKNVPSGASCSD

SEQ ID NO: 421 - protein, 966 aa, Aspergillus niger
  strain CBS 513.88 / FGSC A1513
ASQSLLSTTAPSQPQFTIPASADVGAQLIANIDDPQAADAQSVCPGYKASKVQHNSRGFTASLQLAGRPCNVYGTDVESLTLSVEYQDSDRLNIQILPTHVDSTNASWYFLSENLVPRPKASLNASVSQSDLFVSWSNEPSFNFKVIRKATGDALFSTEGTVLVYENQFIEFVTALPEEYNLYGLGEHITQFRLQRNANLTIYPSDDGTPIDQNLYGQHPFYLDTRYYKGDRQNGSYIPVKSSEADASQDYISLSHGVFLRNSHGLEILLRSQKLIWRTLGGGIDLTFYSGPAPADVTRQYLTSTVGLPAMQQYNTLGFHQCRWGYNNWSDLADVVANFEKFEIPLEYIWTDIDYMHGYRNFDNDQHRFSYSEGDEFLSKLHESGRYYVPIVDAALYIPNPENASDAYATYDRGAADDVFLKNPDGSLYIGAVWPGYTVFPDWHHPKAVDFWANELVIWSKKVAFDGVWYDMSEVSSFCVGSCGTGNLTLNPAHPSFLLPGEPGDIIYDYPEAFNITNATEAASASAGASSQAAATATTTSTSVSYLRTTPTPGVRNVEHPPYVINHDQEGHDLSVHAVSPNATHVDGVEEYDVHGLYGHQGLNATYQGLLEVWSHKRRPFIIGRSTFAGSGKWAGHWGGDNYSKWWSMYYSISQALSFSLFGIPMFGADTCGFNGNSDEELCNRWMQLSAFFPFYRNHNELSTIPQEPYRWASVIEATKSAMRIRYAILPYFYTLFDLAHTTGSTVMRALSWEFPNDPTLAAVETQFMVGPAIMVVPVLEPLVNTVKGVFPGVGHGEVWYDWYTQAAVDAKPGVNTTISAPLGHIPVYVRGGNILPMQEPALTTREARQTPWALLAALGSNGTASGQLYLDDGESIYPNATLHVDFTASRSSLRSSAQGRWKERNPLANVTVLGVNKEPSAVTLNGQAVFPGSVTYNSTSQVLFVGGLQNLTKGGAWAENWVLEW

SEQ ID NO: 422 - protein, 439 aa, Aspergillus niger
  strain CBS 513.88 / FGSC A1513
APSSTIKARDDVTAITVKGNAFFKGDDRFYIRGVDYQPGGSSKLADPIADADGCKRDIEKFKELGLNTIRVYSVDNSKDHDECMNALADAGIYLVLDVNTPKYSLNRADPAPSYNDVYLQYIFATVDKFASYKNTLAFFSGNEVINDGPSSKAAPYVKAVTRDLRQYIRSRNYREIPVGYSAADIDTNRLQMAEYMNCGTDDERSDFFAFNDYSWCDPSSFTTSGWDQKVKNFTGYGLPLFLSEYGCNTNKREFEEVSALYDTKMTGVYSGGLVYEYSQESSNYGLVEINGDSVKTLSDYDALKSAYSKTSNPEGDGGYNKTGGANPCPAKDSPNWDVDGDSLPAIPEPAKKYMTEGAGKGAGFSGSGSMNAGTASTSTATPGSGSASSSSSSSGSSGTSTSSTGAAAGLQVPGFAMAPVMVGLVTVLSTVFGAGLVLL

SEQ ID NO: 423 - protein, 483 aa, Bacillus Amyloliquefaciens
VNGTLMQYFEWYTPNDGQHWKRLQNDAEHLSDIGITAVWIPPAYKGLSQSDNGYGPYDLYDLGEFQQKGTVRTKYGTKSELQDAIGSLHSRNVQVYGDVVLNHKAGADATEDVTAVEVNPANRNQETSEEYQIKAWTDFRFPGRGNTYSDFKWHWYHFDGADWDESRKISRIFKFRGEGKAWDWEVSSENGNYDYLMYADVDYDHPDVVAETKKWGIWYANELSLDGFRIDAAKHIKFSFLRDWVQAVRQATGKEMFTVAEYWQNNAGKLENYLNKTSFNQSVFDVPLHFNLQAASSQGGGYDMRRLLDGTVVSRHPEKAVTFVENHDTQPGQSLESTVQTWFKPLAYAFILTRESGYPQVFYGDMYGTKGTSPKEIPSLKDNIEPILKARKEYAYGPQHDYIDHPDVIGWTREGDSSAAKSGLAALITDGPGGSKRMYAGLKNAGETWYDITGNRSDTVKIGSDGWGEFHVNDGSVSIYVQK

SEQ ID NO: 424 - protein, 478 aa, Aspergillus oryzae
  strain ATCC 42149 / RIB 40
ATPADWRSQSIYFLLTDRFARTDGSTTATCNTADQKYCGGTWQGIIDKLDYIQGMGFTAIWITPVTAQLPQTTAYGDAYHGYWQQDIYSLNENYGTADDLKALSSALHERGMYLMVDVVANHMGYDGAGSSVDYSVFKPFSSQDYFHPFCFIQNYEDQTQVEDCWLGDNTVSLPDLDTTKDVVKNEWYDWVGSLVSNYSIDGLRIDTVKHVQKDFWPGYNKAAGVYCIGEVLDGDPAYTCPYQNVMDGVLNYPIYYPLLNAFKSTSGSMDDLYNMINTVKSDCPDSTLLGTFVENHDNPRFASYTNDIALAKNVAAFIILNDGIPIIYAGQEQHYAGGNDPANREATWLSGYPTDSELYKLIASANAIRNYAISKDTGFVTYKNWPIYKDDTTIAMRKGTDGSQIVTILSNKGASGDSYTLSLSGAGYTAGQQLTEVIGCTTVTVGSDGNVPVPMAGGLPRVLYPTEKLAGSKICSSS

SEQ ID NO: 425 - protein, 1025 aa, Kluyveromyces lactis
MSCLIPENLRNPKKVHENRLPTRAYYYDQDIFESLNGPWAFALFDAPLDAPDAKNLDWETAKKWSTISVPSHWELQEDWKYGKPIYTNVQYPIPIDIPNPPTVNPTGVYARTFELDSKSIESFEHRLRFEGVDNCYELYVNGQYVGFNKGSRNGAEFDIQKYVSEGENLVVVKVFKWSDSTYIEDQDQWWLSGIYRDVSLLKLPKKAHIEDVRVTTTFVDSQYQDAELSVKVDVQGSSYDHINFTLYEPEDGSKVYDASSLLNEENGNTTFSTKEFISFSTKKNEETAFKINVKAPEHWTAENPTLYKYQLDLIGSDGSVIQSIKHHVGFRQVELKDGNITVNGKDILFRGVNRHDHHPRFGRAVPLDFVVRDLILMKKFNINAVRNSHYPNHPKVYDLFDKLGFWVIDEADLETHGVQEPFNRHTNLEAEYPDTKNKLYDVNAHYLSDNPEYEVAYLDRASQLVLRDVNHPSIIIWSLGNEACYGRNHKAMYKLIKQLDPTRLVHYEGDLNALSADIFSFMYPTFEIMERWRKNHTDENGKFEKPLILCEYGHAMGNGPGSLKEYQELFYKEKFYQGGFIWEWANHGIEFEDVSTADGKLHKAYAYGGDFKEEVHDGVFIMDGLCNSEHNPTPGLVEYKKVIEPVHIKIAHGSVTITNKHDFITTDHLLFIDKDTGKTIDVPSLKPEESVTIPSDTTYVVAVLKDDAGVLKAGHEIAWGQAELPLKVPDFVTETAEKAAKINDGKRYVSVESSGLHFILDKLLGKIESLKVKGKEISSKFEGSSITFWRPPTNNDEPRDFKNWKKYNIDLMKQNIHGVSVEKGSNGSLAVVTVNSRISPVVFYYGFETVQKYTIFANKINLNTSMKLTGEYQPPDFPRVGYEFWLGDSYESFEWLGRGPGESYPDKKESQRFGLYDSKDVEEFVYDYPQENGNHTDTHFLNIKFEGAGKLSIFQKEKPFNFKISDEYGVDEAAHACDVKRYGRHYLRLDHAIHGVGSEACGPAVLDQYRLKAQDFNFEFDLAFE

SEQ ID NO: 426 - protein, 269 aa, Thermomyces lanuginosus [sequence omitted]

SEQ ID NO: 427 - protein, 441 aa, Candida antarctica
APAAETLDRRAALPNPYDDPFYTTPSNIGTFAKGQVIQSRKVPTDIGNANNAASFQLQYRTTNTQNEAVADVATVWIPAKPASPPKIFSYQVYEDATALDCAPSYSYLTGLDQPNKVTAVLDTPIIIGWALQQGYYVVSSDHEGFKAAFIAGYEEGMAILDGIRALKNYQNLPSDSKVALEGYSGGAHATVWATSLAESYAPELNIVGASHGGTPVSAKDTFTFLNGGPFAGFALAGVSGLSLAHPDMESFIEARLNAKGQRTLKQIRGRGFCLPQVVLTYPFLNVFSLVNDTNLLNEAPIASILKQETVVQAEASYTVSVPKFPRFIWHAIPDEIVPYQPAATYVKEQCAKGANINFSPYPIAEHLTAEIFGLVPSLWFIKQAFDGTTPKVICGTPIPAIAGITTPSADQVLGSDLANQLRSLDGKQSAFGKPFGPITPP

SEQ ID NO: 428 - protein, 269 aa, Rhizomucor miehei
SIDGGIRAATSQEINELTYYTTLSANSYCRTVIPGATWDCIHCDATEDLKIIKTWSTLIYDTNAMVARGDSEKTIYIVFRGSSSIRNWIADLTFVPVSYPPVSGTKVHKGFLDSYGEVQNELVATVLDQFKQYPSYKVAVTGHSLGGATALLCALDLYQREEGLSSSNLFLYTQGQPRVGDPAFANYVVSTGIPYRRTVNERDIVPHLPPAAFGFLHAGEEYWITDNSPETVQVCTSDLETSDCSNSIVPFTSVLDHLSYFGINTGLCT

SEQ ID NO: 429 - protein, 483 aa, Bacillus licheniformis
ANLKGTLMQYFEWYMPNDGQHWKRLQNDSAYLAEHGITAVWIPPAYKGTSQADVGYGAYDLYDLGEFHQKGTVRTKYGTKGELQSAIKSLHSRDINVYGDVVINHKGGADATEDVTAVEVDPADRNRVISGEHRIKAWTHFHFPGRGSTYSDFKWHWYHFDGTDWDESRKLNRIYKFQGKAWDWEVSNENGNYDYLMYADIDYDHPDVAAEIKRWGTWYANELQLDGFRLDAVKHIKFSFLRDWVNHVREKTGKEMFTVAEYWQNDLGALENYLNKTNFNHSVFDVPLHYQFHAASTQGGGYDMRKLLNGTVVSKHPLKAVTFVDNHDTQPGQSLESTVQTWFKPLAYAFILTRESGYPQVFYGDMYGTKGDSQREIPALKHKIEPILKARKQYAYGAQHDYFDHHDIVGWTREGDSSVANSGLAALITDGPGGAKRMYVGRQNAGETWHDITGNRSEPVVINSEGWGEFHVNGGSVSIYVQR

SEQ ID NO: 430 - protein, 65 aa, Unknown
  Description of Unknown: polypeptide
DMKKKMDDDMGTMENMEEMKKKMMKDMEMMSQRMEEMAMAYDKMEKTKTRMQQEMDDMMMDMDHQ

SEQ ID NO: 431 - protein, 65 aa, Unknown
  Description of Unknown: polypeptide
DHKKKHDDDHGTHENHEEHKKKHHKDHEHHSQRHEEHAHAYDKHEKTKTRHQQEHDDHHHDHDHQ

SEQ ID NO: 432 - protein, 65 aa, Unknown
  Description of Unknown: polypeptide
DKKKKKDDDKGTKENKEEKKKKKKKDKEKKSQRKEEKAKAYDKKEKTKTRKQQEKDDKKKDKDHQ

SEQ ID NO: 433 - protein, 65 aa, Unknown
  Description of Unknown: polypeptide
DRKKKRDDDRGTRENREERKKKRRKDRERRSQRREERARAYDKREKTKTRRQQERDDRRRDRDHQ

SEQ ID NO: 434 - protein, 65 aa, Unknown
  Description of Unknown: polypeptide
DQKKKQDDDQGTQENQEEQKKKQQKDQEQQSQRQEEQAQAYDKQEKTKTRQQQEQDDQQQDQDHQ

SEQ ID NO: 435 - protein, 65 aa, Unknown
  Description of Unknown: polypeptide
DLRRRLDDDLGTLENLEELRRRLLRDLELLSRRLEERALAYDRLERTRRRLQQELDDLLLDLRRR

SEQ ID NO: 436 - protein, 65 aa, Unknown
  Description of Unknown: polypeptide
DMKKKVDDDLTTIEIFEEMKKKLFKDVEVLTFKLEEKHFTWDKIEKTKTKLHWELDDLLVDLDHH

SEQ ID NO: 437 - protein, 65 aa, Unknown
  Description of Unknown: polypeptide
MLKKKVKKKLTTLTIFHHLKKKLFKKVHVLTFKLHHLIFTWKKIKKTKTKLTTHLKKLWVKLKHM

SEQ ID NO: 438 - protein, 65 aa, Unknown
  Description of Unknown: polypeptide
DIKKKIDDDLGTIENLEEIKKKLLKDIEILSQRLEEIALAYDKLEKTKTRLQQELDDLLIDLDHQ

SEQ ID NO: 439 - protein, 65 aa, Unknown
  Description of Unknown: polypeptide
DVKKKVDDDLGTVENLEEVKKKLLKDVEVLSQRLEEVALAYDKLEKTKTRLQQELDDLLVDLDHQ

SEQ ID NO: 440 - protein, 65 aa, Unknown
  Description of Unknown: polypeptide
DFKKKFDDDLGTFENLEEFKKKLLKDFEFLSQRLEEFALAYDKLEKTKTRLQQELDDLLFDLDHQ

SEQ ID NO: 441 - protein, 65 aa, Unknown
  Description of Unknown: polypeptide
DWKKKWDDDLGTWENLEEWKKKLLKDWEWLSQRLEEWALAYDKLEKTKTRLQQELDDLLWDLDHQ

SEQ ID NO: 442 - protein, 65 aa, Unknown
  Description of Unknown: polypeptide
DTKKKTDDDLGTTENLEETKKKLLKDTETLSQRLEETALAYDKLEKTKTRLQQELDDLLTDLDHQ

SEQ ID NO: 443 - protein, 65 aa, Unknown
  Description of Unknown: polypeptide
DMKKKMDDDLGTMENLEEMKKKLLKDMEMLSQRLEEMALAYDKLEKTKTRLQQELDDLLMDLDHQ

SEQ ID NO: 444 - protein, 65 aa, Unknown
  Description of Unknown: polypeptide
DHKKKHDDDLGTHENLEEHKKKLLKDHEVLSQRLEEHALAYDKLEKTKTRLQQELDDLLHDLDHQ

SEQ ID NO: 445 - protein, 65 aa, Unknown
  Description of Unknown: polypeptide
DQKKKQDDDLGTQENLEEQKKKLLKDQEQLSQRLEEQALAYDKLEKTKTRLQQELDDLLQDLDHQ

SEQ ID NO: 446 - protein, 65 aa, Unknown
  Description of Unknown: polypeptide
DLRRRLDDDLGTLENLEELRRRLLRDLELLSQRLEERALAYDRLERTRTRLQQELDDLLLDLDRQ

SEQ ID NO: 447 - protein, 65 aa, Unknown
  Description of Unknown: polypeptide
DKKKKKDDDLGTKENLEEKKKKLLKDKEKLSQKLEEKALAYDKLEKTKTKLQQELDDLLKDLDKQ

SEQ ID NO: 448 - protein, 65 aa, Unknown
  Description of Unknown: polypeptide
DRRRRRDDDLGTRENLEERRRRLLRDRERLSQRLEERALAYDRLERTRTRLQQELDDLLRDLDRQ

SEQ ID NO: 449 - protein, 65 aa, Unknown
  Description of Unknown: polypeptide
DIKKKIDDDIGTIENIEEIKKKIIKDIEIISQRIEEIAIAYDKIEKTKTRIQQEIDDIIIDIDHQ

SEQ ID NO: 450 - protein, 65 aa, Unknown
  Description of Unknown: polypeptide
DVKKKVDDDVGTVENVEEVKKKVVKDVEVVSQRVEEVAVAYDKVEKTKTRVQQEVDDVVVDVDHQ

SEQ ID NO: 451 - protein, 65 aa, Unknown
  Description of Unknown: polypeptide
DFKKKFDDDFGTFENFEEFKKKFFKDFEFFSQRFEEFAFAYDKFEKTKTRFQQEFDDFFFDFDHQ

SEQ ID NO: 452 - protein, 65 aa, Unknown
  Description of Unknown: polypeptide
DWKKKWDDDWGTWENWEEWKKKWWKDWEWWSQRWEEWAWAYDKWEKTKTRWQQEWDDWWWDWDHQ

SEQ ID NO: 453 - protein, 65 aa, Unknown
  Description of Unknown: polypeptide
DTKKKTDDDTGTTENTEETKKKTTKDTETTSQRTEETATAYDKTEKTKTRTQQETDDTTTDTDHQ

SEQ ID NO: 454 - protein, 60 aa, Unknown
  Description of Unknown: polypeptide
LRKRRLLRKKKLLKKRRLLKRKRLLKRRKLLKRKKLLRRRKLLRRKRLLRKRKLLRKKRL

SEQ ID NO: 455 - protein, 60 aa, Unknown
  Description of Unknown: polypeptide
LRRLKRLLKRRLRLLRLLKLLLLKKLKRKLLLKLKLKKLLRRKKLRLKKKRLRKLLRKLR

SEQ ID NO: 456 - protein, 60 aa, Unknown
  Description of Unknown: polypeptide
LRLLKLKRLLLLKLKLRKLLRLLRLKLRKLKLLRLRLLLRKLLRRLLKLRLRLRKLLKLL

SEQ ID NO: 457 - protein, 60 aa, Unknown
  Description of Unknown: polypeptide
LEDEELLEDDDLLDDEELLDEDELLDEEDLLDEDDLLEEEDLLEEDELLEDEDLLEDDEL

SEQ ID NO: 458 - protein, 60 aa, Unknown
  Description of Unknown: polypeptide
LEELDELLDEELELLELLDLLLLDDLDEDLLLDLDLDDLLEEDDLELDDDELEDLLEDLE

SEQ ID NO: 459 - protein, 60 aa, Unknown
  Description of Unknown: polypeptide
LELLDLDELLLLDLDLEDLLELLELDLEDLDLLELELLLEDLLEELLDLELELEDLLDLL

SEQ ID NO: 460 - protein, 60 aa, Unknown
  Description of Unknown: polypeptide
LDRDDLLDKKRLLRREELLREKDLLREERLLREKRLLDDERLLDDKELLEREKLLERKDL

SEQ ID NO: 461 - protein, 60 aa, Unknown
  Description of Unknown: polypeptide
LEELRDLLREDLELLDLLRLLLLRKLRDKLLLKLRLRKLLDDRRLDLRRRELERLLEKLD

SEQ ID NO: 462 - protein, 60 aa, Unknown
  Description of Unknown: polypeptide
LELLKLRDLLLLRLRLDKLLDLLDLKLERLKLLELDLLLEKLLDELLRLDLELDRLLRLL

SEQ ID NO: 463 - protein, 60 aa, Unknown
  Description of Unknown: polypeptide
KRKLRRLLKLRRKRLKKLKRRLKRRRKKRLRLLKKRKLLKRLKLLRKLLRRRRLLRKKLK

SEQ ID NO: 464 - protein, 60 aa, Unknown
  Description of Unknown: polypeptide
KLKKRRLLKRKRLKLRRRLLLLLRKRRLRKLKLLLRLRLKRRRKKLRKLLLKKLKRLRLL

SEQ ID NO: 465 - protein, 60 aa, Unknown
  Description of Unknown: polypeptide
LLLLRKLRLLKLLRLLRKLRRRKLLRRRLLRKLLLKLLKLKLKLRKLRLLKKLLKLRLKK

SEQ ID NO: 466 - protein, 60 aa, Unknown
  Description of Unknown: polypeptide
DEDLEELLDLEEDELDDLDEELDEEEDDELELLDDEDLLDELDLLEDLLEEEELLEDDLD

SEQ ID NO: 467 - protein, 60 aa, Unknown
  Description of Unknown: polypeptide
DLDDEELLDEDELDLEEELLLLLEDEELEDLDLLLELELDEEEDDLEDLLLDDLDELELL

SEQ ID NO: 468 - protein, 60 aa, Unknown
  Description of Unknown: polypeptide
LLLLEDLELLDLLELLEDLEEEDLLEEELLEDLLLDLLDLDLDLEDLELLDDLLDLELDD

SEQ ID NO: 469 - protein, 60 aa, Unknown
  Description of Unknown: polypeptide
KDRLDDLLKLDERDLRRLREELREDERKDLELLKRDRLLKDLRLLDKLLEDDELLDRRLK

SEQ ID NO: 470 - protein, 60 aa, Unknown
  Description of Unknown: polypeptide
RLRREDLLKDKDLRLDDELLLLLDRDELEKLKLLLDLDLRDDEKRLEKLLLKRLRELDLL

SEQ ID NO: 471 - protein, 60 aa, Unknown
  Description of Unknown: polypeptide
LLLLERLDLLRLLDLLEKLEDDRLLDDDLLDKLLLKLLRLKLRLDKLDLLRRLLRLDLKR

SEQ ID NO: 472 - protein, 60 aa, Unknown
  Description of Unknown: polypeptide
LKKKKKRKLRKRLLLRKKKLLKRRRRLKRRLKKRRRLLLLLLRLRRKRKLLRRKKKRRKR

SEQ ID NO: 473 - protein, 60 aa, Unknown
  Description of Unknown: polypeptide
KKRKRKRRKKKLLLRKLKKLLRLRLKRLLLKKLKKKRKKLLLLKLKLRLLKLLLKRLKLR

SEQ ID NO: 474 - protein, 60 aa, Unknown
  Description of Unknown: polypeptide
RKKRLRKKLRLLLKRLLLKLLLLLLLLLLKLLRLKLLLKRRKKLLRRLLKRLRLLRRRRK

SEQ ID NO: 475 - protein, 60 aa, Unknown
  Description of Unknown: polypeptide
LDDDDDEDLEDELLLEDDDLLDEEEELDEELDDEEELLLLLLELEEDEDLLEEDDDEEDE

SEQ ID NO: 476 - protein, 60 aa, Unknown
  Description of Unknown: polypeptide
DDEDEDEEDDDLLLEDLDDLLELELDELLLDDLDDDEDDLLLLDLDLELLDLLLDELDLE

SEQ ID NO: 477 - protein, 60 aa, Unknown
  Description of Unknown: polypeptide
EDDELEDDLELLLDELLLDLLLLLLLLLLDLLELDLLLDEEDDLLEELLDELELLEEEED

SEQ ID NO: 478 - protein, 60 aa, Unknown
  Description of Unknown: polypeptide
LRKRKRDRLERELLLDRKRLLREDEELREELKKEEDLLLLLLDLDDKDKLLEERRKDDRE

SEQ ID NO: 479 - protein, 60 aa, Unknown
  Description of Unknown: polypeptide
KKDREKEERRKLLLDRLKKLLELDLRELLLRRLRKRDKRLLLLRLRLDLLKLLLRELRLE

SEQ ID NO: 480 - protein, 60 aa, Unknown
  Description of Unknown: polypeptide
ERRDLDKRLELLLKELLLKLLLLLLLLLLKLLELRLLLKEDKKLLEDLLKDLDLLDDDDR

SEQ ID NO: 481 - protein, 252 aa, Agaricus bisporus
  var. bisporus
  strain H97 / ATCC MYA-4626 / FGSC 10389
MATTQHYLWASGHFILLLASFRYYLGWVTFKAVPTWWFKASFTGALISYAIVCFKSFGTPQPNLAYVKRALTDENVQYFLLALYWFSSRTPIAITLLPYMIFSLFHALTFTRTTLFPQFLPPGPPASAGGPPGPHPLAKRLQAWVKANYDTAMKLVAYTELVVFVRVFLGAITFQNAIIAPLLYVHFLRQRYYQSAFTRNAIATTTSLIDKYITKANNPIVSQVYDKIKMLVQRWGGSGIIEPQPTPANARR

SEQ ID NO: 482 - protein, 240 aa, Saccharomyces cerevisiae
  strain ATCC 204508 / S288c
MWSSLFGWTSSNAKNKESPTKAIVRLREHINLLSKKQSHLRTQITNQENEARIFLTKGNKVMAKNALKKKKTIEQLLSKVEGTMESMEQQLFSIESANLNLETMRAMQEGAKAMKTIHSGLDIDKVDETMDEIREQVELGDEISDAISRPLITGANEVDEDELDEELDMLAQENANQETSKIVNNNVNAAPISENKVSLPSVPSNKIKQSENSVKDGEEEEDEEDEDEKALRELQAEMGL

SEQ ID NO: 483 - protein, 234 aa, Bos taurus
MAWSPLLLTLVALCTGSWAQAVLTQPSSVSGSLGQRVSITCSGSSSNIGSYNVGWYQQVPGSGLRTIIYGSSSRPSGVPDRFSGSKSGNTATLTISSLQAEDEADYFCAAYDSSSGAVFGSGTTLTVLGQPKSPPSVTLFPPSTEELNGNKATLVCLISDFYPGSVTVVWKADGSTITRNVETTRASKQSNSKYAASSYLSLTSSDWKSKGSYSCEVTHEGSTVTKTVKPSECS

SEQ ID NO: 484 - protein, 233 aa, Saccharomyces cerevisiae
  strain ATCC 204508 / S288c
MSEKFPPLEDQNIDFTPNDKKDDDTDFLKREAEILGDEFKTEQDDILETEASPAKDDDEIRDFEEQFPDINSANGAVSSDQNGSATVSSGNDNGEADDDFSTFEGANQSTESVKEDRSEVVDQWKQRRAVEIHEKDLKDEELKKELQDEAIKHIDDFYDSYNKKKEQQLEDAAKEAEAFLKKRDEFFGQDNTTWDRALQLINQDDADIIGGRDRSKLKEILLRLKGNAKAPGA

SEQ ID NO: 485 - protein, 228 aa, Cicer arietinum
MTKTGYINAAFRSSRNNEAYLFINDKYVLLDYAPGTSNDKVLYGPSFVRDGYKSLAKTIFGTYGIDCSFDTEYNEAFIFYENFCARIDYAPHSDKDKIISGPKKIADMFPFFKGTVFENGIDAAFRSTKGKEVYLFKGDKYARIDYLTNRLVQNIKSISDGFPCLRGTIFEAGMDSAFASHKTNEAYLFKGEYYARINFTPGSTNDIMGGVKKTLDYWPSLRGIIPLE

SEQ ID NO: 486 - protein, 227 aa, Ovis aries
MAYPMQLGFQDATSPIMEELLHFHDHTLMIVFLISSLVLYIISLMLTTKLTHTSTMDAQEVETIWTILPAIILIMIALPSLRILYMMDEINNPSLTVKTMGHQWYWSYEYTDYEDLSFDSYMIPTSELKPGELRLLEVDNRVVLPMEMTVRMLISSEDVLPSWAVPSLGLKTDAIPGRLNQTTLMSTRPGLFYGQCSEICGSNHSFMPIVLELVPLKYFEKWSASML

SEQ ID NO: 487 - protein, 222 aa, Arthrospira platensis NIES-39
MFSKEITESKTYKWFDERLDVQAISDDITSKYVPPHVNIFYCLGGITLVCFLIQFATGFAMTFYYKPTVAEAFTSVQYIMTEVSFGWLIRSIHRWSASMMVLMMILHVFRVYLTGGFKKPRELTWVTGVVMAVITVSFGVTGYSLPWDQIGYWAVKIVSGVPEAIPIVGSTIVELMRGGAAVGQPTLSRFYSLHTFVLPWLIAVFMLLHFLMIRKQGISGPL

SEQ ID NO: 488 - protein, 213 aa, Agaricus bisporus
  var. bisporus
  strain H97 / ATCC MYA-4626 / FGSC 10389
MTDTIPTFKLVLVGDGGTGKTTFVKRHLTGEFEKKYIATLGVEVHPLHFTTNFGNICFNVWDTAGQEKFGGLRDGYYIQGQCGIIMFDVTSRITYKNVPNWHRDLERVCENIPIVLCGNKIDVKERKVKTGAVTFHRKKNLQYFEISAKSNYNFEKPFLWLAQKLVGNPRLEFVAAPALAPAEVAIDANLMKQYEQELKQAEAVPLPEEEDDL

SEQ ID NO: 489 - protein, 213 aa, Saccharomyces cerevisiae
  strain ATCC 204508 / S288c
MSVEEVSKKFEENVSVDDTTATPKTVLSDSAHFDVKHPLNTKWTLWYTKPAVDKSESWSDLLRPVTSFQTVEEFWAIIQNIPEPHELPLKSDYHVFRNDVRPEWEDEANAKGGKWSFQLRGKGADIDELWLRTLLAVIGETIDEDDSQINGVVLSIRKGGNKFALWTKSEDKEPLLRIGGKFKQVLKLTDDGHLEFFPHSSANGRHPQPSITL

SEQ ID NO: 490 - protein, 206 aa, Arthrospira platensis C1
MNLAEGVQVVSFGLLTIMMIGSALGVVLLKNIVYSAFLLGGVFMSMAGLYLLLNADFVAAAQVLIYVGSVNVLILFGIMLVNKQQDFRVLPNAGLRQIATAVVCVGLFALLSTMVLSTPWSVTTTVVTIESSAIAIGEHFFTDFLLPFELASVFLLMAMVGAIVLARRDFLPDASNAPTTTTPLLMLTERPRELVSVSGSSEDSSE

SEQ ID NO: 491 - protein, 206 aa, Vitis vinifera
MVSLKLQKRLAASVLKCGRGKVWLDPNEVNEISMANSRQNVRKLVKDGFIIRKPTKIHSRSRARRMKEAKRKGRHSGYGKRKGTREARLPTKILWMRRMRVLRRLLRKYRESKKIDKHMYHDMYMKVKGNVFKNKRVLMESIHKSKAEKAREKTLSDQFEAKRAKNKASRERKLARREERLAQGPVERAPPASAPQPAEGTKKAKK

SEQ ID NO: 492 - protein, 206 aa, Vitis vinifera
MFQWAYMYVSELWRKKQSDVMRFLQRVRCWEYRQHPSIVRVTRPTRPDKARRLGYKAKQGYVIYRVRVRRGGRKRPVPKGIVYGKPTNQGVTQLKFQRSKRSVAEERAGRKLGGLKVLNSYWINEDSTYKYYEIILVDAAHNAIRNDPRINWICKPVHKHRELRGLTSAGKKYRGLRGKGHRHHKARPSRRATWKRNNTLSLRRYR

SEQ ID NO: 493 - protein, 201 aa, Bos taurus
MPRSQHRCPDARLSAQERTMGDEEKRHRAITARRQHLKSVMLQIAATELEKEEGRREAEKQNYLSEHCPPLHLPGSMSEVQELCRQLHAKIDAAEEEKYDMEIRVQKSTKELEDMNQKLFDLRGKFKRPPLRRVRMSADAMLKALLGSKHKVCMDLRANLKQVKKEDTEKERDLRDVGDWRKNIEEKSGMEGRKKMFETES

SEQ ID NO: 494 - protein, 199 aa, Ovis aries
MDGQKKNWKDKVVDLLYWRDIKKTGVVFGASLFLLLSLTVFSIVSVTAYIALALLSVTISFRIYKGVIQAIQKSEEGHPFRAYLESEVAISEELVQKYSNSALGHVNCTIKELRRLFLVDDLVDSLKFAVLMWVFTYVGALFNGLTLLILALISLFSVPVIYERHQAQIDHYLGLANKNVKDAVAKIQAKIPGLKRKAE

SEQ ID NO: 495 - protein, 196 aa, Vitis vinifera
MEKNVESDPNPPLASGPEFPPATTPADVKNDVALEKSVVPPPEVKADESKALAVVEKTPDSAAKKTSGGSFERDVALANLEKEKQLSFIRAWEESEKSKVDNKAQKKLSDVCAWENSKKAAVEANLKKIEEELEKKKAEYAEKMKNKVALIHKQAEEKKAMIEARRGEEFLKAEEMAAKFRATGQTPKKVLGCFGG

SEQ ID NO: 496 - protein, 194 aa, Saccharomyces cerevisiae
  strain ATCC 204508 / S288c
MVTSNVVLVSGEGERFTVDKKIAERSLLLKNYLNDMHDSNLQNNSDSESDSDSETNHKSKDNNNGDDDDEDDDEIVMPVPNVRSSVLQKVIEWAEHHRDSNFPDEDDDDSRKSAPVDSWDREFLKVDQEMLYEIILAANYLNIKPLLDAGCKVVAEMIRGRSPEEIRRTFNIVNDFTPEEEAAIRRENEWAEDR

SEQ ID NO: 497 - protein, 187 aa, Saccharomyces cerevisiae
  strain ATCC 204508 / S288c
MSIASYAQELKLALHQYPNFPSEGILFEDFLPIFRNPGLFQKLIDAFKLHLEEAFPEVKIDYIVGLESRGFLFGPTLALALGVGFVPVRKAGKLPGECFKATYEKEYGSDLFEIQKNAIPAGSNVIIVDDIIATGGSAAAAGELVEQLEANLLEYNFVMELDFLKGRSKLNAPVFTLLNAQKEALKK

SEQ ID NO: 498 - protein, 182 aa, Arthrospira platensis C1
MSSIVGQLVEPYATALMSVAKSNNVTEDFGNQMRSLIDLLKNSPELQDFLGSPVVKGEDKKAVITRMLGEEVHPYLRNFLMLLVDRGRILFLAEIAQEYLALLRKLNQTVLAEVTSAVELNDGQKHMVVEQIKARTGAQNVELDLKIDREILGGVIIKAGSQLFDASIRGQLRRIGMSLTVG

SEQ ID NO: 499 - protein, 179 aa, Zea mays
MRPSTAGALAAAALVATLLLSVGATPETTCAAAAARDRRVDYGFCVSRLSHHHDSPDADTWGLAKVAADVGVATAGDAVYDIKALLAKPPPDAQARAALEQCQRLYDAAEMAFAEAYDGINRRDYAAGKGKAAEAAALARRCDDAFARAAVRPPPQVARWGEESSKIAVVCTAITDLIG

SEQ ID NO: 500 - protein, 171 aa, Oryza sativa
  subsp. japonica
MAPKIPIFFFLLALAAGVQGETGGVGGGGGNVEYNCVYTVFVRTGSAWKGGTDSTIGVEFAGADGRGVRIADLERWGGLMGAGHDYYERGNLDVFSGRGPCLPAAPCWMNLTSDGAGAHHGWYCNYVEVTATGPHRGCAQRRFDVEQWLATDASPYRLTAVRDQCRGHAAA

SEQ ID NO: 501 - protein, 167 aa, Agaricus bisporus
  var. bisporus
  strain H97 / ATCC MYA-4626 / FGSC 10389
MLKTFSSFGFAALLSQGFFLGANGEVTKVFAPGMYKIVNPESLTWVRGLPGPGQHGPWMSPITMAWDMSSIYQTWEVSAFEEGYKIQNYGSKMFAFSRSHEVDNLVLGFSDGFTKWYIEPTGGSEYRIHYPNRDLVWTVNYDDNFPDTVSLKPFEGGEDQIFRFDKL

SEQ ID NO: 502 - protein, 167 aa, Glycine max
MASQSNTKSVHDFTVKDARGNNVNLADYKGKVLLIVNVASQCGLTNSNYTELNQLYEKYKGKGLEILAFPCNQFGAQEPGTNEEIVEFACTRFKAEFPIFDKVDVNGDNAAPLYKFLKSSKGGLFGDSIKWNFSKFLVDKDGNVVDRYAPTTSPLSIEKDIKKLLDA

SEQ ID NO: 503 - protein, 161 aa, Zea mays
MVLKTELCRFSGQKIYPGKGIRFIRADSQVFLFANSKCKRYFHNRLKPAKLTWTAMYRKQHKKDIHAEAVKKRRRATKKPYSRSIVGASLEVIQKKRAEKPEVRDAAREAALREIKERIKKTKDEKKAKKAEVTKSQKAQTKGAVQKGSKGPKLGGGGGKR

SEQ ID NO: 504 - protein, 159 aa, Agaricus bisporus
  var. bisporus
  strain H97 / ATCC MYA-4626 / FGSC 10389
MTITHTAMAQSQWLTNGTFLIASRTNGNQALAVQDGRLTPGVTIVVTNTQSTQNGAAIWSYHFDNMLINKRSGLALSVRRINVTSGVSPGTKVVQEQINTNPTGMVQEWNYFAATGQIHPSFAGDSCITAGSQLNRGVATIERCVAGRVEQSWTVVALP

SEQ ID NO: 505 - protein, 157 aa, Bos taurus
MKNCLLFWGVLAIFVMAVLVTAQDENERIVVDNKCKCARITSRIIPSAEDPSQDIVERNVRIIVPLNSRENISDPTSPMRTKFVYHLSDLCKKCDTTEVELEDQVVTASQSNICDSDAETCYTYDRNKCYTNRVKLSYRGQTKMVETALTPDSCYPD

SEQ ID NO: 506 - protein, 268 aa, Agaricus bisporus
  var. bisporus
  strain H97 / ATCC MYA-4626 / FGSC 10389
MADTWKDGILLKIVNIIVYLLFLGSNIYTVAAPQGIYYHGKETYITPAPWAFLIWSLIHLLLLGTVIYQFFPQGKRVIIDGISWRFPLLAVLNAIYVNLWASKHYIIAFIFALFVSSAVTHIYYVVKKYHIAESISDELFIHIPFSLYHGWTTVLVVLTAFEAFGVNKFHHHAGIWTKVFVFLALFFLEGTAATYAFSTPEGDLPASIAIAWSLWAIFAQQRKPEFIHWSALAFAILALFWVLKAAWGVYRGHGRIALSDEERAPLVG

SEQ ID NO: 507 - protein, 246 aa, Agaricus bisporus
  var. bisporus
  strain H97 / ATCC MYA-4626 / FGSC 10389
MISFYDLTAKPPFKTVSVNSWKIRYALNFKNLPYKTLYFEFPDMAKEFSKVGIPPSSVSADGPSYTVPSLIDDSTNTRISESFTIALYLDKQYPDAPKLFPAGTEALQAAFHEEFYKVMSPTFPFFFPKAGNVLNKPSDDYFAVTRAKMFGMSMADFEPKGEARVEAWKKVKDAFDTLESWMSKTSGPFFMGETVSFADFVIGGLLNEFSMCMGENSPEWQDVLKWNNGRWATLKKKLEVYANTDQ

SEQ ID NO: 508 - protein, 236 aa, Vitis vinifera
MGTSTFSQYTVVHDVSVAKIDPVAPLEKVCLLGCGVPTGLGAVWNTAKVESGSIVAVFGLGTVGLAVAEGAKSAGASRIIGVDIDSKKFDVAKNFGVTEFVNPKDHEKPIQQVLVDLTDGGVDYSFECIGNVSVMRAALECCHKGWGTSVIVGVAASGQEISTRPFQLVTGRVWKGTAFGGFKSRSQVPWLVEKYMKKEIKVDEYITHNLTLGEINEAFDLMHEGGCLRCVLAMHV

SEQ ID NO: 509 - protein, 229 aa, Gadus morhua
MSDTEDVDQVEDEKPKFKPSAPKIPDGEKVDFDDIQKKRQNKDLSELQGLIDAHFEGRKKEEEELIALKERIEKRRAERAEQQRIRSEKDKERQARREEERLKREEADAKKKMEEDAKKKSALSNMGSNYSSHLQKADQKRGGGKKETEREKKKKILAARRKGLNIDHLNEDKLKDKINELHEWMSTLESEKFDHMERLNRQKYEVTTLRKRVEELSKFSKKGKTVRRK

SEQ ID NO: 510 - protein, 229 aa, Meleagris gallopavo
MVPIAEKMAEKQEEPSNTQNGEPDNAEEGEGKKKKKVKREDLPPFEIVTGERLPAIFFKFQFRNVEYSSGRNKTFLCYVVETQGKESTTSRGYLEDEHAASHAEIAFFNTILPKCESSLRYNITWYVSSSPCVTCADRISETLRKNKNLRLTIMVGRLFMWEEPEMQAALKKMKSAGCKLRIMKPQDFEYVWQNFVEQEEGEEAKAFVPWEDIQENFQYYEEKLAEILQ

SEQ ID NO: 511 - protein, 219 aa, Arthrospira platensis C1
MVLFGFGKKKSLPKPEEALPGRDRVMSVPDRHYINGNPLKPPFPEGMEQAVFGLGCFWGAERKFWQQQGVFSTAVGYAGGYTKNPTYEEVCSGMTGHTEVVLVVFDPKVISYTDLLKLFWESHNPTQGMRQGNDTGTQYRSAIYTYSDEQQRLALASRDRYQQALSAASYGEITTEIAPAQEFYYAEAYHQQYLGKNPNGYCGLGGTGVGCPAMTETSV

SEQ ID NO: 512 - protein, 184 aa, Oryza sativa
  subsp. japonica
MALEHLGRRNVAGSLLLLNLLMYVFLLGFAGWALNSSIKNAGADVGVGWGEQPWSPYYRQSAWFASRFHLATFAALAGALGVAAKASAAYHGGRSGASWRPQGLAAAASLGTAAWAATALAFGVACREIHDAAAAGPAGAARGWRMRALEGLTVTLAFTQLLYVLLLHAAVAGERCGLACAADA

SEQ ID NO: 513 - protein, 180 aa, Zea mays
MKMVIVLVVWLALSAASASAMQMPCPCAGLQGLYGAGAGLTTMMGAGGLYPYAEYLRQPQCSPLAAAPYYAGCGQTSAMYQPLRQQCCQQQMRMMDVQSVAQQLQMMMQLERAATASSSLYEPALMQQQQQLLAAQGLNPMAMMMAQNMPAMGGLYQYQYQLPSYRTNPCGVSAAIPPYY

SEQ ID NO: 514 - protein, 176 aa, Arthrospira platensis NIES-39
MAEQQRRKKNTRTKEKESEWQERVVQIRRVTKVVKGGKKLSFRAIVIVGNEKGQVGVGVGKAADVIGAVKKGVADGRKNVVEIPLTKSNSLPHPANGVGGGAQVIVRPAAPGTGVIAGGAVRTVLELAGVKNVLAKQLGSSNPLNNARATINALSGLRTLSDVAKERGIPIEQLYA

SEQ ID NO: 515 - protein, 168 aa, Saccharomyces cerevisiae
  strain ATCC 204508 / S288c
MSNLLNKFADKLHGNDHDERYEDDNDDQTRQQRHEKHQQREFRNQGSKADPYGEENQGNFPQRQQPQSNLGGNTQFGGNDFQQQTTDYTAGTGGGTYTQTYRETNTQGQLDDDEDDDFLTSGQQQKQGRTRGAQSNRYQSSNIGSGRRDLSGSGNDEYDDDSGNQGVW

SEQ ID NO: 516 - protein, 155 aa, Saccharomyces cerevisiae
  strain ATCC 204508 / S288c
MLSLRQSIRFFKPATRTLCSSRYLLQQKPVVKTAQNLAEVNGPETLIGPGAKEGTVPTDLDQETGLARLELLGKLEGIDVFDTKPLDSSRKGTMKDPIIIESYDDYRYVGCTGSPAGSHTIMWLKPTVNEVARCWECGSVYKLNPVGVPNDDHHH

SEQ ID NO: 517 - protein, 155 aa, Saccharomyces cerevisiae
  strain ATCC 204508 / S288c
MKVEIDSFSGAKIYPGRGTLFVRGDSKIFRFQNSKSASLFKQRKNPRRIAWTVLFRKHHKKGITEEVAKKRSRKTVKAQRPITGASLDLIKERRSLKPEVRKANREEKLKANKEKKKAEKAARKAEKAKSAGTQSSKFSKQQAKGAFQKVAATSR

SEQ ID NO: 518 - protein, 212 aa, Lactobacillus acidophilus
  strain 30SC
MTKGILGRKVGMTQIFTKDGVLVPVTVVEATPNVVMQVKTVESDGYEAVQLGYQDKREVLSNKPEKGHADKAKTSPKRFIREIRGVELKDYEVGSEVTVDTFKEGDVVNVTGTSRGHGYQGNIKRWGQSRGPETHGSRYHRIPGSMGSIINRVPKGKRLPGHMGVKKVTIENLVIEKVVADKNVLMIKGNVPGAKNSLIVVKTASKAVKADK

SEQ ID NO: 519 - protein, 183 aa, Zea mays
MSPWWKPLLVATAAFAALLAADATVETTCKAAAATDDRVDYGFCVSELSKHRDSPGADAWGLAKVAANLGVNNAGGAVRDAEALLAGPPPGAGEGADGAKTKAALGQCRRLYFDMELALAGAYDDIDARDYAAGKEMAVEGIALARRCDAVFAEAGMPSLLARRAEYAQQITVLCIAITDLIE

SEQ ID NO: 520 - protein, 183 aa, Gallus gallus
MSDEEKKRRAATARRQHLKSAMLQLAVTEIEKEAAAKEVEKQNYLAEHCPPLSLPGSMQELQELCKKLHAKIDSVDEERYDTEVKLQKTNKELEDLSQKLFDLRGKFKRPPLRRVRMSADAMLRALLGSKHKVNMDLRANLKQVKKEDTEKEKDLRDVGDWRKNIEEKSGMEGRKKMFEAGES

SEQ ID NO: 521 - protein, 161 aa, Arthrospira platensis
MQDAITSVINSSDVQGKYLDASAIQKLKAYFATGELRVRAATTISANAANIVKEAVAKSLLYSDITRPGGNMYTTRRYAACIRDLDYYLRYATYAMLAGDPSILDERVLNGLKETYNSLGVPIGATVQAIQAMKEVTAGLVGADAGKEMGIYFDYICSGLS

SEQ ID NO: 522 - protein, 155 aa, Cicer arietinum
MTSHDQSYRAGEAKGRTEEKTNQMIGNIEDKAQAAKEKAQQAAQTAKDKTSQTAQAAKEKTQQTAQAAKDKTQQTTQATKEKAQDTTGRAKEKGSEMGQSTKETAQSGKDNSAGFLQQTGEKAKGMAQGATDAVKQTFGMTNDDQDKDHFPTNRH

SEQ ID NO: 523 - protein, 57 aa, Arthrospira platensis C1
MTETPQPTTTPNLQEPKFGFNSYSERLNGRAAMIGFVITLAIEYFTKQGLLAWLGLS

SEQ ID NO: 524 - protein, 69 aa, Ovis aries
MPAWYSIDSRVRGTSLVVKGLKENVEYHFRVSAENQFGISKPMKSEEPVIPKTPLSKASSNHNTVNFLS

SEQ ID NO: 525 - protein, 74 aa, Saccharomyces cerevisiae
  strain ATCC 204508 / S288c
MTKNFIVTLKKNTPDVEAKKFLDSVHHAGGSIVHEFDIIKGYTIKVPDVLHLNKLKEKHNDVIENVEEDKEVHT

SEQ ID NO: 526 - protein, 76 aa, Solanum lycopersicum
MANSMRLFATMLLLAMLVMATGPMRIVEARTCESQSHRFKGPCVSEKNCASVCETEGFSGGDCRGFRRRCFCTRPC

SEQ ID NO: 527 - protein, 81 aa, Arthrospira platensis NIES-39
MSHSVKIYDTCIGCTQCVRACPLDVLEMVPWDGCKAGQIASSPRTEDCIGCKRCETACPTDFLSVRVYLGAETTRSMGLAY

SEQ ID NO: 528 - protein, 82 aa, Saccharomyces cerevisiae
  strain ATCC 204508 / S288c
MVLVQDLLHPTAASEARKHKLKTLVQGPRSYFLDVKCPGCLNITTVFSHAQTAVTCESCSTVLCTPTGGKAKLSEGTSFRRK

SEQ ID NO: 529 - protein, 87 aa, Arthrospira platensis Sp-1
MLGYISAGKMGSSPSGARFFKYEVVGMRQNDETDKTEYQIRSSGSQFVIVPYNRMNQEMRRINRMGGKIVSIEPMTTDNTVSEAEGE

SEQ ID NO: 530 - protein, 96 aa, Oryza sativa
  subsp. japonica
MMRKLAVLVLAVAMVAACGGGVVGVAGAGCNAGQLTVCTGAIAGGARPTAACCSSLRAQQGCFCQFAKDPRYGRYVNSPNARKAVSSCGIALPTCH

SEQ ID NO: 531 - protein, 96 aa, Solanum lycopersicum
MAAKNSEMKFAIFFVVLLTTTLVDMSGISKMQVMALRDIPPQETLLKMKLLPTNILGLCNEPCSSNSDCIGITLCQFCKEKTDQYGLTYRTCNLLP

SEQ ID NO: 532 - protein, 103 aa, Arthrospira platensis NIES-39
MSIAVGMIETIGFPAVVEAADSMVKAARVTLVGYEKIGSGRVTVIVRGDVSEVQASVSAGIESVKRVNGGEVSSTHIIARPHENLEYVLPIRYTDAVEQFRSY

SEQ ID NO: 533 - protein, 103 aa, Arthrospira platensis NIES-39
MVTEFQTRDLADVIRRPIVTEKATIQMELNQFTFDVDPRADKPTIKAAVELLFPVKVLSVNTQNPPRRQRRVGRFVGYKPRYKRAIVTLEDGEALRKVLFPEV

SEQ ID NO: 534 - protein, 103 aa, Arthrospira platensis NIES-39
MSIYVGNLSYEVTEDDLTAVFAEYGSVKRVKLPTDRETGRMRGFGFVEMDTEAEEQSAIDALDGAEWCGRDLRVNKAKPRENSGSFGGGGGGRRGGGGYSRRS

SEQ ID NO: 535 - protein, 108 aa, Bos taurus
MQAVLTQPSSVSGSLGQRVSITCSGSSSNVGRGNYVNWFQQIPGSAPRTLIYGATSRASGVPDRFSGSRSGNTATLTISSLQAEDEADYFCAAYDSSSNNGTVLQARG

SEQ ID NO: 536 - protein, 110 aa, Solanum lycopersicum
MEEEKHHHHHLFHHKDKAEEGPVDYEKEIKHHKHLEQIGKLGTVAAGAYALHEKHEAKKDPEHAHKHKIEEEIAAAAAVGAGGFAFHEHHEKKDAKKEEKKAEGGHHHLF

SEQ ID NO: 537 - protein, 113 aa, Saccharomyces cerevisiae
  strain ATCC 204508 / S288c
MSEIQNKAETAAQDVQQKLEETKESLQNKGQEVKEQAEASIDNLKNEATPEAEQVKKEEQNIADGVEQKKTEAANKVEETKKQASAAVSEKKETKKEGGFLKKLNRKIASIFN

SEQ ID NO: 538 - protein, 115 aa, Gallus gallus
MNETCVVKNSSKIHVFRHNSTLTHEDGQVVSMAELIHSDKDLFILKHFKDNHVGLSLSARTAEVTKEQLEEFEAQLRCHGFKLEEAFITSPKDACPAAGEETGEGSAATAEPQLG

SEQ ID NO: 539 - protein, 122 aa, Ovis aries
MATLKDQLIQNLLKEEHVPQNKITVVGVGAVGMACAISILMKDLADEIALVDVMEDKLKGEMMDLQHGSLFLRTPKIVSGKDYNVTANSRLVIITAGARQQEGESRLNLVQRNVNIFKFIIP

SEQ ID NO: 540 - protein, 127 aa, Arthrospira platensis C1
MARIAGVDLPRDKRVEIGLTYIYGIGLSRSKEILAETGVNPDTRVKDLTDADVAALRSVIQTNYQVEGDLRRLEAMSIKRLMDIGTYRGRRHRMGLPVRGQRTRTNARTRRGVRRTVAGKKKAASKK

SEQ ID NO: 541 - protein, 130 aa, Agaricus bisporus
  var. bisporus
  strain H97 / ATCC MYA-4626 / FGSC 10389
MVRISVLNDCLKSICNASRRGKRQVIVRPSSKVVVKFLSVMQRHGYIGEFEIIDDHRGGKIIVQLNGRLNKTGVISPRFNVQHNRIEQWINYLLPSRGIGIIVLTTSSGILDHEEARRKNVGGKLLGYVY

SEQ ID NO: 542 - protein, 138 aa, Agaricus bisporus
  var. bisporus
  strain H97 / ATCC MYA-4626 / FGSC 10389
MSGKGKSGKSSSGGKAGGEGKSQSRSAKAGLQFPVGRVHRLLKKGNYAQRVGAGAPVYLAAVLEYLAAEILELAGNAARDNKKQRIVPRHLQLAIRNDEELNKLLGDVVISQGGVVPHIAAELLPSKSSKGKKDGEEA

SEQ ID NO: 543 - protein, 142 aa, Agaricus bisporus
  var. bisporus
  strain H97 / ATCC MYA-4626 / FGSC 10389
MSYTITIRVYQTDPNAFFRRVEQTCWKYANGCTWDEAKGEYVLTMGGSGTSGSLRFVSDTGERFVATFGVHNWKRWCDIVTNLTDEQTALVINQEYYGVPYRDAARERQLTSYSVSDREGRKYTINYTVTDGNNLKANLIIG

SEQ ID NO: 544 - protein, 142 aa, Gadus morhua
MGTRLHQTNTMKFAALALALLLAVGSHAAAMQSDAPSQLAHIRSAVGMYLDQVKDSAARSLDHLDGTEYESYKAQLATSLDSLQASIKTAQAGAEPYTDAAVAQVMEATTEVRASIMADIETLRTGPGPKREALKKVVDGHI

SEQ ID NO: 545 - protein, 148 aa, Saccharomyces cerevisiae
  strain ATCC 204508 / S288c
MLSRAIFRNPVINRTLLRARPGAYHATRLTKNTFIQSRKYSDAHDEETFEEFTARYEKEFDEAYDLFEVQRVLNNCFSYDLVPAPAVIEKALRAARRVNDLPTAIRVFEALKYKVENEDQYKAYLDELKDVRQELGVPLKEELFPSSS

SEQ ID NO: 546 - protein, 150 aa, Saccharomyces cerevisiae
  strain ATCC 204508 / S288c
MCSAGGIRRPIQIEEFKTAISGMSDMELAQIKTEIENSINHLQRSNARLGKYIAKLEGADDRLEADDSDDLENIDSGDLALYKDSVRENEIVLNNYNERVDALEQETVYRKTGHGKSKHEVEAKDNTNKGPDVDMDNSNVDVVTPNSIFI

SEQ ID NO: 547 - protein, 152 aa, Cicer arietinum
MEGAKKAGESIKETAANVGASAKSGMEKTKAVVQEKTEKMKTRDPVEKEMATHKKDVKMTQAELDKQAAREHNAAVKQSTTEGQMGHTTGAHPMSALPGHGTGHPMGHTTEGVVGSHPIGTNRGPDGTATAHNTRVGGNPNATGYTTGGSYT

SEQ ID NO: 548 - protein, 40 aa, Ovis aries
MILGQNGISDVVKVTLTHEEEACLKKSADTLWGIQKELQF

SEQ ID NO: 549 - protein, 62 aa, Saccharomyces cerevisiae
  strain ATCC 204508 / S288c
MSAWRKAGISYAAYLNVAAQAIRSSLKTELQTASVLNRSQTDAFYTQYKNGTAASEPTPITK

SEQ ID NO: 550 - protein, 72 aa, Arthrospira platensis NIES-39
MAVEKVNSSSSLAEVIDRILDKGIVIDAWVRVSLVGIELLSVEARVVIASVETYLKYAEAVGLTAQAAVPSV

SEQ ID NO: 551 - protein, 79 aa, Zea mays
MELSRKLFTAVLLVMLLLLSAEVGPVAVAEARTCQSQSHRFRGPCLRRSNCANVCRTEGFPGGRCRGFRRRCFCTTHCH

SEQ ID NO: 552 - protein, 79 aa, Saccharomyces cerevisiae
  strain ATCC 204508 / S288c
MSNMMNKFAEKLQGNDDSHQKGKNAKSSNKERDDMNMDMGMGHDQSEGGMKMGHDQSGTKMNAGRGIANDWKTYENMKK

SEQ ID NO: 553 - protein, 89 aa, Arthrospira platensis
  str. Paraca
MADSSKSKPQDDKTPIEDKKSATKADTTPAKSSTPKDHEPVVEAKPAAKTPEPKPEPKPEPVAAKTPEPKPEPKPEPKPEPVAAKPPEP

SEQ ID NO: 554 - protein, 124 aa, Agaricus bisporus
  var. bisporus
  strain H97 / ATCC MYA-4626 / FGSC 10389
MNGGRNKKGRGHVKFMRCSNCSRCVGKDKAIKRFTVRNMVESAAVRDINEASVYPEYVIPKLYIKIAYCVSCAIHSHVVRVRSREGRRNRAPPPRIRWKDGKKVNPAVAAAEDAKAAAAGGAKA

SEQ ID NO: 555 - protein, 128 aa, Arthrospira platensis NIES-39
MQAQEIIRAIEQEEIESVKTNVQKESIPKIYVGDTVKVGVRITEGGKERIQPYQGTVIAMRNGGINETITVRRIFQGVGVERVFLLHSPRIASIKVIMRGKVRRAKLYYLRDRVGKATRVPQRFDRPL

SEQ ID NO: 556 - protein, 132 aa, Zea mays
MTFKRRNGGRNKHGRGHVKYIRCSNCAKCCPKDKAIKRFLVRNIVEQAAVRDVQEACVHDGYVLPKLYAKVHHCVSCAIHAHIVRVRSRENRRNREPPQRFRRRDDGPRPGQGPPRPGGAAPAAAAAAAPRT

SEQ ID NO: 557 - protein, 140 aa, Bos taurus
MNPLWTLLFVLSAPRGVLSQVQLRESGPSLVKPSQTLSLTCTVSGFSLSSNGVVWVRQAPGKALEWLGGICSGGSTSFNPALKSRLSITKDNSKSQVSLSVSSVTPEDTATYYCARDTEQVQMVIDSWSPLRGLPLLVAV

SEQ ID NO: 558 - protein, 153 aa, Saccharomyces cerevisiae
  strain ATCC 204508 / S288c
MSQKACYVCGKIGHLAEDCDSERLCYNCNKPGHVQTDCTMPRTVEFKQCYNCGETGHVRSECTVQRCFNCNQTGHISRECPEPKKTSRFSKVSCYKCGGPNHMAKDCMKEDGISGLKCYTCGQAGHMSRDCQNDRLCYNCNETGHISKDCPKA

SEQ ID NO: 559 - protein, 153 aa, Oryza sativa
  subsp. japonica
MQIFVKTLTGKTITLEVESSDTIDNVKAKIQDKEGIPPDQQRLIFAGKQLEDGRTLADYNIQKESTLHLVLRLRGGTMIKVKTLTGKEIEIDIEPTDTIDRIKERVEEKEGIPPVQQRLIYAGKQLADDKTAKDYNIEGGSVLHLVLALRGGY

SEQ ID NO: 560 - protein, 95 aa, Brassica oleracea
MAGIINKIGDALHIGGGNKEDEHKKEEHKKHADEHKSGEHKEGIVDKIKDKIQGGEGHSSGDHKHDGEKKKKKDKKEKKHHHDGHHSSSSDSDSD

SEQ ID NO: 561 - protein, 124 aa, Arthrospira platensis NIES-39
MTLLGNIIWLIFGGFLSGLGYIIGGITICLSIIGIPFGIQAIKLGFATMTPFGKESVVSPDSSNLLTMIFNVVWVIFFGWEIALSHLLHGLILAITIIGIPFAKQHFKLIPMALLPFGREFRDI

SEQ ID NO: 562 - protein, 124 aa, Lactobacillus acidophilus
  strain 30SC
MKKFASFVLGAVAGCAAGFLAGSLLVSDEQVDDVKNKIKDNDKLQDLKKKYDNGTEIVKNQLASFPKNVEDDSELKDFDDIVIDDSNKDDDVTAGDNAQESVDDLNNAEEEHNAEDAEEDKPEA

SEQ ID NO: 563 - protein, 146 aa, Oryza sativa
  subsp. japonica
MPRGGFSGSISSPRIDVAIDMGNPFLNRTVDGFLKIGAVGACKVAAEDTFDCLHRGDVSKHKLEHMLKKMCKEGAYWGTVAGVYVGMEYGVERIRGRHDWKNAMIGGALSGALISAASNNHKDKIIKDAITGGAVATAVEFINYLT

SEQ ID NO: 564 - protein, 152 aa, Zea mays
MAPKAEKKPAAKKPAEEEPAAPAEKAPAGKKPDLIKRLPAGKSAGKEGGVDKKGRKKAKKSVETYKIYIFKVLKQVHPDIGISSKAMSIMNSFINDIFEKLAGEAAKLARYNKKPTITSREIQTSVRLVLPGELAKHAVSEGTKAVTKFTSS

SEQ ID NO: 565 - protein, 255 aa, Vitis vinifera
MAEHAEGSGAASESLLEKITDKLQGHDSSSSGSDSDSDKPASPSPIKAKVFRLFGREKPVHTVLGGGKHADVFLWRNKKISAGVLGGATAMWVLFELLEYHLLTLVCHILILSLAILFLWSNATTFINKSPPRIPEVHIPEDPFLQAVNALRIEINCGFAVLRDIASGRDLKKFLIIIAGLWVLSILGSCCNFLTLFYITFVLLHTVPVIYEKYEDRIDPFAEKATIEIKKQYAVFDAKVLSKIPKVPLKYKKMA

SEQ ID NO: 566 - protein, 205 aa, Solanum tuberosum
MAVHKQVSLFAYLLVLGMLLFVSAMEHADAKACTKECGNLGYGICPRSEGSPENPICTNCCAGYKGCNYYSANGTFICEGESDPKKPKVCPLNCDPHIAYSKCPRSGGNTLIYPTGCTTCCTGYKGCYYFGKDGKFVCEGESIEPKACTLECDSRVAYMTCPSSGLAKIYQVCVNCCTAGEGCKLYGHDGSLICTGEPQSYISTT

SEQ ID NO: 567 - protein, 204 aa, Zea mays
MGAYKYVSELWRRKQSDVMRFVQRVRCWEYRQQPAIVRLTRPTRPDKARRLGFKAKQGYVVYRVRVRRGGRKRPVPKGIVYGKPKHQGITQLKFQRNKRSVAEERAGRKLGGLRVLNSYWVNEDSTYKYFEIILVDVAHTAIRNDPRINWLCNPVHKHRELRGLTSAGKKFRGLRGKGHTHHKNRPSRRATWKRNQTLSLRRYR

SEQ ID NO: 568 - protein, 152 aa, Zea mays
MSLIAGEDFQHILRLLNTNVDGKQKIMFAMTSIKGVGRRFSNIVCKKADIDMNKRAGELTPDELERLMTVVANPRQFKVPDWFLNRKKDYKDGRFSQVVSNALDMKLRDDLERLKKIRNHRGLRHYWGLRVRGQHTKTTGRRGKTVGVSKKR

SEQ ID NO: 569 - protein, 152 aa, Gallus gallus
MVHATSPLLLLLLLSLALVAPGLSARKCSLTGKWTNDLGSNMTIGAVNSRGEFTGTYITAVTATSNEIKESPLHGTQNTINKRTQPTFGFTVNWKFSESTTVFTGQCFIDRNGKEVLKTMWLLRSSVNDIGDDWKATRVGINIFTRLRTQKE

SEQ ID NO: 570 - protein, 145 aa, Saccharomyces cerevisiae
  strain ATCC 204508 / S288c
MFLRNSVLRTAPVLRRGITTLTPVSTKLAPPAAASYSQAMKANNFVYVSGQIPYTPDNKPVQGSISEKAEQVFQNVKNILAESNSSLDNIVKVNVFLADMKNFAEFNSVYAKHFHTHKPARSCVGVASLPLNVDLEMEVIAVEKN

SEQ ID NO: 571 - protein, 145 aa, Odocoileus virginianus
MLTAEEKAAVTGFWGKVNVDVVGAEALGRLLVVYPWTQRFFEHFGDLSSAGAVMGNPKVKAHGKRVLDAFSEGLKHLDDLKGAFAELSELHCNKLHVDPENFRLLGNVLVVVLARNFGGEFTPLVQADFQKVVAGVANALAHRYH

SEQ ID NO: 572 - protein, 142 aa, Solanum tuberosum
MAPKAAAEKKPAEKKPTEEKKAEKTPKAGKKLPKESGSSGADKKKKRSKKSVETYKIYIFKVLKQVHPDIGISSKSMGIMNSFINDIFEKLAQESSRLARINKKPTITSREIQTAVRLVLPGELAKHAVSEGTKAVTKFTSS

SEQ ID NO: 573 - protein, 139 aa, Cicer arietinum
MAPAKAEKKPAEKKPAAEKAPAEKKPKAEKKISKEGTSDKKKKRVKKSVETYKIYIFKVLKQVHPDIGISSKAMGIMNSFINDIFEKLAQEASRLARYNKKPTITSREIQTAVRLVLPGELAKHAVSEGTKAVTKFTSS

SEQ ID NO: 574 - protein, 135 aa, Lactobacillus acidophilus
  strain 30SC
MPTINQLVRKGRHSKVTKSKSPALNYSYNSMKKESVFNPAPQMRGVATRVGTMTPKKPNSALRKYARVRLSNLIEVTAYIPGEGHNLQEHSVVLIRGGRVKDLPGVRYHIVRGALDTAGVDGRKQSRSKYGAKKD

SEQ ID NO: 575 - protein, 135 aa, Zea mays
MTFKRRNGGRNKHGRGHVKYIRCSNCAKCCPKDKAIKRFQVRNIVEQAAIRDVQEACVYDGYVLPKLYAKVHHCVSCAIHAHIVRVRSREKRRDRKPPERFRRREDRPAGGQGGPRPGPGAAATAPAPAPVAARP

SEQ ID NO: 576 - protein, 135 aa, Agaricus bisporus
  var. bisporus
  strain H97 / ATCC MYA-4626 / FGSC 10389
MFSKVYLVASTLIAVAVAQAPLQCYQGVPTSAGPATDCSRFVNTFCDAAAAVPAVRIDDSVSRCFNLPDAKVCDFIAWNTFTRNVPPSAANCKSVLNKVISQCVLGGYGQVGPNAYTFTVDVNHGQCGHDVHGGS

SEQ ID NO: 577 - protein, 131 aa, Saccharomyces cerevisiae
  strain ATCC 204508 / S288c
MSSAAEKKPASKAPAEKKPAAKKTSTSVDGKKRSKVRKETYSSYIYKVLKQTHPDTGISQKSMSILNSFVNDIFERIATEASKLAAYNKKSTISAREIQTAVRLILPGELAKHAVSEGTRAVTKYSSSTQA

SEQ ID NO: 578 - protein, 123 aa, Zea mays
MARIKVHELRGKSKADLQAQLKEFKSELSLLRVAKVTGGAPNKLSKIKVVRTSIARVLTVISQKQKSALREAYKKKKLLPLDLRPKKTRAIRRRLTKHQLSLKTEREKKREKYFPMRKYAIKA

SEQ ID NO: 579 - protein, 120 aa, Zea mays
MVQRLTYRKRHSYATKSNQTRVVKTPGGKLVYQYTKKRASGPKCPVTGKKIQGIPHLRPAEYKRSRLSRNRRTVNRPYGGVLSGTAVRERIIRAFLVEEQKIVKKVLKLQKTKDKTSSKK

SEQ ID NO: 580 - protein, 118 aa, Lactobacillus acidophilus
  strain 30SC
MPRVKGGIVTRKRRKKVMKLAKGYRGAKHMQFKAASTQLFVSYKYAFRDRRRRKSEFRKLWIARINAAARQNDISYSKLMHGLKLAGVDMNRKMLADIAYNDSKTFAQLAETAKKALN

SEQ ID NO: 581 - protein, 118 aa, Arthrospira platensis NIES-39
MPKRQRKLAPPRGYKMHVKKGDTVQVIAGRDKGKVGEVISTLPKLSKVVVRDVNVRTKHVKPQQEGEGGRIVNFEAPIHSSNVMLYSTKEKVASRVSYTFTEDGRKVRMLKKTGEVID

SEQ ID NO: 582 - protein, 114 aa, Agaricus bisporus
  var. bisporus
  strain H97 / ATCC MYA-4626 / FGSC 10389
MQPKAAASKTPAVKHKFVIDYSKPAADGVFDGADFEKFLHDRIKVEGKAGQLGDHVKITRDGNTKITVTSNIPFSKRYLKYLTKKFLKKNTLRDWIRVVASSKDNYQLRFYNIA

SEQ ID NO: 583 - protein, 111 aa, Zea mays
MAPPQPKSGLFVGINKGHVVTKRELPLRPSHRKGKATKRVSMVRGLIREVAGFAPYEKRITELLKVGKDKRALKLAKRKLGTHKRAKKKREEMMGVLRKMRSAGTHTDKKK

SEQ ID NO: 584 - protein, 109 aa, Meleagris gallopavo
MGMESAGIHETTYNSIMKCDIDIRKDLYANNVMSGGTTMYPGIADRMQKEITALAPSTMKIKIIAPPERKYSVWIGGSILASLSTFQQMWITKQEYDEAGPSIVHRKCF

SEQ ID NO: 585 - protein, 108 aa, Vaccinium corymbosum
MAGIMNKIGETLHMGGGKKEEDKNKVGEQHQQQQYNKPDQHQGQYGQDQQQHKEGGGFMDKVKDKIPGVGGAGGAGHENKGGEKKKKKDKKKHEDGHDHGHSSSSDSD

SEQ ID NO: 586 - protein, 107 aa, Arthrospira platensis C1
MSGFIRGLFGRKSETTKTQGSSFYLDPDSAKSLGDIEYMRKPLEVKKSFPKMSGGKPFEAPKATAKPAMEMTQPKATESPAPEVKSDRRRADSSLDMFRNMARDLKK

SEQ ID NO: 587 - protein, 106 aa, Saccharomyces cerevisiae
  strain ATCC 204508 / S288c
MSTLLKSAKSIVPLMDRVLVQRIKAQAKTASGLYLPEKNVEKLNQAEVVAVGPGFTDANGNKVVPQVKVGDQVLIPQFGGSTIKLGNDDEVILFRDAEILAKIAKD

SEQ ID NO: 588 - protein, 106 aa, Agaricus bisporus
  var. bisporus
  strain H97 / ATCC MYA-4626 / FGSC 10389
MGSTRLYSKGRVLGHKRAKRNSRPNTSLIQIEGVATKEDAQFYLGKRIAYVYKAKREIQGSKVRVIWGRITRPHGSSGVVKSKFRSNLPPRAFGASVRVMLYPSNI

SEQ ID NO: 589 - protein, 93 aa, Saccharomyces cerevisiae
  strain ATCC 204508 / S288c
MLRTTFLRTPRQLMRKSPRASFSIVTRAAFPHLKNNQDEAEKKEQGLFDSNKKRLDTLEHGKNPDYKQPGMEDLKKKGDDARIEQNRPDDGVY

SEQ ID NO: 590 - protein, 91 aa, Lactobacillus acidophilus
  strain 30SC
MANKAELVSEVASKTKLTKKEVAAAVDAIFGSIQDNLAKGEKVQLIGFGTFEVRHRAARKGRNPQTGDEIEIPASEVPAFKPGKALKEAVK

SEQ ID NO: 591 - protein, 86 aa, Saccharomyces cerevisiae
  strain ATCC 204508 / S288c
MLNRCISRNTRLPVNLRIASRFYSDGPLGGAGPGNPQDIFIKRERAKEDYYARQQEREQLAHVKEQLKEHKKKLENLENKINNLSK

SEQ ID NO: 592 - protein, 84 aa, Zea mays
MAQTVVLKVGMSCEGCVGAVKRVLGKMEGVESYDVDIMEQKVTVKGNVTPDAVLQTVSKTGKKTSFWEAEAVTSESATPAGATA

SEQ ID NO: 593 - protein, 82 aa, Arthrospira platensis NIES-39
MAGTTGERPFGDIITSVRYWVIHSLTIPALFIAGWLFVSTGLAYDAFGTPRPNEYFTQERQELPIITERQDSKTQIQQFIAK

SEQ ID NO: 594 - protein, 78 aa, Solanum lycopersicum
MAQSIRFFATLFLLAMLVMATEMGPTRIVEARHCESLSHRFKGPCVSDKNCASVCETERFSGGNCRGFRRRCFCTKPC

SEQ ID NO: 595 - protein, 78 aa, Solanum tuberosum
MALSMRFFATFFLLAMLVMATEMGPMRIAEARNCESLSHRFKGPCTRDSNCASVCETERFSGGNCHGFRRRCFCTKPC

SEQ ID NO: 596 - protein, 74 aa, Cicer arietinum
MDKKSLAGLCFLFLVLFVAQEIAVSEAARCENLADTYRGPCFTTGSCDDHCKNKEHLVSGRCRDDFRCWCTKNC

SEQ ID NO: 597 - protein, 74 aa, Glycine max
MERKTFGFLFLLLLVLASDVTVKRAEAKDCLTRRHGFQGRCLFDRQCAHVCRSDGFIGGQCRGPLRKCFCSRPC

SEQ ID NO: 598 - protein, 70 aa, Linum usitatissimum
MSRRCPGKNAWPELVGKSGNMAAATVERENRNVHAIVLKEGSAMTKDFRCDRVWVIVNDHGVVTSVPHIT

SEQ ID NO: 599 - protein, 314 aa, Agaricus bisporus
  var. bisporus
  strain H97 / ATCC MYA-4626 / FGSC 10389
MSESLRYLGSLEGHKGWVTAIATSSENPDMILTASRDKTIIVWQLTREDDSYGYPKRILHGHNHFVSDVVISSDGQFALSSSWDHTLRLWDLNTGVTTRRFVGHSSDVLSVSFSADNRQIVSGSRDRTIKLWNTLGECKFDIKEDGHSEWVSCVRFSPNVANPVIVSAGWDKVVKVWELSKFKLKTNHYGHTGYINTVSVSPDGSLAASGGKDGITMLWDLNEGKHLYSLEAGDVVNALVFSPNRYWLCAATASCVKIFDLESKSIVDELKPTYTDVGEDARQPECVSIAWSADGQTLFTGYTDNAVRVWIVTS

SEQ ID NO: 600 - protein, 312 aa, Meleagris gallopavo
MAAEYSCEYGSLKFYALCGVGGVLSCGLTHTAVVPLDLVKCRMQVDPQKYKSIFNGFSVTIKEDGFRGLAKGWAPTFIGYSMQGLCKFGFYEVFKILYGNMLGEENAYLWRTSLYLAASASAEFFADIALAPMEAAKVRIQTQPGYANTLRQAVPKMFGEEGIWAFYKGVAPLWMRQIPYTMMKFACFERTVEALYKYVVPKPRSECTKGEQLIVTFIAGYIAGVFCAIVSHPADSVVSVLNKEKGSSASQVLKRLGFRGVWKGLFARIIMIGTLTALQWFIYDSVKVYFRLPRPPPPEMPESLKKKLGLTQ

SEQ ID NO: 601 - protein, 308 aa, Agaricus bisporus
  var. bisporus
  strain H97 / ATCC MYA-4626 / FGSC 10389
MTRSWEPGTQYNLGDVVEYNGDEYKIIQAHSSQSDWAPDRTPALWGKLPHRHHQQGQYQQQQECQPQQPQKTCYDYGKQEQAPQHSDSKEKKNWFGNITESQKQALEVGGGVALGAGLLGGAFAAWKHHQHKEEAHDSFEAWANAARSRAEEFRAKGPQGPATWVYNEGKHIPEQAILVGTEHNWNLYICRAYCDGGVQIGKASDVFKKGAVIGYKEDEHHLDKYEILLGDMRGLKWVQTGNSLDLASLGATPVEGGYENDHTRLYIARAFHKGAKHPGKVSERLDGAYIPYDGKEKCVKEYEVLCYL

SEQ ID NO: 602 - protein, 301 aa, Lactobacillus acidophilus
  strain 30SC
MKSYMKKIAAVVAVAGVALSTAACSNGGSNSTVASYKGGKITQQQYYDEMKKSQAGKSTLANMIINRALEQQYGKYVSSKKVDKQYNNYKKQYGSQFSAVLQQNGMTASSFKENLKTNLLSEQALKHIKKISKKQEQQAWKSYQPKVTVQHILVAKKSTAQSIIKQLKDGKSFKSLAKKYSLDTATKNKAGKLPAFDSTDNTLDSSFKTAAFKLKTGEVTSTPVKSQSGYHVIKMISHPAKGKFADHKKAIDDEIYASMAQDQATMKDVISTVLKRADVSIKDSDLKDVLASYVSTTSATK

SEQ ID NO: 603 - protein, 297 aa, Saccharomyces cerevisiae
  strain ATCC 204508 / S288c
MVVIANAHNELIHDAVLDYYGKRLATCSSDKTIKIFEVEGETHKLIDTLTGHEGPVWRVDWAHPKFGTILASCSYDGKVLIWKEENGRWSQIAVHAVHSASVNSVQWAPHEYGPLLLVASSDGKVSVVEFKENGTTSPIIIDAHAIGVNSASWAPATIEEDGEHNGTKESRKFVTGGADNLVKIWKYNSDAQTYVLESTLEGHSDWVRDVAWSPTVLLRSYLASVSQDRTCIIWTQDNEQGPWKKTLLKEEKFPDVLWRASWSLSGNVLALSGGDNKVTLWKENLEGKWEPAGEVHQ

SEQ ID NO: 604 - protein, 294 aa, Agaricus bisporus
  var. bisporus
  strain H97 / ATCC MYA-4626 / FGSC 10389
MSIPQPVPVSWKDFGKAANDLLGRDYYFQGSSLEVKTKTPSNVAFKVAGSRDAKSDAIAADLEAKWTDKKHGLTVTQAWTTSNILRNLVEVEDQIAKGVKFDLSTSLSPEKGTKTAVLNAALKQPGFHTRASLDVFRGPTFTADAVVGRDNLFLGAEAAYNVTEGNVSRYATAIGYLSHDYSITVHALNNLNTYHASYHQRISDSTEAGAKAVYDTKATHGGVALEVGAKTVLDQSSYLKAKINNTGVLALAYSQALRPGVRATFGLAVDTQKLNDVSPSGPAHKVGVHFVFDS

SEQ ID NO: 605 - protein, 288 aa, Agaricus bisporus
  var. bisporus
  strain H97 / ATCC MYA-4626 / FGSC 10389
MLEFTLNDGNRIPAIAFGTGTALYNQDASAFVRLAIETGITHLDGAQMYENEETLGKGIKSSGKPRSELFITTKLHILKPGQTVRETLVESLGKIGVDYVDLFLIHDPTANRKEATLSEIWSQLEALKNEGLTKSIGVSNFKVEDLNEILPGAKIIPAVNQIEFHPYVLKAASPIIELCKAKGIIVASYGGQTPIVRATDGPLKDLLPKIRERLEQTRGSPVTEGQVLTKWLLQKNVIAISTSSKESRIKEFLSTVDVPDLTKQEIESIDNAGSTIHKRIYMKHIFNE

SEQ ID NO: 606 - protein, 285 aa, Glycine max
MASEGDHHHHHHHHQDHDHHHHDHDHHHHHDGEGETNSWVGKDGKVYHSHDGLAPHSHEPIYSPGYFTRRAPPLLNRNFNERAFTVGIGGPVGTGKTALMLALCELLRENYSLAAVTNDIFTKEDGEFLVKHKALPEERIRAVETGGCPHAAIREDISINLGPLEELSNLFKADILLCESGGDNLAANFSRELADYIIYIIDVSGGDKIPRKGGPGITQADLLVINKTDLAPAIGADLAVMQRDALRMRDGGPFVFAQVKHKIGVEEIGNLVLQAWEAATGNKRH

SEQ ID NO: 607 - protein, 284 aa, Arthrospira platensis C1
MALQDDWQQSHLERRQVLAESQKQIWATIGLWQRERYSQAITQKQDRQAFVSQLKQENQAFLADAHNNHRQQAEQLAEDLKEFVRSLQKETATFLEESAQSRAEKAEELAQELRDFRAELRDTVAQWQQQWQQQDQERAAGRRKLAQQVQGDLQEFNIIRTIMAEKLLQQTQEAKAERLAGIQSMFEDMGKFRMQLQEYRREREKSVWGGERVKSTPATPQKAKASQTLVPQTKPKAVKSAPSTTTAAQSTTPTAVVVAEPTKPAVPPNQPKPTTVVPHPPNPG

SEQ ID NO: 608 - protein, 280 aa, Bos taurus
MSEAFDCAKCSESLYGRKYIQTDDGPYCVPCYDNTFANTCAECQQLIGHDSRELFYEDRHFHEGCFRCCRCQRSLADEPFTCQDSELLCNDCYCSAFSSQCSACGETVMPGSRKLEYGGQTWHEHCFLCSGCEQPLGSRSFVPDKGAHYCVPCYENKFAPRCARCSKTLTQGGVTYRDQPWHRECLVCTGCQTPLAGQQFTSREDDPYCVTCFGELFAPKCSSCKRPITGLGGGKYVSFEDRHWHHSCFSCARCSTSLVGQGFVPDGDQVLCQGCSQAGP

SEQ ID NO: 609 - protein, 273 aa, Saccharomyces cerevisiae
  strain ATCC 204508 / S288c
MSNPFDLLGNDVEDADVVVLPPKEIVKSNTSSKKADVPPPSADPSKARKNRPRPSGNEGAIRDKTAGRRNNRSKDVTDSATTKKSNTRRATDRHSRTGKTDTKKKVNQGWGDDKKELSAEKEAQADAAAEIAEDAAEAEDAGKPKTAQLSLQDYLNQQANNQFNKVPEAKKVELDAERIETAEKEAYVPATKVKNVKSKQLKTKEYLEFDATFVESNTRKNFGDRNNNSRNNFNNRRGGRGARKGNNTANATNSANTVQKNRNIDVSNLPSLA

SEQ ID NO: 610 - protein, 268 aa, Saccharomyces cerevisiae
  strain ATCC 204508 / S288c
MVLEATVLVIDNSEYSRNGDFPRTRFEAQIDSVEFIFQAKRNSNPENTVGLISGAGANPRVLSTFTAEFGKILAGLHDTQIEGKLHMATALQIAQLTLKHRQNKVQHQRIVAFVCSPISDSRDELIRLAKTLKKNNVAVDIINFGEIEQNTELLDEFIAAVNNPQEETSHLLTVTPGPRLLYENIASSPIILEEGSSGMGAFGGSGGDSDANGTFMDFGVDPSMDPELAMALRLSMEEEQQRQERLRQQQQQQDQPEQSEQPEQHQDK

SEQ ID NO: 611 - protein, 264 aa, Oryza sativa
  subsp. japonica
MSTAAARPGRRFTVGRSEDATHPDTIRAAISEFLATAIFVFAAEGSILSLGKLYQDMSTPGGLVAVSLAHALALAVAVAVAVNISGGHVNPAITFGALLGGRLSLIRALFYWLAQLLGAVVATLLLRLTTGGMRPPGFALASGVGDWHAVLLEATMTFGLMYAYYATVIDPKRGHVGTIAPLAVGFLLGANMLAGGPFDGAGMNPARVFGPALVGWRWRHHWVYWLGPFVGAGLAGLLYEYLVIPSADAAPHGGAHQPLAPEDY

SEQ ID NO: 612 - protein, 261 aa, Oryza sativa
  subsp. japonica
MICLRAAFPLTSSPLRRLALKPSSSRAAAAAMSSAIAAPVEHIVLIKVRPEAASSGAAAAMVSSLQALSTAVPGLSYIHVGPVLRLRSPAAEALGPTHVLHSRYATKPDLAAYAAHPAHVAAVQGHVLPNALDSTAIDWVNAALVPSPVNPGSAVRLSLAKLKEGVEAHQLAEKLAAATAAAGEAKGAKVSFGENFSPARAKGYQFGMVAVFDSVEGLDAVDGDGKVEAAKAIVRPLLDDVLELEFVVGPAAAEAPAPANL

SEQ ID NO: 613 - protein, 255 aa, Arthrospira platensis C1
MGLFDRIGRVVRANLNDLVNKAEDPEKILEQAVIEMQEDLIQLRQAVAQTIAQQKRSQQQYNQAQSQANQWQSRAQLALQKGDENLAREALQRKKGYLETANTLEISLRQQTEQVETLKRNLVSLESKISEAKTKKNMLKARAQAAKANEQLNNVLGGINTSSATSVFERMEEKVMIQEAKSQAAAELMGSGLEEQFRALEEGSDVDDELAAMKAQLAGAPANQPQLSPSAPTDSSTSNPEIDNELEELRRELNK

SEQ ID NO: 614 - protein, 250 aa, Agaricus bisporus
  var. bisporus
  strain H97 / ATCC MYA-4626 / FGSC 10389
MARIFCIPAVAIIFAAFVLNLIVSISLPYLPALDFTRTHFQQVASENGQNNISQLRFGIWAPCSYNEAGDRTCVKQGHAYGVTVANQQTDQVTIAPSWTRGLAIHPVAAVVSLLAVLLALSQHLTIALWATLIAWLAGLITFIAFLCDVVLFAHTRTQFKKLNLGTRTIPGPGFWITLVAMILLFLGGITTCLGRIKDRRTGHKDFAAMSSARTQALKADEIHDKKYGHSDDIELTGPKHWASKFKFNKH

SEQ ID NO: 615 - protein, 51 aa, Vitis vinifera
MAGIIHKIEETLHMGGGRKEEEEKRKGEGQGHGGYKGEGQGHGGYKGEGQG

SEQ ID NO: 616 - protein, 100 aa, Saccharomyces cerevisiae
  strain ATCC 204508 / S288c
MTVKTGIAIGLNKGKKVTSMTPAPKISYKKGAASNRTKFVRSLVREIAGLSPYERRLIDLIRNSGEKRARKVAKKRLGSFTRAKAKVEEMNNIIAASRRH

SEQ ID NO: 617 - protein, 98 aa, Arthrospira platensis NIES-39
MNKEQLVQETSIKAGVTKKQADAIISAICECIMDAVADGEKVTLVGFGSFEARHRKAREGRNPSTGQPMTIPATTVPAFSAGKAFKERVANESNENVA

SEQ ID NO: 618 - protein, 149 aa, Glycine max
MDAGGKIKKGAGGRKGGGPKKKPVSRSVKAGLQFPVGRIGRYLKKGRYAQRVGTGAPVYLAAVLEYLAAEVLELAGNAARDNKKNRIIPRHVLLAVRNDEELGKLLAGVTIAHGGVLPNINPVLLPKKTERASKEPKSPSKATKSPKKA

SEQ ID NO: 619 - protein, 146 aa, Linum usitatissimum
MAPKAAEKKPAEKKPAEEKKAEKAPAEKKPRAEKKLPKEGGAAAADKKKKRNKKNVETYKIYIFKVLKQVHPDIGISSKAMGIMNSFINDIFEKLAAESSRLARYNKKPTITSREIQTAVRLVLPGELAKHAVSEGTKAVTKFTSS

SEQ ID NO: 620 - protein, 143 aa, Saccharomyces cerevisiae
  strain ATCC 204508 / S288c
MSDVEEVVEVQEETVVEQTAEVTIEDALKVVLRTALVHDGLARGLRESTKALTRGEALLVVLVSSVTEANIIKLVEGLANDPENKVPLIKVADAKQLGEWAGLGKIDREGNARKVVGASVVVVKNWGAETDELSMIMEHFSQQ

SEQ ID NO: 621 - protein, 142 aa, Solanum tuberosum
MSSGGGSGKGGAGRGKPKASKSVSRSSKAGLQFPVGRIARFLKNGKYAERVGAGAPVYLSAVLEYLAAEVLELAGNAARDNKKNRIVPRHIQLAVRNDEELSKLLGQVTIANGGVLPNIHQNLLPRKAGSGKGDIGSASQEF

SEQ ID NO: 622 - protein, 139 aa, Oryza sativa
  subsp. japonica
MASEGAVSPAFAYTVVYVKDVAKSAAFYSAAFGYTVRRLDQSHKWAELESGTTTIAFTPLHQRETDALTGAVQLPDSAGERGPVEICFDYADVDAAYRRAVDSGAVPVSPPEQKSWGQKVGYVRDIDGIIVRMGSHVRA

SEQ ID NO: 623 - protein, 138 aa, Solanum lycopersicum
MKPAEKKPAEKTPVAEKAPAEKKPKAGKKLPKDAAAGDKKKKRSKKAVETYKIYIFKVLKQVHPDIGISSKAMGIMNSFINDIFEKLAQEASRLARYNKKPTITSREIQTAVRLVLPGELAKHAVSEGTKAVTKFTSS

SEQ ID NO: 624 - protein, 134 aa, Arthrospira platensis NIES-39
MSEKTDQILEQLKSLSLLEASELVKQIEEAFGVDASASAGGGMMMMAAPGMAAPGAEAAAEEEKTEFDVILTEFPADKKIAVLKVVRSITGLGLKEAKDLVESAPKAIKEATTKEDAESIKKQLEESGAKVEVK

SEQ ID NO: 625 - protein, 132 aa, Glycine max
MPFKRYVEIGRVAQINYGKEYGRLVVIVDVIDQNRALVDAPDMVRSQVNFKRLSLTDIKIDIKRVPKKKDLVKAMEDADVKTKWEKSSWGRKLIVRKRRASLNDFDRFKIMLAKIKKAAVVRQELAKLRKSA

SEQ ID NO: 626 - protein, 132 aa, Lactobacillus acidophilus
  strain 30SC
MVMTDPIADYLTRIRNANMAKHDSVEIPASNIKKSISEILKREGFIRDYEVADDNKQGVIKVFLKYGPNGERVISGLKRISKPGLRNYVSAEDLPKVLNGLGIAIVSTSAGVITDKEARQKNVGGEVIAYIW

SEQ ID NO: 627 - protein, 123 aa, Oryza sativa
  subsp. japonica
MSEKKRGAGTRKDEVVTREYTINLHKRLHGCTFKKKAPNAIKEIRKFAQKAMGTTDIRIDVKLNKAIWTNGIRSVPRRVRVRISRKRNDEEDAKEELYSLVTVAEIPAEGLKGLGTKVVEDEE

SEQ ID NO: 628 - protein, 121 aa, Saccharomyces cerevisiae
  strain ATCC 204508 / S288c
MSDFQKEKVEEQEQQQQQIIKIRITLTSTKVKQLENVSSNIVKNAEQHNLVKKGPVRLPTKVLKISTRKTPNGEGSKTWETYEMRIHKRYIDLEAPVQIVKRITQITIEPGVDVEVVVASN

SEQ ID NO: 629 - protein, 119 aa, Saccharomyces cerevisiae
  strain ATCC 204508 / S288c
MPKKRASNGRNKKGRGHVKPVRCVNCSKSIPKDKAIKRMAIRNIVEAAAVRDLSEASVYPEYALPKTYNKLHYCVSCAIHARIVRVRSREDRKNRAPPQRPRFNRDNKVSPAAAAKKAL

SEQ ID NO: 630 - protein, 117 aa, Bos taurus
MQAVLTQPPSVSGSLGQRVTISCTGSSSNIGGGNCVGWYQQIPGSAPKTLIYRSTSRPSGVPDRFSGSRSGNTATLTISSLQAEDEADYYCATYESSSYHGTVLQGKGNLEYSTMFK

SEQ ID NO: 631 - protein, 116 aa, Lactobacillus acidophilus
  strain 30SC
MARIAGVDLPRDKRIVVALTYIYGIGDTTAKKICADAGVSEDVRSKDLTPEDQEKLRAEVDKYRVEGDLRREVSMNIKRLVDIGSYRGIRHRRGLPVRGQNTKNNARTRKGTKRNR

SEQ ID NO: 632 - protein, 111 aa, Saccharomyces cerevisiae
  strain ATCC 204508 / S288c
MSTVTKYFYKGENTDLIVFAASEELVDEYLKNPSIGKLSEVVELFEVFTPQDGRGAEGELGAASKAQVENEFGKGKKIEEVIDLILRNGKPNSTTSSLKTKGGNAGTKAYN

SEQ ID NO: 633 - protein, 109 aa, Saccharomyces cerevisiae
  strain ATCC 204508 / S288c
MSDAGRKGFGEKASEALKPDSQKSYAEQGKEYITDKADKVAGKVQPEDNKGVFQGVHDSAEKGKDNAEGQGESLADQARDYMGAAKSKLNDAVEYVSGRVHGEEDPTKK

SEQ ID NO: 634 - protein, 108 aa, Saccharomyces cerevisiae
  strain ATCC 204508 / S288c
MPPKQQLSKAAKAAAALAGGKKSKKKWSKKSMKDRAQHAVILDQEKYDRILKEVPTYRYVSVSVLVDRLKIGGSLARIALRHLEKEGIIKPISKHSKQAIYTRATASE

SEQ ID NO: 635 - protein, 107 aa, Saccharomyces cerevisiae
  strain ATCC 204508 / S288c
MAESHRLYVKGKHLSYQRSKRVNNPNVSLIKIEGVATPQEAQFYLGKRIAYVYRASKEVRGSKIRVMWGKVTRTHGNSGVVRATFRNNLPAKTFGASVRIFLYPSNI

SEQ ID NO: 636 - protein, 106 aa, Linum usitatissimum
MSGRGKGGKGLGKGGAKRHRKVLRDNIQGITKPAIRRLARRGGVKRISGLIYEETRGVLKIFLENVIRDAVTYTEHARRKTVTAMDVVYALKRQGVPSTVRWLRRP

SEQ ID NO: 637 - protein, 94 aa, Zea mays
MGKGTGSFGKRRNKTHTLCIRCGRRSFHLQKSTCSSCGYPAARIRKYNWSVKAIRRKTTGTGRMRYMRHVPRRFKSNFREGTEAAPKKSAAAAN

SEQ ID NO: 638 - protein, 93 aa, Arthrospira platensis NIES-39
MKTNELVQRVAEKAKLPKKRVRAILDLAFSAISEEIESGQPVVVRGLGKFTLKEQPARTKTNPETGETTEVPARTVVNFRVIKPSKDKEEADS

SEQ ID NO: 639 - protein, 92 aa, Saccharomyces cerevisiae
  strain ATCC 204508 / S288c
MAKRTKKVGITGKYGVRYGSSLRRQVKKLEIQQHARYDCSFCGKKTVKRGAAGIWTCSCCKKTVAGGAYTVSTAAAATVRSTIRRLREMVEA

SEQ ID NO: 640 - protein, 88 aa, Lactobacillus acidophilus
  strain 30SC
MSETNERNYRHVYQGRVVSDKMDKTIVVVVDTYKNHPVYNKRIKYSKKYYAQDENNEAKVGDTVRIMETRPLSRKKRFRLVKIVKKSV

SEQ ID NO: 641 - protein, 85 aa, Saccharomyces cerevisiae
  strain ATCC 204508 / S288c
MLPRSALARSLQLQRGVAARFYSEGSTGTPRGSGSEDSFVKRERATEDFFVRQREKEQLRHLKEQLEKQRKKIDSLENKIDSMTK

SEQ ID NO: 642 - protein, 83 aa, Saccharomyces cerevisiae
  strain ATCC 204508 / S288c
MADQENSPLHTVGFDARFPQQNQTKHCWQSYVDYHKCVNMKGEDFAPCKVFWKTYNALCPLDWIEKWDDQREKGIFAGDINSD

SEQ ID NO: 643 - protein, 81 aa, Linum usitatissimum
MVGCGRIGKLLLQRLKPFGCNLLYHDRLKMEPELETQIGAKFEEDVDAMLPKCDVVVINTPLTEKTKGMFDKDRILKMKKG

SEQ ID NO: 644 - protein, 77 aa, Arthrospira platensis NIES-39
MVQRGSKVRILRQESYWFQEVGTVVSVDKSGIRYPVIVRFDKVNYNAYCGVDGGVNTNNFAEAELIEVEAPAKAAKK

SEQ ID NO: 645 - protein, 77 aa, Saccharomyces cerevisiae
  strain ATCC 204508 / S288c
MAYTSHLSSKTGLHFGRLSLRSLTAYAPNLMLWGGASMLGLFVFTEGWPKFQDTLYKKIPLLGPTLEDHTPPEDKPN

SEQ ID NO: 646 - protein, 72 aa, Zea mays
MAAAGPGLYSEIGKKARDLLYKDYHTDRGVLHQAAVTQLGKWECLLVTMAWGFLFRILFYFSLVLGSKNKRR

SEQ ID NO: 647 - protein, 71 aa, Arthrospira platensis C1
MALSKIEEARQLNDDDLSEQILEIKKQLANLRLLKATGRLEKPHEIRHTRHRLSQLLTVERERQLPNQSPA

SEQ ID NO: 648 - protein, 69 aa, Arthrospira platensis C1
MKRVHLPTDRETGKFRGFAFVEMNTEEEEIHAIEELDGAEWMGREIRVNLARPREDKKPSDRGGRKPRY

SEQ ID NO: 649 - protein, 257 aa, Oryza sativa
  subsp. japonica
MAAAAAAPALSLAEAAPVTAVLAPCPTPSRTFRRRSWVAAICRPALKCHHSRPLTAVVAAAAAAAAAGDSTSAGVFHGECFVVGDNIDTDQIIPAEHLTLVPSKPDEYRKLGSFAFVGLPTAAYPTPFVAPGEETTRYAVIIGGANFGCGSSREHAPVALGAAGARAVVAEGYARIFFRNSVATGEVYPLELADTGAWKECKTGDVVTVELDNCVMINHTSGKQYKLKPIGDAGPVIEAGGIFAYARKTGMIASKSA

SEQ ID NO: 650 - protein, 52 aa, Gallus gallus
MIRGRPAPEVKWGKVDGEIREAAIIDTTSSFTSLVLDSVNRFDTGKYTLTLE

SEQ ID NO: 651 - protein, 226 aa, Zea mays
MVLLSLEALRKRNVAGPLLLFNLALYVSMLGFASWALNAFVDHIGDHQYYDPPAGAAPRSAGDEAMLHFLQFALLAAVLGSAAKAAAAFHARALWRPQGLAAAAALGTVAWAATALALGLACKEMRAAAAAARGWQMRTLEAVTAVLAVTQLAYVLMLHRAAAAAYADDEADATAYADAGGDQCEPGCSIGTEDDADADCQRAQQQQHGRHHHQPRQGGGPSCSVM

SEQ ID NO: 652 - protein, 83 aa, Glycine max
MCILSFLKSDQSSSYDDDEYSKPCCDLCMCTRSMPPQCSCEDIRLNSCHSDCKSCMCTRSQPGQCRCLDTNDFCYKPCKSRDD

SEQ ID NO: 653 - protein, 141 aa, Bacillus amyloliquefaciens
  strain ATCC 23350 / DSM 7 / BCRC 11601 / NBRC 15535 / NRRL B-14393
MAKKVVKVVKLQIPAGKANPAPPVGPALGQAGVNIMGFCKEFNARTADQAGLIIPVEISVYEDRSFTFITKTPPAAVLLKKAAGIESGSGEPNRNKVATVKRDKVREIAETKMPDLNAADVEAAMRMVEGTARSMGIVIED

SEQ ID NO: 654 - protein, 212 aa, Bacillus amyloliquefaciens
  strain ATCC 23350 / DSM 7 / BCRC 11601 / NBRC 15535 / NRRL B-14393
MLFFIDTANIDEIKEAYELGVLAGVTTNPSLVAKEADVSFHDRLREITEVVKGSVSAEVISLNAEEMIEEGKELAKIAPNITVKIPMTSEGLKAVKALSDLNIKTNVTLIFSANQALLAARAGATYVSPFLGRLDDIGHNGLELISEIRQIFDLHDIDTQIIAASIRHAQHVTEAALRGAHIGTMPLKVIHQLTKHPLTDKGIEQFLADWNK

SEQ ID NO: 655 - protein, 293 aa, Bacillus amyloliquefaciens
  strain ATCC 23350 / DSM 7 / BCRC 11601 / NBRC 15535 / NRRL B-14393
MAITAQQVKELRQKTGAGMMDCKKALTETDGDMDKAIDLLREKGIAKAAKKADRIAAEGSTLIKTDGNKGVILEVNSETDFVAKNEGFKELLNTLADHLLANAPADLEEAMGQKMENGSTVEEYITSNVAKIGEKITLRRFAVITKEDSEAFGAYLHMGGRIGVLSVLSGTTDEDLAKDIAMHVAAVNPRYISRDQVSEEEANHERQILTQQALQEGKPENIVAKMVEGRLNKFFEEICLLDQAFVKNPDEKVKQVVAAKNASVKTYVRYEVGEGIEKRQENFAEEVMNQVKK

SEQ ID NO: 656 - protein, 265 aa, Bacillus amyloliquefaciens
  strain ATCC 23350 / DSM 7 / BCRC 11601 / NBRC 15535 / NRRL B-14393
KEITVQKGDTLWGISQKNGVNLKDLKEWNQLSSDLIIEGEKLTISSVETTTSGQYTVKQGDSLWKIAQKFGTSVNNLKSLNNLQSDIIYAGTTLKVKGQAQAAQPAQEASQPQTEQKPAAETAQPKQEAVQKEQPKQEPVQEQQQPKQEAKAVEAKQQPVQSNTNQQEPKKQLTMTATAYSANDGGISGVTATGVDLNKNPDAKVIAVDPSVIPLGSKVYVEGYGVATAADTGGAIKGNKIDVFVAKKSDANNWGVRTVNVKVLD

SEQ ID NO: 657 - protein, 517 aa, Bacillus amyloliquefaciens
  strain ATCC 23350 / DSM 7 / BCRC 11601 / NBRC 15535 / NRRL B-14393
SGDGKKDTKGQTSLNINIKTEPFSLHPGLANDSVSGGVIRQTFEGLTRVNSKGEPEEGTASKIETSKDGKTYTFTIRDGAKWSNGDPVTAQDFEYAWKWALDPNNESQYAYQLYYIKGAEAANTGKGKLDDVGVKAVNDKTLKVELNNPTPYFLQLTSFYTYMPINKKIAEKHKNWNTNAGDNYVSNGPFKMTAWKHSGSITLEKNDQYWDKDSVKLKKINMVMINNNNTELKKFQAGELNWAGMPLGQLPTESLPTLKKDGSLHVEPIAGVYWYKFNTEAKPLNNVNIRKALAYAIDRSSIVKNVTQGEQIPAMAAVPPSMKGFKDNTKGYFKDNDVKTAKEFLNKGLKELGVKSASDLPAIKLSFNTDDAHAKIAQAVQEMWKKNLGVKVELDNSEWNVYIDKLHSQDYQIGRMGWLGDFNDAINFLELFRDKEGGNNDTGWEDPEFKKLLNQSQLETDPDKRIAELKKAEKIFIDAMPVAPVYFYTDTWVQDKNLKNVIITGTGEVYFRNASFE

SEQ ID NO: 658 - protein, 441 aa, Bacillus amyloliquefaciens
  strain ATCC 23350 / DSM 7 / BCRC 11601 / NBRC 15535 / NRRL B-14393
ETLDSKKAKIESKQSEVASSLEAKEKELSKLQDKQAKIEKELKDINAKALDTSNKIEDKKAENEKTKKQIADLKKEIKETEARIEKRNEILKKRVRSLQENGGSQGYIDVLLGATSFGDFISRATAVSSIVDADKDLIKQQEQDKAKLEDAEAELNVKLKKVQDDLAKLESMQKDLNKQLDQKDKLFDEAKNGQKKAASAISDLKKEASQLANEKADTEKEQKRIKEEQAAAAALIKKQEEAQKASEDQNQKDDSQPAPAVKTVKKAAVSTETSDSSDSSSKPSNSGGSSHNSGGSDDSDGGSVISNSGGIEGAISVGSSLVGQSPYKFGGGRTQSDINNRIFDCSSFVRWAYANAGVNLGPVSGTSTDTLIGRGEAVSASDMKRGDLVFFDTYKTNGHVGIYLGNGTFLNDNTSHGVSIDSMSNPYWKKVFNGNVRRVVQ

SEQ ID NO: 659 - protein, 394 aa, Bacillus amyloliquefaciens
  strain ATCC 23350 / DSM 7 / BCRC 11601 / NBRC 15535 / NRRL B-14393
EVLAASDVTVNVSAEKQVIRGFGGMNHPAWVGDLTAAQRETAFGNGQNQLGFSILRIHVDENRNNWYKEVETAKSAIKHGAIVFASPWNPPNDMVETFNHNGDTSAKRLRYDKYAAYAQHLNDFVTFMKNNGVNLYAISMQNEPDYAHEWTWWTPQEILRFMRENASSINARVIAPESFQYLKNISDPILNDPQALRNMDILGTHLYGTQVSQFPYPLFKQKGAGKDLWMTEVYYPNSDNNSADRWPEALDVSQHIHNSMTEGDFQAYVWWYIRRSYGPMKEDGTISKRGYNMAHFSKFVRPGYVRIDATKNPNPNVYVSAYKGDNKVVIVAINKTNTGVNQNFVLQNGSASQVSRWVTSSSSNLQPGTDLNVTDNHFWAHLPAQSVTTFVVKR

SEQ ID NO: 660 - protein, 234 aa, Bacillus amyloliquefaciens
  strain ATCC 23350 / DSM 7 / BCRC 11601 / NBRC 15535 / NRRL B-14393
AFNDVKSTDATFASGTLDLSAKEQSANVNLSNLKPGDKLTKDFEFRNNGSLAIKEVLMALNFTDFKGAKKGNESAEDFLSQFEITVLTVGKEGGNGYPKNIILKAASLKDLYLMSAKQDKAAAEAISKHIDPKFLSESGKVNVATINGKTAPEYDGVPKTPVDYDQVRMEIRFKNDTAKDANGLSVQNKFQGNAISLQFSFEATQWNGLTITKDHTDKDGYVKENEKAHSEDKN

SEQ ID NO: 661 - protein, 350 aa, Bacillus licheniformis
AQPAKNVEKDYIVGFKSGVKTASVKKDIIKESGGKVDKQFRIINAAKAKLDKEALKEVKNDPDVAYVEEDHVAHALAQTVPYGIPLIKADKVQAQGFKGANVKVAVLDTGIQASHPDLNVVGGASFVAGEAYNTDGNGHGTHVAGTVAALDNTTGVLGVAPSVSLYAVKVLNSSGSGTYSGIVSGIEWATTNGMDVINMSLGGPSGSTAMKQAVDNAYARGVVVVAAAGNSGSSGNTNTIGYPAKYDSVIAVGAVDSNSNRASFSSVGAELEVMAPGAGVYSTYPTSTYATLNGTSMASPHVAGAAALILSKHPNLSASQVRNRLSSTATYLGSSFYYGKGLINVEAAAQ

SEQ ID NO: 662 - protein, 291 aa, Bacillus amyloliquefaciens
  strain ATCC 23350 / DSM 7 / BCRC 11601 / NBRC 15535 / NRRL B-14393
AFWGASNELLHDPTMAKEGNTWYAFGTGLEGERGLRVLKEGSGGVWTVQKSIFTSPLSWWSNYVPNYGLNQWAPDVQYYNGKYWLYYAVSSFGKNTSAIGLASSTSLSSGNWKDEGLVIRSTSANDYNAIDPELTIDKDGNPWLAFGSFWSGIKLTRLDKNTMKPTGSLYSIAARPNNGGALEAPAITYQNGYYYLMVSFDKCCSGVNSTYKIAYGRSKSITGPYLDKSGKSMSEGGGTILDSGNDRWKGPGGQDIVNGNILVRHAYDAEDSGIPKMLINDINWSSGWPSY

SEQ ID NO: 663 - protein, 314 aa, Bacillus licheniformis
ASALNSGKVNPLADFSLKGFAALNGGTTGGEGGQTVTVTTGDQLIAALKNKNANTPLKIYVNGTITTSNTSASKIDVKDVSNVSIVGSGTKGELKGIGIKIWRANNIIIRNLKIHEVASGDKDAIGIEGPSKNIWVDHNELYHSLNVDKDYYDGLFDVKRDAEYITFSWNYVHDGWKSMLMGSSDSDNYNRTITFHHNWFENLNSRVPSFRFGEGHIYNNYFNKIIDSGINSRMGARIRIENNLFENAKDPIVSWYSSSPGYWHVSNNKFVNSRGSMPTTSTTTYNPPYSYSLDNVDNVKSIVKQNAGVGKINP

SEQ ID NO: 664 - protein, 193 aa, Bacillus licheniformis
  strain DSM 13 / ATCC 14580
AEVVHKTIVVEKGQTYDGKGKRLIAGPELGDGSQREDQKPIFKVEDGATLKNVVLGAPAADGVHTYGNASINNVVWEDVGEDALTVKSEGSVTINGGSARLAADKIFQINKASTFTVKNFTADQGGKFIRQLGGSTFKAVVNIDNCTITNMKEAIFRTDSSTSSVTMTNTRYSKVGQKWIGVKHATERNNHEF

SEQ ID NO: 665 - protein, 538 aa, Bacillus megaterium
  strain DSM 319
HTSSAAPNNVLSTEKYNKEIKSPEFISGKLSGPSSQKAQDVVFHYMNTNKDKYKLGNENAQNSFKVTEVVKDPVEQATVVRLQQVYNNIPVWGSTQLAHVAKDGTLKVVSGTVAPDLDKKEKLKGQKQVDSKKAIQAAEKDLGFKPTYEKSPSSELYVYQNGSDTTYAYVVNLNFLSPEPGNYYYFVDAISGKVLDKYNTIDSVAGPKADVKQAAKPAAKPVTGTNAIGSGKGVLGDTKSLKTTLSSSTYYLQDNTRGATIYTYDAKNRTSLPGTLWTDTDNTYNATRDAAAVDAHYYAGVTYDYYKNKFNRNSYDNAGAPLKSTVHYSSGYNNAFWNGSQMVYGDGDGTTFVPLSGGLDVIGHELTHAVTERSSNLIYQYESGALNEAISDIFGTLVEYYDNRNPDWEIGEDIYTPGTSGDALRSMSNPAKYGDPDHYSKRYTGSSDNGGVHTNSGIINKAAYLLANGGTHYGVTVTGIGGDKLGKIYYRANTLYFTQSTTFSQARAGLVQAAADLYGSGSQEVISVGKSFDAVGVQ

SEQ ID NO: 666 - protein, 431 aa, Bacillus megaterium WSH-002
MPAILDIYAREVLDSRGNPTVEVEVYTESGAFGRALVPSGASTGEYEAVELRDGDKSRYLGKGVLKAVENVNEIIAPELVGMDVTDQIGIDRLMIELDGTENKGKLGANAILGVSMAVAHAAADFVGLPLYRYLGGFNAKQLPTPMMNIINGGSHADNNVDFQEFMILPVGAPTFKEAIRMGAEVFHALKSVLASKGLNTAVGDEGGFAPNLGSNREALEVIVEAITKAGYEAGKDIQLGMDVASSEFFNKETGKYDLAGEGRTGVTSAEMVDFYEQLVNEFPIVSIEDGLDENDWDGHKLLTERIGGKVQLVGDDLFVTNTKKLAQGIEQGVGNSILIKVNQIGTLTETFEAIEMAKRAGYTAVVSHRSGETEDATIADIAVATNAGQIKTGSMSRTDRIAKYNQLLRIEDELGVLAVYDGAKSFYNLKK

SEQ ID NO: 667 - protein, 242 aa, Bacillus amyloliquefaciens
  strain ATCC 23350 / DSM 7 / BCRC 11601 / NBRC 15535 / NRRL B-14393
AGLNKDQKRRAEQLTSIFENGKTEIQYGYVEELDDGRGYTCGRAGFTTATGDALEVVEVYTKAVPNNKLKKYLPELRRLAKDESDDTSNLKGFASAWRSLGNDKAFRAAQDEVNDRLYYQPAMKRSDQAGLKTALAKAVMYDTVIQHGDGDDPDSFYALIKRTNKKMGGSPKDGTDEKKWLNKFLDVRYDDLMNPSDEDTQDEWRESVARVDVFRDIVKAKNYNLDGPIHVRSSEYGNFTIQ

SEQ ID NO: 668 - protein, 256 aa, Bacillus amyloliquefaciens
  strain ATCC 23350 / DSM 7 / BCRC 11601 / NBRC 15535 / NRRL B-14393
KTDAGNVTKGELYTNMKKTAGASVLTQLVQEKVLAKKYKVSDKEIDNKLKEYKTQLGDQYSALKQQYGEDYLKDQVKYELLAQKAAKDNIKVTDSDTKEYYDGLKGKIRASHILVADKKTADEVEKKLKKGEKFETLAKEYSTDSSKDNGGDLGWFDKKSMDETFSKAAFGLKVGQVSDPVKTKFGYHIIKKTEERGKYDDMKKELKEEVLKQKLNDNSAVQAAIQKVMKKADVKVEDKDLKDTFNTSASTSSESK

SEQ ID NO: 669 - protein, 222 aa, Saccharomyces cerevisiae
  strain ATCC 204508 / S288c
MSSSESIRMVLIGPPGAGKGTQAPNLQERFHAAHLATGDMLRSQIAKGTQLGLEAKKIMDQGGLVSDDIMVNMIKDELTNNPACKNGFILFGFPRTIPQAEKLDQMLKEQGTPLEKAIELKVDDELLVARITGRLIHPASGRSYHKIFNPPKEDMKDDVTGEALVQRSDDNADALKKRLAAYHAQTEPIVDFYKKTGIWAGVDASQPPATVWADILNKLGKD

SEQ ID NO: 670 - protein, 222 aa, Saccharomyces cerevisiae
  strain ATCC 204508 / S288c
MSSSESIRMVLIGPPGAGKGTQAPNLQERFHAAHLATGDMLRSQIAKGTQLGLEAKKIMDQGGLVSDDIMVNMIKDELTNNPACKNGFILIGFPRTIPQAEKLDQMLKEQGTPLEKAIELKVDDELLVARITGRLIHPASGRSYHKIFNPPKEDMKDDVTGEALVQRSDDNADALKKRLAAYHAQTEPIVDFYKKTGIWAGVDASQPPATVWADILNKLGKD

SEQ ID NO: 671 - protein, 222 aa, Saccharomyces cerevisiae
  strain ATCC 204508 / S288c
MSSSESIRMVLIGPPGAGKGTQAPNLQERFHAAHLATGDMLRSQIAKGTQLGLEAKKIMDQGGLVSDDIMVNMIKDELTNNPACKNGFILDGFPRTIPQAEKLDQMLKEQGTPLEKAIELKVDDELLVARITGMLIHPASGRSYHKIFNPPKEDMKDDVTGEALVQRSDDNADALKKRLAAYHAQTEPIVDFYKKTGIWAGVDASQPPATVWADILNKLGKD

SEQ ID NO: 672 - protein, 222 aa, Saccharomyces cerevisiae; identical to SEQ ID NO: 338
  strain ATCC 204508 / S288c

SEQ ID NO: 673 - protein, 222 aa, Saccharomyces cerevisiae
  strain ATCC 204508 / S288c
MSSSESIRMVLIGPPGAGKGTQAPNLQERFHAAHLATGDMLRSQIAKGTQLGLEAKKIMDQGGLVSDDIMVNMIKDELTNNPACKNGFILDGFPRTIPQAEKLDQMLKEQGTPLEKAIELKVDDELLVARITGYLIHPASGRSYHKIFNPPKEDMKDDVTGEALVQRSDDNADALKKRLAAYHAQTEPIVDFYKKTGIWAGVDASQPPATVWADILNKLGKD

SEQ ID NO: 674 - protein, 222 aa, Saccharomyces cerevisiae
  strain ATCC 204508 / S288c
MSSSESIRMVLIGPPGAGKGTQAPNLQERFHAAHLATGDMLASQIAKGTQLGLEAKKIMDQGGLVSDDIMVNMIKDELTNNPACKNGFILDGFPRTIPQAEKLDQMLKEQGTPLEKAIELKVDDELLVARITGRLIHPASGRSYHKIFNPPKEDMKDDVTGEALVQRSDDNADALKKRLAAYHAQTEPIVDFYKKTGIWAGVDASQPPATVWADILNKLGKD

SEQ ID NO: 675 - protein, 222 aa, Saccharomyces cerevisiae
  strain ATCC 204508 / S288c
MSSSESIRMVLIGPPGAGKGTQAPNLQERFHAAHLATGDMLCSQIAKGTQLGLEAKKIMDQGGLVSDDIMVNMIKDELTNNPACKNGFILDGFPRTIPQAEKLDQMLKEQGTPLEKAIELKVDDELLVARITGRLIHPASGRSYHKIFNPPKEDMKDDVTGEALVQRSDDNADALKKRLAAYHAQTEPIVDFYKKTGIWAGVDASQPPATVWADILNKLGKD

SEQ ID NO: 676 - protein, 222 aa, Saccharomyces cerevisiae
  strain ATCC 204508 / S288c
MSSSESIRMVLIGPPGAGKGTQAPNLQERFHAAHLATGDMLGSQIAKGTQLGLEAKKIMDQGGLVSDDIMVNMIKDELTNNPACKNGFILDGFPRTIPQAEKLDQMLKEQGTPLEKAIELKVDDELLVARITGRLIHPASGRSYHKIFNPPKEDMKDDVTGEALVQRSDDNADALKKRLAAYHAQTEPIVDFYKKTGIWAGVDASQPPATVWADILNKLGKD

SEQ ID NO: 677 - protein, 222 aa, Saccharomyces cerevisiae
  strain ATCC 204508 / S288c
MSSSESIRMVLIGPPGAGKGTQAPNLQERFHAAHLATGDMLISQIAKGTQLGLEAKKIMDQGGLVSDDIMVNMIKDELTNNPACKNGFILDGFPRTIPQAEKLDQMLKEQGTPLEKAIELKVDDELLVARITGRLIHPASGRSYHKIFNPPKEDMKDDVTGEALVQRSDDNADALKKRLAAYHAQTEPIVDFYKKTGIWAGVDASQPPATVWADILNKLGKD

SEQ ID NO: 678 - protein, 222 aa, Saccharomyces cerevisiae
  strain ATCC 204508 / S288c
MSSSESIRMVLIGPPGAGKGTQAPNLQERFHAAHLATGDMLKSQIAKGTQLGLEAKKIMDQGGLVSDDIMVNMIKDELTNNPACKNGFILDGFPRTIPQAEKLDQMLKEQGTPLEKAIELKVDDELLVARITGRLIHPASGRSYHKIFNPPKEDMKDDVTGEALVQRSDDNADALKKRLAAYHAQTEPIVDFYKKTGIWAGVDASQPPATVWADILNKLGKD

SEQ ID NO: 679 - protein, 222 aa, Saccharomyces cerevisiae
  strain ATCC 204508 / S288c
MSSSESIRMVLIGPPGAGKGTQAPNLQERFHAAHLATGDMLLSQIAKGTQLGLEAKKIMDQGGLVSDDIMVNMIKDELTNNPACKNGFILDGFPRTIPQAEKLDQMLKEQGTPLEKAIELKVDDELLVARITGRLIHPASGRSYHKIFNPPKEDMKDDVTGEALVQRSDDNADALKKRLAAYHAQTEPIVDFYKKTGIWAGVDASQPPATVWADILNKLGKD

SEQ ID NO: 680 - protein, 222 aa, Saccharomyces cerevisiae
  strain ATCC 204508 / S288c
MSSSESIRMVLIGPPGAGKGTQAPNLQERFHAAHLATGDMLQSQIAKGTQLGLEAKKIMDQGGLVSDDIMVNMIKDELTNNPACKNGFILDGFPRTIPQAEKLDQMLKEQGTPLEKAIELKVDDELLVARITGRLIHPASGRSYHKIFNPPKEDMKDDVTGEALVQRSDDNADALKKRLAAYHAQTEPIVDFYKKTGIWAGVDASQPPATVWADILNKLGKD

SEQ ID NO: 681 - protein, 222 aa, Saccharomyces cerevisiae
  strain ATCC 204508 / S288c
MSSSESIRMVLIGPPGAGKGTQAPNLQERFHAAHLATGDMLTSQIAKGTQLGLEAKKIMDQGGLVSDDIMVNMIKDELTNNPACKNGFILDGFPRTIPQAEKLDQMLKEQGTPLEKAIELKVDDELLVARITGRLIHPASGRSYHKIFNPPKEDMKDDVTGEALVQRSDDNADALKKRLAAYHAQTEPIVDFYKKTGIWAGVDASQPPATVWADILNKLGKD

SEQ ID NO: 682 - protein, 222 aa, Saccharomyces cerevisiae
  strain ATCC 204508 / S288c
MSSSESIRMVLIGPPGAGKGTQAPNLQERFHAAHLATGDMLVSQIAKGTQLGLEAKKIMDQGGLVSDDIMVNMIKDELTNNPACKNGFILDGFPRTIPQAEKLDQMLKEQGTPLEKAIELKVDDELLVARITGRLIHPASGRSYHKIFNPPKEDMKDDVTGEALVQRSDDNADALKKRLAAYHAQTEPIVDFYKKTGIWAGVDASQPPATVWADILNKLGKD

SEQ ID NO: 683 - protein, 626 aa, Bacillus subtilis
  strain 168
ETANKSNELTAPSIKSGTILHAWNWSFNTLKHNMKDIHDAGYTAIQTSPINQVKEGNQGDKSMSNWYWLYQPTSYQIGNRYLGTEQEFKEMCAAAEEYGIKVIVDAVINHTTSDYAAISNEVKSIPNWTHGNTQIKNWSDRWDVTQNSLLGLYDWNTQNTQVQSYLKRFLDRALNDGADGFRFDAAKHIELPDDGSYGSQFWPNITNTFAEFQYGEILQDSASRDAAYANYMDVTASNYGHSIRSALKNRNLGVSNISHYASDVSADKLVTWVESHDTYANDDEESTWMSDDDIRLGWAVIASRSGSTPLFFSRPEGGGNGVRFPGKSQIGDRGSALFEDQAITAVNRFHNVMAGLPEELSNPNGNNQIFMNQRGSHGVVLANAGSSSVSINTATKLPDGRYDNKAGAGSFQVNDGKLTGTINARSVAVLYPDDIAKAPHVFLENYKTGVTHSFNDQLTITMRADANTTKAVYQINNGPETAFKDGDQFTIGKGDPFGKTYTIMLKGTNSDGVTRTEKYSFVKRDPASAKTIGYQNPNHWSQVNAYIYKHDGSRVIELTGSWPGKPMTKNADGIYTLTLPADTDTTNAKVIFNNGSAQVPGQNQPGFDYVLNGLYNDSGLSGSLPH

SEQ ID NO: 684 - protein, 627 aa, Bacillus subtilis
  strain 168
ETANKSNELTAPSIKSGTILHAWNWSFNTLKHNMKDIHDAGYTAIQTSPINQVKEGNQGDKSMSNWYWLYQPTSYQIGNRYLGTEQEFKEMCAAAEEYGIKVIVDAVINHTTSDVVGIMSNEVKSIPNWTHGNTQIKNWFDRWDVTQNSLLGLYDWNTQNTQVQSYLKRFLDRALNDGADGFRFDAAKHIELPDDGSYGSQFWPNITKILTEFQYGEILQDSASRDAAYANYMDVTASNYGHSIRSALKNRNLGVSNIMTYVLTVSADKLVTWVESHDTYANDDEESTWMSDDDIRLGWAVIASRSGSTPLFFSRPEGGGNGVRFPGKSQIGDRGSALFEDQAITAVNRFHNVMAGVPETLSNPNGNNQIFMNQRGSHGVVLANAGSSSVSINTATKLPDGRYDNKAGAGSFQVNDGKLTGTINARSVAVLYPDDIAKAPHVFLENYKTGVTHSFNDQLTITMRADANTTKAVYQINNGPETAFKDGDQFTIGKGDPFGKTYTIMLKGTNSDGVTRTEKYSFVKRDPASAKTIGYQNPNHWSQVNAYIYKHDGSRVIELTGSWPGKPMTKNADGIYTLTLPADTDTTNAKVIFNNGSAQVPGQNQPGFDYVLNGLYNDSGLSGSLPH

SEQ ID NO: 685 - protein, 627 aa, Bacillus subtilis
  strain 168
ETANKSNELTAPSIKSGTILHAWNWSFNTLKHNMKDIHDAGYTAIQTSPINQVKEGNQGDKSMSNWYWLYQPTSYQIGNRYLGTEQEFKEMCAAAEEYGIKVIVDAVINHTTSDVVGFMSNEVKSIPNWTHGNTQIKNWSDRWDVTQNSLLGLYDWNTQNTQVQSYLKRFLDRALNDGADGFRFDAAKHIELPDDGSYGSQFWPNITNTSAEFQYGEILQDSASRDAAYANYMDVTASNYGHSIRSALKNRNLGVSNISHYASDVSADKLVTWVESHDTYANDDEESTWMSDDDIRLGWAVIASRSGSTPLFFSRPEGGGNGVRFPGKSQIGDRGSALFEDQAITAVNRFHNVMAGQPEELSNPNGNNQIFMNQRGSHGVVLANAGSSSVSINTATKLPDGRYDNKAGAGSFQVNDGKLTGTINARSVAVLYPDDIAKAPHVFLENYKTGVTHSFNDQLTITMRADANTTKAVYQINNGPETAFKDGDQFTIGKGDPFGKTYTIMLKGTNSDGVTRTEKYSFVKRDPASAKTIGYQNPNHWSQVNAYIYKHDGSRVIELTGSWPGKPMTKNADGIYTLTLPADTDTTNAKVIFNNGSAQVPGQNQPGFDYVLNGLYNDSGLSGSLPH

SEQ ID NO: 686 - protein, 627 aa, Bacillus subtilis
  strain 168
ETANKSNELTAPSIKSGTILHAWNWSFNTLKHNMKDIHDAGYTAIQTSPINQVKEGNQGDKSMSNWYWLYQPTSYQIGNRYLGTEQEFKEMCAAAEEYGIKVIVDAVINHTTSDMVGVMSNEVKSIPNWTHGNTQIKNWSDRWDVTQNSLLGLYDWNTQNTQVQSYLKRFLDRALNDGADGFRFDAAKHIELPDDGSYGSQFWPNITNTSAEFQYGEILQDSASRDAAYANYMDVTASNYGHSIRSALKNRNLGVSNISHYAFDVSADKLVTWVESHDTYANDDEESTWMSDDDIRLGWAVIASRSGSTPLFFSRPEGGGNGVRFPGKSQIGDRGSALFEDQAITAVNRFHNVMAGQPVELSNPNGNNQIFMNQRGSHGVVLANAGSSSVSINTATKLPDGRYDNKAGAGSFQVNDGKLTGTINARSVAVLYPDDIAKAPHVFLENYKTGVTHSFNDQLTITMRADANTTKAVYQINNGPETAFKDGDQFTIGKGDPFGKTYTIMLKGTNSDGVTRTEKYSFVKRDPASAKTIGYQNPNHWSQVNAYIYKHDGSRVIELTGSWPGKPMTKNADGIYTLTLPADTDTTNAKVIFNNGSAQVPGQNQPGFDYVLNGLYNDSGLSGSLPH

SEQ ID NO: 687 - protein, 626 aa, Bacillus subtilis
  strain 168
  MOD_RES (209)..(209): Any amino acid
  MOD_RES (262)..(262): Any amino acid
ETANKSNELTAPSIKSGTILHAWNWSFNTLKHNMKDIHDAGYTAIQTSPINQVKEGNQGDKSMSNWYWLYQPTSYQIGNRYLGTEQEFKEMCAAAEEYGIKVIVDAVINHTTSDYAVISNEVKSIPNWTHGNTQIKNWSDRWDVTQNSLLGLYDWNTQNTQVQSYLKRFLDRALNDGADGFRFDAAKHIELPDDGSYGSQFWPNITNTXAEFQYGEILQDSASRDAAYANYMDVTASNYGHSIRSALKNRNLGVSNISQYAXEVSADKLVTWVESHDTYANDDEESTWMSDDDIRLGWAVIASRSGSTPLFFSRPEGGGNGVRFPGKSQIGDRGSALFEDQAITAVNRFHNVMAGLPEELSNPNGNNQIFMNQRGSHGVVLANAGSSSVSINTATKLPDGRYDNKAGAGSFQVNDGKLTGTINARSVAVLYPDDIAKAPHVFLENYKTGVTHSFNDQLTITMRADANTTKAVYQINNGPETAFKDGDQFTIGKGDPFGKTYTIMLKGTNSDGVTRTEKYSFVKRDPASAKTIGYQNPNHWSQVNAYIYKHDGSRVIELTGSWPGKPMTKNADGIYTLTLPADTDTTNAKVIFNNGSAQVPGQNQPGFDYVLNGLYNDSGLSGSLPH

SEQ ID NO: 688 - protein, 621 aa, Bacillus subtilis
  strain 168
ETANKSNELTAPSIKSGTILHAWNWSFNTLKHNMKDIHDAGYTAIQTSPINQVKEGNQGDKSMSNWYWLYQPTSYQIGNRYLGTEQEFKEMCAAAEEYGIKVIVDAVINHTTSDVMGFVSNEVKSIPNWTHGNTQIKNWSDRWDVTQNSLLGLYDWNTQNTQVQSYLKRFLDRALNDGADGFRFDAAKHIELPDDGSYGSQFWPNITNTSAEFQYGEILQDSASRDAAYANYMDVTASNYGHSIRSALKNRNLGVSNIVSADKLVTWVESHDTYANDDEESTWMSDDDIRLGWAVIASRSGSTPLFFSRPEGGGNGVRFPGKSQIGDRGSALFEDQAITAVNRFHNVMAGQPEELSNPNGNNQIFMNQRGSHGVVLANAGSSSVSINTATKLPDGRYDNKAGAGSFQVNDGKLTGTINARSVAVLYPDDIAKAPHVFLENYKTGVTHSFNDQLTITMRADANTTKAVYQINNGPETAFKDGDQFTIGKGDPFGKTYTIMLKGTNSDGVTRTEKYSFVKRDPASAKTIGYQNPNHWSQVNAYIYKHDGSRVIELTGSWPGKPMTKNADGIYTLTLPADTDTTNAKVIFNNGSAQVPGQNQPGFDYVLNGLYNDSGLSGSLPH

SEQ ID NO: 689 - protein, 627 aa, Bacillus subtilis
  strain 168
ETANKSNELTAPSIKSGTILHAWNWSFNTLKHNMKDIHDAGYTAIQTSPINQVKEGNQGDKSMSNWYWLYQPTSYQIGNRYLGTEQEFKEMCAAAEEYGIKVIVDAVINHTTSDLLGVLSNEVKSIPNWTHGNTQIKNWSDRWDVTQNSLLGLYDWNTQNTQVQSYLKRFLDRALNDGADGFRFDAAKHIELPDDGSYGSQFWPNITNTSAEFQYGEILQDSASRDAAYANYMDVTASNYGHSIRSALKNRNLGVSNISHYASDVSADKLVTWVESHDTYANDDEESTWMSDDDIRLGWAVIASRSGSTPLFFSRPEGGGNGVRFPGKSQIGDRGSALFEDQAITAVNRFHNVMAGQPEELSNPNGNNQIFMNQRGSHGVVLANAGSSSVSINTATKLPDGRYDNKAGAGSFQVNDGKLTGTINARSVAVLYPDDIAKAPHVFLENYKTGVTHSFNDQLTITMRADANTTKAVYQINNGPETAFKDGDQFTIGKGDPFGKTYTIMLKGTNSDGVTRTEKYSFVKRDPASAKTIGYQNPNHWSQVNAYIYKHDGSRVIELTGSWPGKPMTKNADGIYTLTLPADTDTTNAKVIFNNGSAQVPGQNQPGFDYVLNGLYNDSGLSGSLPH

SEQ ID NO: 690 - protein, 627 aa, Bacillus subtilis
  strain 168
ETANKSNELTAPSIKSGTILHAWNWSFNTLKHNMKDIHDAGYTAIQTSPINQVKEGNQGDKSMSNWYWLYQPTSYQIGNRYLGTEQEFKEMCAAAEEYGIKVIVDAVINHTTSDLVGVLSNEVKSIPNWTHGNTQIKNWSDRWDVTQNSLLGLYDWNTQNTQVQSYLKRFLDRALNDGADGFRFDAAKHIELPDDGSYGSQFWPNITRVVMEFQYGEILQDSASRDAAYANYMDVTASNYGHSIRSALKNRNLGVSNIVMYILRVSADKLVTWVESHDTYANDDEESTWMSDDDIRLGWAVIASRSGSTPLFFSRPEGGGNGVRFPGKSQIGDRGSALFEDQAITAVNRFHNVMAGLPKRLSNPNGNNQIFMNQRGSHGVVLANAGSSSVSINTATKLPDGRYDNKAGAGSFQVNDGKLTGTINARSVAVLYPDDIAKAPHVFLENYKTGVTHSFNDQLTITMRADANTTKAVYQINNGPETAFKDGDQFTIGKGDPFGKTYTIMLKGTNSDGVTRTEKYSFVKRDPASAKTIGYQNPNHWSQVNAYIYKHDGSRVIELTGSWPGKPMTKNADGIYTLTLPADTDTTNAKVIFNNGSAQVPGQNQPGFDYVLNGLYNDSGLSGSLPH

SEQ ID NO: 691 - protein, 627 aa, Bacillus subtilis
  strain 168
ETANKSNELTAPSIKSGTILHAWNWSFNTLKHNMKDIHDAGYTAIQTSPINQVKEGNQGDKSMSNWYWLYQPTSYQIGNRYLGTEQEFKEMCAAAEEYGIKVIVDAVINHTTSDVIGMVSNEVKSIPNWTHGNTQIKNWSDRWDVTQNSLLGLYDWNTQNTQVQSYLKRFLDRALNDGADGFRFDAAKHIELPDDGSYGSQFWPNITRLVMEFQYGEILQDSASRDAAYANYMDVTASNYGHSIRSALKNRNLGVSNIMRYLLKVSADKLVTWVESHDTYANDDEESTWMSDDDIRLGWAVIASRSGSTPLFFSRPEGGGNGVRFPGKSQIGDRGSALFEDQAITAVNRFHNVMAGIPKRLSNPNGNNQIFMNQRGSHGVVLANAGSSSVSINTATKLPDGRYDNKAGAGSFQVNDGKLTGTINARSVAVLYPDDIAKAPHVFLENYKTGVTHSFNDQLTITMRADANTTKAVYQINNGPETAFKDGDQFTIGKGDPFGKTYTIMLKGTNSDGVTRTEKYSFVKRDPASAKTIGYQNPNHWSQVNAYIYKHDGSRVIELTGSWPGKPMTKNADGIYTLTLPADTDTTNAKVIFNNGSAQVPGQNQPGFDYVLNGLYNDSGLSGSLPH

SEQ ID NO: 692 - protein, 627 aa, Bacillus subtilis
  strain 168
ETANKSNELTAPSIKSGTILHAWNWSFNTLKHNMKDIHDAGYTAIQTSPINQVKEGNQGDKSMSNWYWLYQPTSYQIGNRYLGTEQEFKEMCAAAEEYGIKVIVDAVINHTTSDLLGVLSNEVKSIPNWTHGNTQIKNWSDRWDVTQNSLLGLYDWNTQNTQVQSYLKRFLDRALNDGADGFRFDAAKHIELPDDGSYGSQFWPNITTFLTEFQYGEILQDSASRDAAYANYMDVTASNYGHSIRSALKNRNLGVSNIIRYLLRVSADKLVTWVESHDTYANDDEESTWMSDDDIRLGWAVIASRSGSTPLFFSRPEGGGNGVRFPGKSQIGDRGSALFEDQAITAVNRFHNVMAGLPTKLSNPNGNNQIFMNQRGSHGVVLANAGSSSVSINTATKLPDGRYDNKAGAGSFQVNDGKLTGTINARSVAVLYPDDIAKAPHVFLENYKTGVTHSFNDQLTITMRADANTTKAVYQINNGPETAFKDGDQFTIGKGDPFGKTYTIMLKGTNSDGVTRTEKYSFVKRDPASAKTIGYQNPNHWSQVNAYIYKHDGSRVIELTGSWPGKPMTKNADGIYTLTLPADTDTTNAKVIFNNGSAQVPGQNQPGFDYVLNGLYNDSGLSGSLPH

SEQ ID NO: 693 - protein, 617 aa, Bacillus subtilis
  strain 168
ETANKSNELTAPSIKSGTILHAWNWSFNTLKHNMKDIHDAGYTAIQTSPINQVKEGNQGDKSMSNWYWLYQPTSYQIGNRYLGTEQEFKEMCAAAEEYGIKVIVDAVINHTTSDNEVKSIPNWTHGNTQIKNWSDRWDVTQNSLLGLYDWNTQNTQVQSYLKRFLDRALNDGADGFRFDAAKHIELPDDGSYGSQFWPNITEFQYGEILQDSASRDAAYANYMDVTASNYGHSIRSALKNRNLGVSNIFRYVFKVSADKLVTWVESHDTYANDDEESTWMSDDDIRLGWAVIASRSGSTPLFFSRPEGGGNGVRFPGKSQIGDRGSALFEDQAITAVNRFHNVMAGLPMKLSNPNGNNQIFMNQRGSHGVVLANAGSSSVSINTATKLPDGRYDNKAGAGSFQVNDGKLTGTINARSVAVLYPDDIAKAPHVFLENYKTGVTHSFNDQLTITMRADANTTKAVYQINNGPETAFKDGDQFTIGKGDPFGKTYTIMLKGTNSDGVTRTEKYSFVKRDPASAKTIGYQNPNHWSQVNAYIYKHDGSRVIELTGSWPGKPMTKNADGIYTLTLPADTDTTNAKVIFNNGSAQVPGQNQPGFDYVLNGLYNDSGLSGSLPH

SEQ ID NO: 694 - protein, 626 aa, Bacillus subtilis
  strain 168
  MOD_RES (95)..(95): Any amino acid
ETANKSNELTAPSIKSGTILHAWNWSFNTLKHNMKDIHDAGYTAIQTSPINQVKEGNQGDKSMSNWYWLYQPTSYQIGNRYLGTEQEFKEMCAAXEEYGIKVIVDAVINHTTSDLFGVVSNEVKSIPNWTHGNTQIKNWCDRWDVTQNSLLGVYDWNTQNTQAQSYLKRFLDRALNDGADGFRFDAAKHIELPDDGSYGSQFWPNITGDNEFQYGEILQDSASRDAAYANYMDVTASNYGHSIRSALKNRNLGVSNIVKYLVRVSADKLVTWVESHDTYANDDEESTWMSDDDIRLGWAVIASRSGSTPLFFSRPEGGGNGVRFPGKSQIGDRGSALFEDQAITAVNRFHNVMAGFPKILSNPNGNNQIFMNQRGSHGVVLANAGSSSVSINTATKLPDGRYDNKAGAGSFQVNDGKLTGTINARSVAVLYPDDIAKAPHVFLENYKTGVTHSFNDQLTITMRADANTTKAVYQINNGPETAFKDGDQFTIGKGDPFGKTYTIMLKGTNSDGVTRTEKYSFVKRDPASAKTIGYQNPNHWSQVNAYIYKHDGSRVIELTGSWPGKPMTKNADGIYTLTLPADTDTTNAKVIFNNGSAQVPGQNQPGFDYVLNGLYNDSGLSGSLPH

SEQ ID NO: 695 - protein, 627 aa, Bacillus subtilis
  strain 168
ETANKSNELTAPSIKSGTILHAWNWSFNTLKHNMKDIHDAGYTAIQTSPINQVKEGNQGDKSMSNWYWLYQPTSYQIGNRYLGTEQEFKEMCAAAEEYGIKVIVDAVINHTTSDVLGVVSNEVKSIPNWTHGNTQIKNWSDRWDVTQNSLLGLYDWNTQNTQVQSYLKRFLDRALNDGADGFRFDAAKHIELPDDGSYGSQFWPNITNTSAEFQYGEILQDSASRDAAYANYMDVTASNYGHSIRSALKNRNLGVSNISHYASDVSADKLVTWVESHDTYANDDEESTWMSDDDIRLGWAVIASRSGSTPLFFSRPEGGGNGVRFPGKSQIGDRGSALFEDQAITAVNRFHNVMAGQPEELSNPNGNNQIFMNQRGSHGVVLANAGSSSVSINTATKLPDGRYDNKAGAGSFQVNDGKLTGTINARSVAVLYPDDIAKAPHVFLENYKTGVTHSFNDQLTITMRADANTTKAVYQINNGPETAFKDGDQFTIGKGDPFGKTYTIMLKGTNSDGVTRTEKYSFVKRDPASAKTIGYQNPNHWSQVNAYIYKHDGSRVIELTGSWPGKPMTKNADGIYTLTLPADTDTTNAKVIFNNGSAQVPGQNQPGFDYVLNGLYNDSGLSGSLPH

SEQ ID NO: 696 - protein, 627 aa, Bacillus subtilis
  strain 168
ETANKSNELTAPSIKSGTILHAWNWSFNTLKHNMKDIHDAGYTAIQTSPINQVKEGNQGDKSMSNWYWLYQPTSYQIGNRYLGTEQEFKEMCAAAEEYGIKVIVDAVINHTTSDLLGLVSNEVKSIPNWTHGNTQIKNWSDRWDVTQNSLLGLYDWNTQNTQVQSYLKRFLDRALNDGADGFRFDAAKHIELPDDGSYGSQFWPNITTVFREFQYGEILQDSASRDAAYANYMDVTASNYGHSIRSALKNRNLGVSNILRYLVKVSADKLVTWVESHDTYANDDEESTWMSDDDIRLGWAVIASRSGSTPLFFSRPEGGGNGVRFPGKSQIGDRGSALFEDQAITAVNRFHNVMAGIPIILSNPNGNNQIFMNQRGSHGVVLANAGSSSVSINTATKLPDGRYDNKAGAGSFQVNDGKLTGTINARSVAVLYPDDIAKAPHVFLENYKTGVTHSFNDQLTITMRADANTTKAVYQINNGPETAFKDGDQFTIGKGDPFGKTYTIMLKGTNSDGVTRTEKYSFVKRDPASAKTIGYQNPNHWSQVNAYIYKHDGSRVIELTGSWPGKPMTKNADGIYTLTLPADTDTTNAKVIFNNGSAQVPGQNQPGFDYVLNGLYNDSGLSGSLPH

SEQ ID NO: 697 - protein, 627 aa, Bacillus subtilis
  strain 168
  MOD_RES (210)..(210): Any amino acid
  MOD_RES (359)..(359): Any amino acid
ETANKSNELTAPSIKSGTILHAWNWSFNTLKHNMKDIHDAGYTAIQTSPINQVKEGNQGDKSMSNWYWLYQPTSYQIGNRYLGTEQEFKEMCAAAEEYGIKVIVDAVINHTTSDVIGLLSNEVKSIPNWTHGNTQIKNWSDRWDVTQNSLLGLYDWNTQNTQVQSYLKRFLDRALNDGADGFRFDAAKHIELPDDGSYGSQFWPNITNTXREFQYGEILQDSASRDAAYANYMDVTASNYGHSIRSALKNRNLGVSNISLSAFGVSADKLVTWVESHDTYANDDEESTWMSDDDIRLGWAVIASRSGSTPLFFSRPEGGGNGVRFPGKSQIGDRGSALFEDQAITAVNRFHNVMAGLPXELSNPNGNNQIFMNQRGSHGVVLANAGSSSVSINTATKLPDGRYDNKAGAGSFQVNDGKLTGTINARSVAVLYPDDIAKAPHVFLENYKTGVTHSFNDQLTITMRADANTTKAVYQINNGPETAFKDGDQFTIGKGDPFGKTYTIMLKGTNSDGVTRTEKYSFVKRDPASAKTIGYQNPNHWSQVNAYIYKHDGSRVIELTGSWPGKPMTKNADGIYTLTLPADTDTTNAKVIFNNGSAQVPGQNQPGFDYVLNGLYNDSGLSGSLPH

SEQ ID NO: 698 - protein, 626 aa, Bacillus subtilis
  strain 168
ETANKSNELTAPSIKSGTILHAWNWSFNTLKHNMKDIHDAGYTAIQTSPINQVKEGNQGDKSMSNWYWLYQPTSYQIGNRYLGTEQEFKEMCAAAEEYGIKVIVDAVINHTTSVLGVLSNEVKSIPNWTHGNTQIKNWSDRWDVTQNSLLGLYDWNTQNTQVQSYLKRFLDRALNDGADGFRFDAAKHIELPDDGSYGSQFWPNITKMIMEFQYGEILQDSASRDAAYANYMDVTASNYGHSIRSALKNRNLGVSNISHYASDVSADKLVTWVESHDTYANDDEESTWMSDDDIRLGWAVIASRSGSTPLFFSRPEGGGNGVRFPGKSQIGDRGSALFEDQAITAVNRFHNVMAGVPMMLSNPNGNNQIFMNQRGSHGVVLANAGSSSVSINTATKLPDGRYDNKAGAGSFQVNDGKLTGTINARSVAVLYPDDIAKAPHVFLENYKTGVTHSFNDQLTITMRADANTTKAVYQINNGPETAFKDGDQFTIGKGDPFGKTYTIMLKGTNSDGVTRTEKYSFVKRDPASAKTIGYQNPNHWSQVNAYIYKHDGSRVIELTGSWPGKPMTKNADGIYTLTLPADTDTTNAKVIFNNGSAQVPGQNQPGFDYVLNGLYNDSGLSGSLPH

SEQ ID NO: 699 - protein, 626 aa, Bacillus subtilis
  strain 168
ETANKSNELTAPSIKSGTILHAWNWSFNTLKHNMKDIHDAGYTAIQTSPINQVKEGNQGDKSMSNWYWLYQPTSYQIGNRYLGTEQEFKEMCAAAEEYGIKVIVDAVINHTTSLFGLVSNEVKSIPNWTHGNTQIKNWSDRWDVTQNSLLGLYDWNTQNTQVQSYLKRFLDRALNDGADGFRFDAAKHIELPDDGSYGSQFWPNITNTSAEFQYGEILQDSASRDAAYANYMDVTASNYGHSIRSALKNRNLGVSNISHYASDVSADKLVTWVESHDTYANDDEESTWMSDDDIRLGWAVIASRSGSTPLFFSRPEGGGNGVRFPGKSQIGDRGSALFEDQAITAVNRFHNVMAGQPEELSNPNGNNQIFMNQRGSHGVVLANAGSSSVSINTATKLPDGRYDNKAGAGSFQVNDGKLTGTINARSVAVLYPDDIAKAPHVFLENYKTGVTHSFNDQLTITMRADANTTKAVYQINNGPETAFKDGDQFTIGKGDPFGKTYTIMLKGTNSDGVTRTEKYSFVKRDPASAKTIGYQNPNHWSQVNAYIYKHDGSRVIELTGSWPGKPMTKNADGIYTLTLPADTDTTNAKVIFNNGSAQVPGQNQPGFDYVLNGLYNDSGLSGSLPH

SEQ ID NO: 700 - protein, 626 aa, Bacillus subtilis
  strain 168
ETANKSNELTAPSIKSGTILHAWNWSFNTLKHNMKDIHDAGYTAIQTSPINQVKEGNQGDKSMSNWYWLYQPTSYQIGNRYLGTEQEFKEMCAAAEEYGIKVIVDAVINHTTSLIGVFSNEVKSIPNWTHGNTQIKNWSDRWDVTQNSLLGLYDWNTQNTQVQSYLKRFLDRALNDGADGFRFDAAKHIELPDDGSYGSQFWPNITRVLREFQYGEILQDSASRDAAYANYMDVTASNYGHSIRSALKNRNLGVSNIFIYVITVSADKLVTWVESHDTYANDDEESTWMSDDDIRLGWAVIASRSGSTPLFFSRPEGGGNGVRFPGKSQIGDRGSALFEDQAITAVNRFHNVMAGVPMKLSNPNGNNQIFMNQRGSHGVVLANAGSSSVSINTATKLPDGRYDNKAGAGSFQVNDGKLTGTINARSVAVLYPDDIAKAPHVFLENYKTGVTHSFNDQLTITMRADANTTKAVYQINNGPETAFKDGDQFTIGKGDPFGKTYTIMLKGTNSDGVTRTEKYSFVKRDPASAKTIGYQNPNHWSQVNAYIYKHDGSRVIELTGSWPGKPMTKNADGIYTLTLPADTDTTNAKVIFNNGSAQVPGQNQPGFDYVLNGLYNDSGLSGSLPH

SEQ ID NO: 701 - protein, 627 aa, Bacillus subtilis
  strain 168
ETANKSNELTAPSIKSGTILHAWNWSFNTLKHNMKDIHDAGYTAIQTSPINQVKEGNQGDKSMSNWYWLYQPTSYQIGNRYLGTEQEFKEMCAAAEEYGIKVIVDAVINHTTSDLFGMVSNEVKSIPNWTHGNTQIKNWFDRWDVTQNSLLGLYDWNTQNTQVQSYLKRFLDRALNDGADGFRFDAAKHIELPDDGSYGSQFWPNITIVITEFQYGEILQDSASRDAAYANYMDVTASNYGHSIRSALKNRNLGVSNILRYVLRVSADKLVTWVESHDTYANDDEESTWMSDDDIRLGWAVIASRSGSTPLFFSRPEGGGNGVRFPGKSQIGDRGSALFEDQAITAVNRFHNVMAGLPMKLSNPNGNNQIFMNQRGSHGVVLANAGSSSVSINTATKLPDGRYDNKAGAGSFQVNDGKLTGTINARSVAVLYPDDIAKAPHVFLENYKTGVTHSFNDQLTITMRADANTTKAVYQINNGPETAFKDGDQFTIGKGDPFGKTYTIMLKGTNSDGVTRTEKYSFVKRDPASAKTIGYQNPNHWSQVNAYIYKHDGSRVIELTGSWPGKPMTKNADGIYTLTLPADTDTTNAKVIFNNGSAQVPGQNQPGFDYVLNGLYNDSGLSGSLPH

SEQ ID NO: 702 - protein, 627 aa, Bacillus subtilis
  strain 168
ETANKSNELTAPSIKSGTILHAWNWSFNTLKHNMKDIHDAGYTAIQTSPINQVKEGNQGDKSMSNWYWLYQPTSYQIGNRYLGTEQEFKEMCAAAEEYGIKVIVDAVINHTTSDVLGLLSNEVKSIPNWTHGNTQIKNWSDRWDVTQNSLLGLYDWNTQNTQVQSYLKRFLDRALNDGADGFRFDAAKHIELPDDGSYGSQFWPNITIIMREFQYGEILQDSASRDAAYANYMDVTASNYGHSIRSALKNRNLGVSNILRYMMTVSADKLVTWVESHDTYANDDEESTWMSDDDIRLGWAVIASRSGSTPLFFSRPEGGGNGVRFPGKSQIGDRGSALFEDQAITAVNRFHNVMAGVPKTLSNPNGNNQIFMNQRGSHGVVLANAGSSSVSINTATKLPDGRYDNKAGAGSFQVNDGKLTGTINARSVAVLYPDDIAKAPHVFLENYKTGVTHSFNDQLTITMRADANTTKAVYQINNGPETAFKDGDQFTIGKGDPFGKTYTIMLKGTNSDGVTRTEKYSFVKRDPASAKTIGYQNPNHWSQVNAYIYKHDGSRVIELTGSWPGKPMTKNADGIYTLTLPADTDTTNAKVIFNNGSAQVPGQNQPGFDYVLNGLYNDSGLSGSLPH

SEQ ID NO: 703 - protein, 627 aa, Bacillus subtilis
  strain 168
ETANKSNELTAPSIKSGTILHAWNWSFNTLKHNMKDIHDAGYTAIQTSPINQVKEGNQGDKSMSNWYWLYQPTSYQIGNRYLGTEQEFKEMCAAAEEYGIKVIVDAVINHTTSDIVGFVSNEVKSIPNWTHGNTQIKNWSDRWDVTQNSLLGLYDWNTQNTQVQSYLKRFLDRALNDGADGFRFDAAKHIELPDDGSYGSQFWPNITKVLMEFQYGEILQDSASRDAAYANYMDVTASNYGHSIRSALKNRNLGVSNISHYASDVSADKLVTWVESHDTYANDDEESTWMSDDDIRLGWAVIASRSGSTPLFFSRPEGGGNGVRFPGKSQIGDRGSALFEDQAITAVNRFHNVMAGQPEELSNPNGNNQIFMNQRGSHGVVLANAGSSSVSINTATKLPDGRYDNKAGAGSFQVNDGKLTGTINARSVAVLYPDDIAKAPHVFLENYKTGVTHSFNDQLTITMRADANTTKAVYQINNGPETAFKDGDQFTIGKGDPFGKTYTIMLKGTNSDGVTRTEKYSFVKRDPASAKTIGYQNPNHWSQVNAYIYKHDGSRVIELTGSWPGKPMTKNADGIYTLTLPADTDTTNAKVIFNNGSAQVPGQNQPGFDYVLNGLYNDSGLSGSLPH

SEQ ID NO: 704 - protein, 627 aa, Bacillus subtilis
  strain 168
ETANKSNELTAPSIKSGTILHAWNWSFNTLKHNMKDIHDAGYTAIQTSPINQVKEGNQGDKSMSNWYWLYQPTSYQIGNRYLGTEQEFKEMCAAAEEYGIKVIVDAVINHTTSDVIGFFSNEVKSIPNWTHGNTQIKNWSDRWDVTQNSLLGLYDWNTQNTQVQSYLKRFLDRALNDGADGFRFDAAKHIELPDDGSYGSQFWPNITKVLREFQYGEILQDSASRDAAYANYMDVTASNYGHSIRSALKNRNLGVSNIMRYIVRVSADKLVTWVESHDTYANDDEESTWMSDDDIRLGWAVIASRSGSTPLFFSRPEGGGNGVRFPGKSQIGDRGSALFEDQAITAVNRFHNVMAGLPRRLSNPNGNNQIFMNQRGSHGVVLANAGSSSVSINTATKLPDGRYDNKAGAGSFQVNDGKLTGTINARSVAVLYPDDIAKAPHVFLENYKTGVTHSFNDQLTITMRADANTTKAVYQINNGPETAFKDGDQFTIGKGDPFGKTYTIMLKGTNSDGVTRTEKYSFVKRDPASAKTIGYQNPNHWSQVNAYIYKHDGSRVIELTGSWPGKPMTKNADGIYTLTLPADTDTTNAKVIFNNGSAQVPGQNQPGFDYVLNGLYNDSGLSGSLPH

SEQ ID NO: 705 - protein, 627 aa, Bacillus subtilis
  strain 168
ETANKSNELTAPSIKSGTILHAWNWSFNTLKHNMKDIHDAGYTAIQTSPINQVKEGNQGDKSMSNWYWLYQPTSYQIGNRYLGTEQEFKEMCAAAEEYGIKVIVDAVINHTTSDVLGVVSNEVKSIPNWTHGNTQIKNWSDRWDVTQNSLLGLYDWNTQNTQVQSYLKRFLDRALNDGADGFRFDAAKHIELPDDGSYGSQFWPNITTVVMEFQYGEILQDSASRDAAYANYMDVTASNYGHSIRSALKNRNLGVSNILRYVVRVSADKLVTWVESHDTYANDDEESTWMSDDDIRLGWAVIASRSGSTPLFFSRPEGGGNGVRFPGKSQIGDRGSALFEDQAITAVNRFHNVMAGVPTKLSNPNGNNQIFMNQRGSHGVVLANAGSSSVSINTATKLPDGRYDNKAGAGSFQVNDGKLTGTINARSVAVLYPDDIAKAPHVFLENYKTGVTHSFNDQLTITMRADANTTKAVYQINNGPETAFKDGDQFTIGKGDPFGKTYTIMLKGTNSDGVTRTEKYSFVKRDPASAKTIGYQNPNHWSQVNAYIYKHDGSRVIELTGSWPGKPMTKNADGIYTLTLPADTDTTNAKVIFNNGSAQVPGQNQPGFDYVLNGLYNDSGLSGSLPH

SEQ ID NO: 706 - protein, 591 aa, Bacillus subtilis
  strain 168
IHDAGYTAIQTSPINQVKEGNQGDKSMSNWYWLYQPTSYQIGNRYLGTEQEFKEMCAAAEEYGIKVIVDAVINHTTSDMVGVMSNEVKSIPNWTHGNTQIKNWSDRWDVTQNSLLGLYDWNTQNTQVQSYLKRFLDRALNDGADGFRFDAAKHIELPDDGSYGSQFWPNITNTSAEFQYGEILQDSASRDAAYANYMDVTASNYGHSIRSALKNRNLGVSNISHYAFDVSADKLVTWVESHDTYANDDEESTWMSDDDIRLGWAVIASRSGSTPLFFSRPEGGGNGVRFPGKSQIGDRGSALFEDQAITAVNRFHNVMAGQPVELSNPNGNNQIFMNQRGSHGVVLANAGSSSVSINTATKLPDGRYDNKAGAGSFQVNDGKLTGTINARSVAVLYPDDIAKAPHVFLENYKTGVTHSFNDQLTITMRADANTTKAVYQINNGPETAFKDGDQFTIGKGDPFGKTYTIMLKGTNSDGVTRTEKYSFVKRDPASAKTIGYQNPNHWSQVNAYIYKHDGSRVIELTGSWPGKPMTKNADGIYTLTLPADTDTTNAKVIFNNGSAQVPGQNQPGFDYVLNGLYNDSGLSGSLPH

SEQ ID NO: 707 - protein, 591 aa, Bacillus subtilis; identical to SEQ ID NO: 706
  strain 168

SEQ ID NO: 708 - protein, 591 aa, Bacillus subtilis; identical to SEQ ID NO: 706
  strain 168

SEQ ID NO: 709 - protein, 591 aa, Bacillus subtilis; identical to SEQ ID NO: 706
  strain 168

SEQ ID NO: 710 - protein, 626 aa, Bacillus subtilis
  strain 168
ETANKSNELTAPSIKSGTILHAWNWSFNTLKHNMKDIHDAGYTAIQTSPINQVKEGNQGDKSMSNWYWLYQPTSYQIGNRYLGTEQEFKEMCAAAEEYGIKVIVDAVINHTTSDYAAISNEVKSIPNWTHGNTQIKNWSDRWDVTQNSLLGLYDWNTQNTQVQSYLKRFLDRALNDGADGFRFAAAKHIELPDDGSYGSQFWPNITNTSAEFQYGEILQDSASRDAAYANYMDVTASNYGHSIRSALKNRNLGVSNISHYASDVSADKLVTWVESHDTYANDDEESTWMSDDDIRLGWAVIASRSGSTPLFFSRPEGGGNGVRFPGKSQIGDRGSALFEDQAITAVNRFHNVMAGQPEELSNPNGNNQIFMNQRGSHGVVLANAGSSSVSINTATKLPDGRYDNKAGAGSFQVNDGKLTGTINARSVAVLYPDDIAKAPHVFLENYKTGVTHSFNDQLTITLRADANTTKAVYQINNGPETAFKDGDQFTIGKGDPFGKTYTIMLKGTNSDGVTRTEKYSFVKRDPASAKTIGYQNPNHWSQVNAYIYKHDGSRVIELTGSWPGKPMTKNADGIYTLTLPADTDTTNAKVIFNNGSAQVPGQNQPGFDYVLNGLYNDSGLSGSLPH

SEQ ID NO: 711 - protein, 626 aa, Bacillus subtilis
  strain 168
ETANKSNELTAPSIKSGTILHAWNWSFNTLKHNMKDIHDAGYTAIQTSPINQVKEGNQGDKSMSNWYWLYQPTSYQIGNRYLGTEQEFKEMCAAAEEYGIKVIVDAVINHTTSDYAAISNEVKSIPNWTHGNTQIKNWSDRWDVTQNSLLGLYDWNTQNTQVQSYLKRFLDRALNDGADGFRFDAAKHIELPDDGSYGSQFWPNITNTSAEFQYGHILQDSASRDAAYANYMDVTASNYGHSIRSALKNRNLGVSNISHYASDVSADKLVTWVESHDTYANDDEESTWMSDDDIRLGWAVIASRSGSTPLFFSRPEGGGNGVRFPGKSQIGDRGSALFEDQAITAVNRFHNVMAGQPEELSNPNGNNQIFMNQRGSHGVVLANAGSSSVSINTATKLPDGRYDNKAGAGSFQVNDGKLTGTINARSVAVLYPDDIAKAPHVFLENYKTGVTHSFNDQLTITLRADANTTKAVYQINNGPETAFKDGDQFTIGKGDPFGKTYTIMLKGTNSDGVTRTEKYSFVKRDPASAKTIGYQNPNHWSQVNAYIYKHDGSRVIELTGSWPGKPMTKNADGIYTLTLPADTDTTNAKVIFNNGSAQVPGQNQPGFDYVLNGLYNDSGLSGSLPH

SEQ ID NO: 712 - protein, 626 aa, Bacillus subtilis
  strain 168
ETANKSNELTAPSIKSGTILHAWNWSFNTLKHNMKDIHDAGYTAIQTSPINQVKEGNQGDKSMSNWYWLYQPTSYQIGNRYLGTEQEFKEMCAAAEEYGIKVIVDAVINHTTSDYAAISNEVKSIPNWTHGNTQIKNWSDRWDVTQNSLLGLYDWNTQNTQVQSYLKRFLDRALNDGADGFRFDAAKHIELPDDGSYGSQFWPNITNTSAEFQYGQILQDSASRDAAYANYMDVTASNYGHSIRSALKNRNLGVSNISHYASDVSADKLVTWVESHDTYANDDEESTWMSDDDIRLGWAVIASRSGSTPLFFSRPEGGGNGVRFPGKSQIGDRGSALFEDQAITAVNRFHNVMAGQPEELSNPNGNNQIFMNQRGSHGVVLANAGSSSVSINTATKLPDGRYDNKAGAGSFQVNDGKLTGTINARSVAVLYPDDIAKAPHVFLENYKTGVTHSFNDQLTITLRADANTTKAVYQINNGPETAFKDGDQFTIGKGDPFGKTYTIMLKGTNSDGVTRTEKYSFVKRDPASAKTIGYQNPNHWSQVNAYIYKHDGSRVIELTGSWPGKPMTKNADGIYTLTLPADTDTTNAKVIFNNGSAQVPGQNQPGFDYVLNGLYNDSGLSGSLPH

SEQ ID NO: 713 - protein, 626 aa, Bacillus subtilis
  strain 168
ETANKSNELTAPSIKSGTILHAWNWSFNTLKHNMKDIHDAGYTAIQTSPINQVKEGNQGDKSMSNWYWLYQPTSYQIGNRYLGTEQEFKEMCAAAEEYGIKVIVDAVINHTTSDYAAISNEVKSIPNWTHGNTQIKNWSDRWDVTQNSLLGLYDWNTQNTQVQSYLKRFLDRALNDGADGFRFDAAKHIELPDDGSYGSQFWPNITNTSAEFQYGPILQDSASRDAAYANYMDVTASNYGHSIRSALKNRNLGVSNISHYASDVSADKLVTWVESHDTYANDDEESTWMSDDDIRLGWAVIASRSGSTPLFFSRPEGGGNGVRFPGKSQIGDRGSALFEDQAITAVNRFHNVMAGQPEELSNPNGNNQIFMNQRGSHGVVLANAGSSSVSINTATKLPDGRYDNKAGAGSFQVNDGKLTGTINARSVAVLYPDDIAKAPHVFLENYKTGVTHSFNDQLTITLRADANTTKAVYQINNGPETAFKDGDQFTIGKGDPFGKTYTIMLKGTNSDGVTRTEKYSFVKRDPASAKTIGYQNPNHWSQVNAYIYKHDGSRVIELTGSWPGKPMTKNADGIYTLTLPADTDTTNAKVIFNNGSAQVPGQNQPGFDYVLNGLYNDSGLSGSLPH

SEQ ID NO: 714 - protein, 626 aa, Bacillus subtilis
  strain 168
ETANKSNELTAPSIKSGTILHAWNWSFNTLKHNMKDIHDAGYTAIQTSPINQVKEGNQGDKSMSNWYWLYQPTSYQIGNRYLGTEQEFKEMCAAAEEYGIKVIVDAVINHTTSDYAAISNEVKSIPNWTHGNTQIKNWSDRWDVTQNSLLGLYDWNTQNTQVQSYLKRFLDRALNDGADGFRFDAAKHIELPDDGSYGSQFWPNITNTSAEFQYGFILQDSASRDAAYANYMDVTASNYGHSIRSALKNRNLGVSNISHYASDVSADKLVTWVESHDTYANDDEESTWMSDDDIRLGWAVIASRSGSTPLFFSRPEGGGNGVRFPGKSQIGDRGSALFEDQAITAVNRFHNVMAGQPEELSNPNGNNQIFMNQRGSHGVVLANAGSSSVSINTATKLPDGRYDNKAGAGSFQVNDGKLTGTINARSVAVLYPDDIAKAPHVFLENYKTGVTHSFNDQLTITLRADANTTKAVYQINNGPETAFKDGDQFTIGKGDPFGKTYTIMLKGTNSDGVTRTEKYSFVKRDPASAKTIGYQNPNHWSQVNAYIYKHDGSRVIELTGSWPGKPMTKNADGIYTLTLPADTDTTNAKVIFNNGSAQVPGQNQPGFDYVLNGLYNDSGLSGSLPH

SEQ ID NO: 715 - protein, 626 aa, Bacillus subtilis
  strain 168
ETANKSNELTAPSIKSGTILHAWNWSFNTLKHNMKDIHDAGYTAIQTSPINQVKEGNQGDKSMSNWYWLYQPTSYQIGNRYLGTEQEFKEMCAAAEEYGIKVIVDAVINHTTSDYAAISNEVKSIPNWTHGNTQIKNWSDRWDVTQNSLLGLYDWNTQNTQVQSYLKRFLDRALNDGADGFRFDAAKHIELPDDGSYGSQFWPNITNTSAEFQYGKILQDSASRDAAYANYMDVTASNYGHSIRSALKNRNLGVSNISHYASDVSADKLVTWVESHDTYANDDEESTWMSDDDIRLGWAVIASRSGSTPLFFSRPEGGGNGVRFPGKSQIGDRGSALFEDQAITAVNRFHNVMAGQPEELSNPNGNNQIFMNQRGSHGVVLANAGSSSVSINTATKLPDGRYDNKAGAGSFQVNDGKLTGTINARSVAVLYPDDIAKAPHVFLENYKTGVTHSFNDQLTITLRADANTTKAVYQINNGPETAFKDGDQFTIGKGDPFGKTYTIMLKGTNSDGVTRTEKYSFVKRDPASAKTIGYQNPNHWSQVNAYIYKHDGSRVIELTGSWPGKPMTKNADGIYTLTLPADTDTTNAKVIFNNGSAQVPGQNQPGFDYVLNGLYNDSGLSGSLPH

SEQ ID NO: 716 - protein, 202 aa, Saccharomyces cerevisiae
  strain FostersB
MSSSESIRMVLIGPPGAGKGTQAPNLQERFHAAHLATGDMLRSQIAKGTQLGLEAKKIMDQGGLVSDDIMVNMIKDELTNNPACKNGFILDGFPRTIPQAEKLDQMLKEQGTPLEKAIELKVDDELLVARITGRLIHPASGRSYHKIFNPPKEDMKDDVTGEALVQRSDDNADALKKRLAAYHAQTEPIVDFYKKDRYLGWC

SEQ ID NO: 717 - protein, 2889 aa, Bos taurus
MSCNGGSHPRINTLGRMTRAESGPDLRYEMTCGGVGGGGGGGGGGGTSRMYYSRRCTVTDQNSDGYGQTGTMSRHQNQNTIQELLQNCSDCLMRAELIVQPELKYGDGIQLARSRELDECFAQANDQMEITDSLIREMRQMGQPCDAYQKRLLQLQEQMRALYKAISGPRVRRASSKGGGGYTCQSGSGWDEFTKRLTSECLGWMRQQRAEMDMMTWGVDLASVEQHISSHRSIHNTIGDYRWQLDKIKADLREKSAIYQLEEEYENLLKASFERMDHLRQLQNIIQATSREIMWINDCEEEELLYDWSDRNTNIAQKQEAFSIRMSQLEVKEKELNKLKQESDQLVLNQHPASDKIEAYMDTLQTQWSWILQITKCIDVHLKENAAYFQFFEEAQSTEAYLKGLQDSIRKKYPCDKNTPLQRLLEQIKELEKEREKILEYKRQVQSLVNKSKKIVQLKPRNPDYRSNKPIILRALCDYKQDQKIVHKGDECILKDNNERSKWYVTGPGGVDMLVPSVGLIIPPPNPLAVDLSSKIEQYYEAILALWNQLYINMKSLVSWHYCMIDIEKIKAMTIAKLKTMRQEDYMKTISDLELHYQEFIRNSQGSEMFGDDDKRKMQTQFTDAQKHYQTLVIQLPGHPQHQTVTTTEITHLGTCQDVNHNKVIETNRENDKQEAWMLIELQKIRRQMELCESRMALKNILLADQGSSHHITVKINELKSVQNDAQAIAQVLNQLKDMLANFRGSEKYCYLQNEVFGLFQKLENINGVTDGYLNSLCAVRALLQAILQTEDMLKVYEARLTEEETVCLDLDKVEAYRCGLKKIKNDLNLKKSLLATMKTELQKAQQIHSQTSQQYPLYDLDLGKFSEKVTQLTDRWQRIDKQIDYRLWDLEKQIKQLRNYRDNYQTFCKWLYDAKRRQDSLESMKFGDSNTVMRFLNEQKNLHSEISGKRDKSEEVQKIAELCANSIKDYELQLASYTSGLETLLSIPIKRTVIQSPSGVILQEAADMHARYIELLTRSGDYYRFLSEMLKSLEDLKLKNTKIEVLEEELRLARDANSENCNKNKFLDQNLQKYQAECSQFKAKLVSLEELKRQAELDGKSAKQNLDKCYGQIKELNEKITRLTYEIEDEKRRRKAVEDRFDQQKSDYDQLQKARQNEKESLGWQKMESEKAIKEKEFEIERLRVLLQEEGARKREYENELAKVRNHYNEEMSNLRNKYETEINITKTTIKEISMQKEDDSKNLRNQLDRLSRENRDLKEEIVRLNDSILQTTEQRRRAEEDALQQKACGSEVLQKKQYLEIELKQVIQQRSEDNARHKQSLEEAAKTIQDKNKEIERLKTEFQEEAKRRWEYENELAKVRANYDEEIISLKNQFETEINITKTTIHQLTLQKEEDTSGYRAQIDTLTRENRSLSEEVKRLKNTLAQNTETLRRVEENVQQQKATGLEMSQRKQQLEVELRQVTQMRTEESARYKQSLDDAAKTIQDKNKEIDRLKQLIETEASQRKCLEDENARLQRAQGELQKAHSSATETISKLKVQEQELLRLRLDYERVSQERTVRDQDIARFQTSLKELQLQKQKAEEELARLKRAASEDSSKRKKLEEELEGMRRTLKEQAIKVTSLTQQLEQASIVKKRSEDELRQQRDTLDGHLREKQRTQDELRRLASEVEALRRQLLQEQESVRQAQTRNEHFQKAIEDKSRSLNESKIEIERLQSLTESLTKEHLMLEEELRQLRLEYDDLQRGRSEADHDKNATIAELRNQLQISNNRTLELQGLINDLQRERENLRQEIERFQKQALEASNRIQESKNQCTQVVQERESLLVKIKVLEQDKARLQRLEEELSRAKTTLEAESRLKQRLECEKQQIQNDLNQWKTQYSRKEEAIRKIESEREKSEREKNSLRSEIERLQAEIKRIEERCRRKLEDSSRETQSQLETERCRLQREIDRLKQRPYGSHRETQTEYEWSVDSSKLVFDGLRKKVTAMQLYECQLIDKATLDKLLKGKKSVEEVASEIQPFLRGAGAIAGASASPKEKYSLVEAKRKKLITPESTVMLLEAQAATGGIIDPHRNEKLTVDSAIARDLIDFDDRQQIYTAEKAITGFDDPFSGKTVSVSEAIKKNLIDRETGMRLLEAQIASGGVVDPVNSVFLPKDVALARGLIDRDLYRSLNDPRDSQKNFVDPVTKKKVSYMQLRERCRIEPHTGLLLLSVQKRSMSFQGIRQPVTVSELVDSGILRPSTVNELESGQISYDEVGERIKDFLQGSSCIAGIYNETTKQKLGIYEAMKIGLVRPGTALELLEAQAATGFIVDPVSNLRLPVEEAYKRGLVGIEFKEKLLSAERAVTGYNDPETGNIISLFQAMNKELIEKGHGIRLLEAQIATGGIIDPKESHRLPVDIAYKRGYFNEELSEILSDPSDDTKGFFDPNTEENLTYLQLKERCIKDEETGLCLLPLKEKKKQVQTSQKNTLRKRRVVIVDPETNKEMSVQEAYKKGLIDYDTFKELCEQECEWEEITITGSDGSTRVVLVDRKTGSQYDIQDTIDKGLIDRKFFEQYRSGSLSLTQFADMISLKNGVGGGVGGIVGGGSSTGGGLSDDVFGSSRHETVSKISTISSIKNLTIRSSSLSEPLEESSPIAAIFDTENLEKISISEGIERGIVDSISGQRLLEAQACTGGIIHPTTGQKLSLQDAVSQGLIDQDMATRLKPAQKAFIGFEGVKGKKKMSAAEAVKEKWLPYEAGQRFLEFQYLTGGLVDPEVQGRISTEEAIRKGYIDGRAAQRLQDTSTYGKILTCPKTKLKISYKDAINRSMVEDVTGLRLLEAASVSSKGLPSPYNMSSAPGSRSGSRSGSRSGSRSGSRSGSRRGSFDATGNSSYSYCYSFSSSSIGH

SEQ ID NO: 718 - protein, 2748 aa, Ovis aries
FSQTGTMSRHQNQNTIQELLQNCSDCLMRAELIVQPELKYGDGIQLARSRELDECFAQANDQMEITDSLIREMRQMGQPCDAYQKRLLQLQEQMRALYKAISAPRVRRASSKGGGGYTCQSGSGWDEFTKRLTSECLGWMRQQRSEIEVMEMQIRKIISAQPILRWGQKCHHQASEICLQTDWEKSLWREKSAIYQLEEEYENLLKASFERMDHLRQLQNIIQATSREIMWINDCEEEELLYDWSDRNTNIAQKQEAFSIRMSQLEVKEKELNKLKQESDQLVLNQHPASDKIEAYMDTLQTQWSWILQITKCIDVHLKENAAYFQFFEEAQSTEAYLKGLQDSIRKKYPCDKNTPLQRLLEQIKELEREREKILEYKRQVQSLVNKSKKIVQLKPRNPDYRSNKPIILRALCDYKQDQKIVHKGDECILKDNNERSKWYVTGPGGVDMLVPSVGLIIPPPNPLAVDLSSKIEQYYEAILALWNQLYINMKSLVSWHYCMIDIEKIKAMTIAKLKTMRQEDYMKTISDLELHYQEFIRNSQGSEMFGDDDKRKMQTQFTDAQKHYQTLVIQLPGHPQHQTVTTTEITHLGTCQDVNHNKVIETNRENDKQETWMLIELQKIRRQMELCESRMALKNLLLADQGSSHHITVKINELKESVDQPSAGKASLMKDRKGQLSPNFRGSEKYCYLQNEVFGLFQKLENINGVTDGYLNSLCAVRALLQAILQTEDMLKVYEARLTEEETVCLDLDKVEAYRCGLKKIKNDLNLKKSLLATMKTELQKAQQIHSQTSQQYPLYDLDLGKFSEKVTQLTDRWQRIDKQIDYRLWDLEKQIKQLRNYRDNYQAFCKWLYDAKRRQDSLESMKFGDSNTVMRFLNEQKNLHSEISGKRDKSEEVQKIAELCANSIKDYELQLASYTSGLETLLSIPIKRTVIQSPSGVILQEAADMHARYIELLTRSGDYYRFLSEMLKSLEDLKLKNTKIEVLEEELRLARDANSENCNKNKFLDQNLQKYQAECSQFKAKLVSLEELKRQAELDGKSAKQNLDKCYGQIKDLNEKITRLTYEIEDEKRRRKAVEDRFDQQKSDYDQLQKARQNEKESLGWQKMESEKAIKEKEFEIERLRVLLQEEGARKREYESELAKVRNHYNEEMSNLRNKYETEINITKTTIKEISMQKEDDSKNLRNQLDRLSRENRDLKEEIVRLNDSILQTTEQRRRAEEDALQQKACGSEMLQKKQHLEIELKQVIQQRSEDNARHKQSLEEAAKTIQDKNKEIERLKAEFQEEAKRRWEYENELAKVRANYDEEIISLKNQFETEINITKTTIHQLTLQKEEDTSGYRAQIDTLTRENRSLSEEVKRLKNTLAQTTETLRRVEENVQQQKTTGLEMSQRKQQLEIELRQVTQMRTEESARYKQSLDDAAKTIQDKNKEIDRLKQLIETEASQRKCLEDENARLQRAQGELQKAHSSATETISKLKVQEQELLRLRLDYERVSQERTVRDQDIARFQTSLKELQLQKQKAEEELARLKRAASEDSSKRKKLEEELEGLRRTLKEQAIKVTSLTQQLEQASIVKKRSEDELRQQRDVLDGHLREKQRTQDELRRLASEAEALRRQLLQEQESVRQAQARNEHFQKAIEDKSRSLNESKIEIERLQSLTESLTKEHLMLEEELRQLRLEYDDLRRGRSEADHDKNATIAELRSQLQISNNRTLELQGLINDLQRERENLRQEIERFQKQALEASNRIQESKNQCTQVVQERESLLVKIKVLEQDKARLQRLEEELSRAKTALEAESRVKQRLECEKQQIQNDLNQWKTQYSRKEEAIRKIESEREKSEREKNSLRSEIERLQAEIKRIEERCRRKLEDSSRETQSQLETERCRLQREIDRLKQRPYGSHRETQTEYEWSVDSSKLVFDGLRKKVTAVQLHECQLIDKATLDKLLKGKKSVEEVASELQPFLRGAGAIAGASASPKEKYSLVEAKRKKLITPESTVMLLEAQAATGGIIDPHRNEKLTVDNAIARDLIDFDDRQQIYTAEKAVTGFDDPFSGKTVSVSEAIKKNLIDRETGMRLLEAQIASGGVVDPVNSVFLPKDVALARGLIDRDLYRSLNDPRDSQKNFVDPVTKKKVSYMQLRERCRIEPHTGLLLLSVQKRSMSFQGIRQPVTVSELVDSGILRPSTVNELESGQISYDEVGERIKDFLQGSSCIAGIYNETTKQKLGIYEAMKIGLVRPGTALELLEAQAATGFIVDPVSNLRLPVEEAYKRGLVGIEFKEKLLSAERAVTGYNDPETGNIISLFQAMNKELIEKGHGIRLLEAQIATGGIIDPKESHRLPVDIAYKRGYFNEELSEILSDPSDDTKGFFDPNTEENLTYLQLKERCIKDEETGLCLLPLKEKKKQVQTSQKNTLRKRRVVIVDPETNKEMSVQEAYKKGLIDYDTFKELCEQECEWEEITITGSDGSTRVVLVDRKTGSQYDIQDTIDKGLIDRKFFEQYRSGSLSLTQFADMISLKNGVGSGVGGGMGGGVGGSSSTGGGLSDDVFGGSRHETVSKISTISSIRNLTIRSSSLSEPLEESSPIAAIFDTENLEKISISEGIERGIVDSISGQRLLEAQACTGGIIHPTTGQKLSLQDAVSQGLIDQDMATRLKPAQKAFIGFEGVKGKKKMSAAEAVKEKWLPYEAGQRFLEFQYLTGGLVDPEVQGRISMEEAIRKGYIDGRAAQRLQDTSTYGKILTCPKTKLKISYKDA

SEQ ID NO: 719 - protein, 2677 aa, Sus scrofa
MRQQRVEMDTVAWGVDMASVEQHINSHRSLHNAIGDYRWQLDKIKADLREKSAIYQLEEEYENLLKASFERMDHLRQLQSIIQAASREIMWINDCEEEELLYDWSDRNTNIAQKQEAFSIRMSQLEVKEKELNKLKQESDQLVLSQHPASDKIEAYMDTLQTQWSWILQITKCIDVHLKENAAYFQFFEEAQSTEAYLKGLQDSIRKKYPCDKNTPLQRLLEQIKELEKEREKILEYKRQVQNLVNKSKKIVQLKPRNPDYRSNKPIILRALCDYKQDQKIIHKGDECILKDNNERSKWYVTGPGGVDMLVPSVGLIIPPPNPLAVDLSSKIEQYYEAILALWNQLYINMKSLVSWHYCMIDIEKIRAMTIAKLKTMRQEDYMKTISDLELHYQEFIRNSQGSEMFGDDDKRKMQTQFTDAQKHYQTLVIQLPGHPQHQTVTTTEITHVGSCQDVNHHQVIELNRETDKQETWILMELQKVRRQMEHCEGRMTLKNILLADQGSSHHITVKINELKSIQNDSQAIAEVLNQLKDMLANFRGSEKYCYLQNEIFGLFQKLENINGVTDGYLNSLCTVRSLLQAILQTEDMLKVYEARLTEEETVCLDLDKVEAYRCGLKKIKNDLNLKKSLLATMKTELQKAQQIHSQTSQQYPLYDLDLGKFSEKVTQLTDRWQRIDKQIDYRLWDLEKQIKQLRNYRDNYQAFCKWLYDAKRRQDNLESMKFGDSSTVLRFLNEQKNLHSEISGKRDKSEEVQKIAELCANSIKDYELQLASYSSGLETLLNIPIKRTMVQSPSGVILQEAADIHARYIELLTRSGDYYRFLSEMLKSLEDLKLKNTKIEVLEEELRLARDANSENCNKNKFLDQNLQKYQAECSQFKAKLVSLEELKRQAELDGKAAKQNLDKCYGQIKELNEKITRLTYEIEDEKRRRKAVEDRFDQQKNDYDQLQKARQCEKESLGWQKIESEKAIQEKEYEIERLRVLLQEEGARKREYENELAKVRNHYNEEMSNLRNKYETEINVTKTTIKELSLQREDDAKSLRGQLDRLSRENRDLKDEIVRLNDSLLQTTEQRRRAQEDALQQKACGSEMLQKKQQLEVELKQVIQQRSEDNARHKQSLEEAARTIQDKNKEIERLKAEFQEEAKRRREYESELAKVRSSYDEEIISLKNQFETEINITKTTIHQLTLQKEEDTSGYRAQIDGLTRENRSLSEEVKRLKNSLAQTTESLRRVEENVQQQKATGEMSQRKQQLEVELRQVTQMRMEESARYKQSLEEAAKTIRAKQGLRVKAAGGDGTQGAQCLEEENAQLQRAHGDLQKAHGSATETISKLKVQEQELLRLRMDYERVSQERAARDQDIARFQSSLKELQVQKQKAEEELARLKRAASEDSSKRKKLEEELEAMRRSLKEQAVKVTSLTQQLEQASISKKRSEDELRQQRDVLEGQLREKQRTQDELRRLASEVEALRRQLLQEQENLKQAHMRSEHFQKAIEDKSRSLNESKIEIERLQSLTENLTKEHLMLEEELRNLRLEYDDFRRGHSEVDHGKNATISELRSQLQISNNRTLELQGLINDLQRERENLRQEIEKFQKQALEASNRIQESKSQCTQVVQERESLLVKIKVLEQDKARLQRLEEELNRAKATLEAESRLKQRLECEKQQIQNDLNQWKTQYSRKEEAIRKIESEREKSEREKNTLRSEIERLQAEIRRIEERCRRKLEDSSRETQSQLETERCRLQREIDKLKQRPYGSHRETQTECEWAVDSSKLVFDGLRKKVTAMQLFECQLIDKTTLDKLLKGKKSVEEVASEIQPFLRGAGAIAGASASPKDKYSLVEAKRKKLITPESTVMLLEAQAATGGIIDPHRNEKLTVDSAIARDLIDFDDRQQIYTAEKAVTGFDDPFSGKTVSVSEAIKKNLIDRETGLRLLEAQIASGGVVDPVNSVFLPKDVALARGLIDRDLYRSLNDPRDGQKNFVDPVTKKKVSYMQLRERCRIEPHTGLLLLSVQKRSMSFQGIRQPVTVSELVDSGILRPSTVNELESGQISYDEVGERIKDFLQGSSCIAGIYNETTKQKLGIYEAMKIGLVRPGTALELLEAQAATGFIVDPVSNLRLPVEEAYKRGLVGIEFKEKLLSAERAVTGYNDPETGNIISLFQAMNKELIEKGHGIRLLEAQIATGGIIDPKESHRLPVDIAYKRGYFNEELSEILSDPSDDTKGFFDPNTEENLTYLQLKERCIKDEATGLCLLPLKEKKKQVQTSQKNTLRKRRVVIVDPETNKEMSVQEAYKKGLIDYETFKELCEQECEWEEITITGSDGSTRVVLVDRKTGSQYDIQDAIDKGFIDRKFFDQYRSGSLSLTQFADMISWKNGVTSTGGGGGTGGSVSDDVFSTSRHEAVSKIATIASARNLTIRSSSLSDPLEEWSPIAAIFDTENLEKISVTEGIERGIVDSITGQRLLEAQACTGGIIHPTTGQKLSLQDAVAQGVIDQDMATRLKPAQKAFIGFEGVKGKKKMSAAEAVKEKWLPYEAGQRFLEFQYLTGGLVDPEVNGRISTEEAIRKGFIDGRAAQRLQDTSSYAKILTCPKTKLKISYKDAINRSMVEDITGLRLLEAASVSSKGLPSPYNVSSAPGSRSGSRSGSRSGSRSGSRSGSRRGSFDATSNSSYSYSYSFSSSSIGH

SEQ ID NO: 720 - protein, 745 aa, Bos taurus
MEVMNLIEQPIKVTEWQQTYTYDSGIHSGANTCVPSLSSKGLIEEDEACGRQYTLKKTTTYTQSVPPGQGDLEYQMSTTARAKRVREAMCPGVTGEDSSLLLTTQVEGQTTNLQRLAEPSQLLKSAIVHLINYQDDAELATRALPELTKLLNDEDPVVVTKAAMIVNQLSKKEASRRALMGSPQLVAAVVRTMQNTSDLDTARCTTSILHNLSHHREGLLAIFKSGGIPALVRMLSSPVESVLFYAITTLHNLLLYQEGAKMAVRLADGLQKMVPLLNKNNPKFLAITTDCLQLLAYGNQESKLIILANGGPQALVQIMRNYSYEKLLWTTSRVLKVLSVCPSNKPAIVEAGGMQALGKHLTSNSPRLVQNCLWTLRNLSDVATKQEGLESVLKILVNQLSVDDVNVLTCATGTLSNLTCNNSKNKTLVTQNSGVEALIHAILRAGDKDDITEPAVCALRHLTSRHPEAEMAQNSVRLNYGIPAIVKLLNQPNQWPLVKATIGLIRNLALCPANHAPLQEAAVIPRLVQLLVKAHQDAQRHVAAGTQQPYTDGVRMEEIVEGCTGALHILARDPMNRMEIFRLNTIPLFVQLLYSSVENIQRVAAGVLCELAQDKEAADAIDAEGASAPLMELLHSRNEGTATYAAAVLFRISEDKNPDYRKRVSVELTNSLFKHDPAAWEAAQSMIPMNEPYADDMDATYRPMYSSDVPMDPLEMHMDMDGDYPIDTYSDGLRPPYATADHMLA

SEQ ID NO: 721 - protein, 599 aa, Gallus gallus
MSRISYRSSTGGGMRGFSSGSAIVGGSGGGTRSSFSSVSVSRVGGGRAGGGGGFGAGGGFGSRSLYNLGGSKRISLGGLRSGAGVGYGFGGGAGFGLGYGGGAGAALGLGGAGGGGGYGLGGFGMGGPGFGGRGGPGFPVCPPGGIHEVTVNQSLLAPLKLDIDPEIQKVRTQEREQIKTLNNKFASFIDKVRFLEQQNKVLETKWSLLQEQGHTVTRKSLEPLFETYINNLRRQLDSLMGERGRLDSELRSMQDMVEDFKNKYEDEINRRTGAENEFVVLKKDVDGAYMNKVELQAKADGLADEINFLRALYEAELSQMQQQVSDTSVVLSMDNNRSLDLNSIIAEVKAQYEDIANRSRAEAEAWYQNKYEELQVSAGRHGDDLRNTKMEISEINRMVQRLRNEIESVKKQCANLQAAIAEAEERGEMALKDAKSKLAELEDALQKAKADLARQLREYQELMNVKLALDIEIATYRKLLEGEESRLAGEGVGAVSVSVVSSSSGMGYGGGMGGGLSTGGGLCMGGGLSMGSGLGMGGGGGSYTMSSSVGGGGFGGGSGSYSYGGGSNFSSSSSRGVSSSTGGSVRIVSKTTTSKKTIR

SEQ ID NO: 722 - protein, 248 aa, Saccharomyces cerevisiae
  strain FostersB
  MOD_RES (49)..(49): Any amino acid
MQIFVKTLTGKTITLEVESSDTIDNVKSKIQDKEGIPPDQQRLIFAGKXLEDGRTLSDYNIQKESTLHLVLRLRGGMQIFVKTLTGKTITLEVESSDTIDNVKSKIQDKEGIPPDQQRLIFAGKQLEDGRTLSDYNIQKESTLHLVLRLRGGMQIFVKTLTGKTITLEVESSDTIDNVKSKIQDKEGIPPDQQRLIFAGKQLEDGRTLSDYNIQKESTLHLVLRLRGGMQIFVKTLTGKTITLEVESS

SEQ ID NO: 723 - protein, 908 aa, Saccharomyces cerevisiae
  strain FostersB
  MOD_RES (288)..(288): Any amino acid
  MOD_RES (303)..(303): Any amino acid
MNDQTQFTERALTILTLAQKLASDHQHPQLQPIHILAAFIETPEDGSVPYLQNLIEKGRYDYDLFKKVVNRNLVRIPQQQPAPAEITPSYALGKVLQDAAKIQKQQKDSFIAQDHILFALFNDSSIQQIFKEAQVDIEAIKQQALELRGNTRIDSRGADTNTPLEYLSKYAIDMTEQARQGKLDPVIGREEEIRSTIRVLARRIKSNPCLIGEPGIGKTAIIEGVAQRIIDDDVPTILQGAKLFSLDLAALTAGAKYKGDFEERFKGVLKEIEESKTLIVLFIDEIHXLMGNGKDDAANILKXALSRGQLKVIGATTNNEYRSIVEKDGAFERRFQKIEVAEPSVRQTVAILRGLQPKYEIHHGVRILDSALVTAAQLAKRYLPYRRLPDSALDLVDISCAGVAVARDSKPEELDSKERQLQLIQVEIKALERDEDADSTTKDRLKLARQKEASLQEELEPLRQRYNEEKHGHEELTQAKKKLDELENKALDAERRYDTATAADLRYFAIPDIKKQIEKLEDQVAEEERRAGANSMIQNVVDSDTISETAARLTGIPVKKLSESENEKLIHMERDLSSEVVGQMDAIKAVSNAVRLSRSGLANPRQPASFLFLGLSGSGKTELAKKVAGFLFNDEDMMIRVDCSELSEKYAVSKLLGTTAGYVGYDEGGFLTNQLQYKPYSVLLFDEVEKAHPDVLTVMLQMLDDGRITSGQGKTIDCSNCIVIMTSNLGAEFINSQQGSKIQESTKNLVMGAVRQHFRPEFLNRISSIVIFNKLSRKAIHKIVDIRLKEIEERFEQNDKHYKLNLTQEAKDFLAKYGYSDDMGARPLNRLIQNEILNKLALRILKNEIKDKETVNVVLKKGKSRDENVPEEAEECLEVLPNHEATIGADTLGDDDNEDSMEIDDDLD

SEQ ID NO: 724 - protein, 554 aa, Saccharomyces cerevisiae
  strain FostersB
MSNNSFTNFKLATELPAWSKLQKIYESQGKTLSVKQEFQKDAKRFEKLNKTFTNYDGSKILFDYSKNLVNDEIIAALIELAKEANVTGLRDAMFKGEHINSTEDRAVYHVALRNRANKPMYVDGVNVAPEVDSVLKHMKEFSEQVRSGEWKGYTGKKITDVVNIGIGGSDLGPVMVTEALKHYAGVLDVHFVSNIDGTHIAETLKVVDPETTLFLIASKTFTTAETITNANTAKNWFLSKTGNDPSHIAKHFAALSTNETEVAKFGIDTKNMFGFESWVGGRYSVWSAIGLSVALYIGYDNFEAFLKGAEAVDNHFTQTPLEDNIPLLGGLLSVWYNNFFGAQTHLVAPFDQYLHRFPAYLQQLSMESNGKSVTRGNVFTDYSTGSILFGEPATNAQHSFFQLVHQGTKLIPSDFILAAQSHNPIENKLHQKMLASNFFAQAEALMVGKDEEQVKAEGATGGLVPHKVFSGNRPTTSILAQKITPATLGALIAYYEHVTFTEGAIWNINSFDQWGVELGKVLAKVIGKELDNSSTISTHDASTNGLINQFKEWM

SEQ ID NO: 725 - protein, 727 aa, Bos taurus
MNHSPLKTALAYECFQDQDNSTLALPSDQKMKTGTSGRQRVQEQVMMTVKRQKSKSSQSSTLSHSNRGSMYDGLADSYNNYGTSSRSSFYSKFQAGSGSWGYPIYNGTLKREADNRRFSSYSQMESWGRQYPRGGCTAAGAGSDICFMQKIKASRSEPDLYCDPRGTLRKGTLGGKGHKTTQNRYSFYSTCSGQKAVKKYPGRPPSCTSRQDPVCVPPTSCTKDLSFSHSRASSKICSEDIECSGLTIPKAVQYLSSQDEKCQAIGAYYIQHTCFQDESAKQQVYQLGGICKLVDLLRSPNQNVQQAAAGALRNLVFRSTTNKLETRRQNGIREAVSLLRRTGSTEIQKQLTGLLWNLSSTDELKEELIAEALPVLADRVIIPFSGWCDGNSNLSREPVDPEVFFNATGCLRNLSSADVGRQTMRNYTGLIDSLMAYVQNCVAANRCDDKSVENCMCVLHNLSYRLDAEVPTRYRQLEYNARNAYTDKSSTGCFSNKSDRMTNNNYDCPLPEEEPNPKGSSWLYHSDAVRTYLNLMGKSKKDATLEACAGALQNLTASKGLMSSGMSQLIGLKEKGLPHIARLLQSGNSDVVRSGASLLSNMSRHPALHRVMGTQVFPEVTRLLTSHTGNTSNSEDILASACYTVRNLMASLPGMAKQHFSSSMVNNIINLCRSSTSPKAAEAARLLLSDMWSSRELQGLLRQQGFDRSMLGTLAGANSLRNFTSRF

SEQ ID NO: 726 - protein, 376 aa, Gallus gallus
MADEEIAALVVDNGSGMCKAGFAGDDAPRAVFPSIVGRPRHQGVMVGMGQKDSYVGDEAQSKRGILTLKYPIEHGIVTNWDDMEKIWHHTFYNELRVAPEEHPVLLTEAPLNPKANREKMTQIMFETFNTPAMYVAIQAVLSLYASGRTTGIVMDSGDGVTHTVPIYEGYALPHAILRLDLAGRDLTDYLMKILTERGYSFTTTAEREIVRDIKEKLCYVALDFEQEMATAASSSSLEKSYELPDGQVITIGNERFRCPEAIFQPSFLGMESCGIHETTFNSIMKCDVDIRKDLYANTVLSGGTTMYPGIADRMQKEITALAPSTMKIKIIAPPERKYSVWIGGSILASLSTFQQMWISKQEYDESGPSIVHRKCF

SEQ ID NO: 727 - protein, 339 aa, Ovis aries
MSTVHEILCKLSLEGDHSTPPSAYGSVKAYTNFDAERDALNIETAIKTKGVDEVTIVNILTNRSNEQRQDIAFAYQRRTKKELASALKSALSGHLETVILGLLKTPAQYDASELKASMKGLGTDEDSLIEIICSRTNQELQEINRVYKEMYKTDLEKDIVSDTSGDFRKLMVALAKGRRAEDGSVIDYELIDQDARDLYDAGVKRKGTDVPKWISIMTERSVCHLQKVFERYKSYSPYDMLESIKKEVKGDLENAFLNLVQCIQNKPLYFADRLYDSMKGKGTRDKVLIRIMVSRSEVDMLKIRSEFKKKYGKSLYYYIQQDTKGDYQKALLYLCGGDD

SEQ ID NO: 728 - protein, 197 aa, Sus scrofa
MSSGNAKIGHRAPHFKATAVMPDGQFKDISLSDYKGKYVVFFFYPLDFTFVCPTEIIAFSERAEEFKKLNCQVIGASVDLTSVIWINTPKKQGGLGPMNIPLISDPKRTIAQDYGVLKADEGISFRGLFIIDDKGILRQITINDLPVGRSVDETLRLVQAFQFTDKHGEVCPAGWKPGSDTIKPDVQKSKEYFSKQK

SEQ ID NO: 729 - protein, 657 aa, Saccharomyces cerevisiae
  strain FostersB
  MOD_RES (340)..(340): Any amino acid
  MOD_RES (437)..(437): Any amino acid
  MOD_RES (462)..(462): Any amino acid
  MOD_RES (481)..(481): Any amino acid
  MOD_RES (488)..(488): Any amino acid
  MOD_RES (490)..(490): Any amino acid
  MOD_RES (495)..(495): Any amino acid
  MOD_RES (497)..(497): Any amino acid
  MOD_RES (509)..(511): Any amino acid
  MOD_RES (523)..(523): Any amino acid
  MOD_RES (551)..(551): Any amino acid
  MOD_RES (640)..(640): Any amino acid
MSSVDVLLTVGKLDASLALLTTQDHHVIEFPTVLLPENVKAGSIIKMQVSQNLEEEKKQRNHFKSIQAKILEKYGTHKPESPVLKIVNVTQTSCVLAWDPLKLGSAKLKSLILYRKGIRSMVIPNPFKVTTTKISGLSVDTPYEFQLKLITTSGTLWSEKVILRTHKMTDMSGITVCLGPLDPLKEISDLQISQCLSHIGARPLQRHVAIDTTHFVCNDLDNEESNEELIRAKHNNIPIVRPEWVRACEVEKRIVGVRGFYLDADQSILKNYTFPPVNEEELSYSKENEPVAEVADENKMPEDTTDVEQVASHNDNEGNPSEAKEQGEKSGHEAAPVSPXEDPLHASTALENETTIETVNPSVRSLKSEPVGTPNIEENKADSSAEAVVEEPNEAVAESSPNEEATGQKSEDTDTHSNEQADNGFVQTEEVAENNIXTESARENNEPADDAAMEFGRPEAEXETPEVNESIEDANEPVEDXNEPVEDXNXPVEDXNXPVEDSNKPVEDXXXPVEDTSEPAKNXGEPVQETNEFTTDIASPRHQEEDIELEXEPKDATESVAVEPSNEDVKPEEKGSEAEDDINNVSKEAASGESTTHQKTEASASLESSAVTEEQETTEAEVNTDDVLSTKEAKKNSGNXNSNKKKNKKNKKKGKKK

SEQ ID NO: 730 - protein, 700 aa, Saccharomyces cerevisiae
  strain FostersB
  MOD_RES (451)..(451): Any amino acid
  MOD_RES (695)..(695): Any amino acid
MVAQYTVPVGKAANEHETAPRRNYQCREKPLVRPPNTKCSTVYEFVLECFQKNKNSNAMGWRDVKEIHEESKSVMKKVDGKETSVEKKWMYYELSHYHYNSFDQLTDIMHEIGRGLVKIGLKPNDDDKLHLYAATSHKWMKMFLGAQSQGIPVVTAYDTLGEKGLIHSLVQTGSKAIFTDNSLLPSLIKPVQAAQDVKYIIHFDSISSEDRRQSGKIYQSAHDAINRIKEVRPDIKTFSFDDILKLGKESCNEIDVHPPGKDDLCCIMYTSGSTGEPKGVVLKHSNVVAGVGGASLNVLKFVGNTDRVICFLPLAHIFELVFELLSFYWGACIGYATVKTLTSSSVRNCQGDLQEFKPTIMVGVAAVWETVRKGILNQIDNLPFLTKKIFWTAYNTKLNMQRLHIPGGGALGNLVFKKIRTATGGQLRYLLNGGSPISRDAQEFITNLICXMLIGYGLTETCASTTILDPANFELGVAGDLTGCVTVKLVDVEELDYFAKNNQGEVWITGANVTPEYYKNEEETSQALTSDGWFKTGDIGEWEANGHLKIIDRKKNLVKTMNGEYIALEKLESVYRSNEYVANICVYADQSKTKPVGIIVPNHAPLTKLAKKLGIMEQKDSSINIENYLEDAKLIKAVYSDLLKTGKDQGLVGIELLAGIVFFDGEWTPQNGFVTSAQKLKRKDILNAVKDKVDXVYSSS

SEQ ID NO: 731 - protein, 441 aa, Sus scrofa
YSPGHLSSQVSLPVCPLLFSLAGSSLRINRSLQSKQHRQRPGLPGMELSYAGAGGSGSRISASRSSSVRGGSGWGAGMAGGLVGVGGIQGEKETMQDLNDRLASYLERVRSLEADNRRLEIKIREHLEKKGPQVRDWSHYLKTIEELRAQIFASSVDNARIVLQIDNARLAADDFRVKYETELAMRQSVESDIHGLRKVIDDTNVTRLQLETEIEALKEELLFMKKNHEEEVKGLQNQIANSGLTVELDAPKPQDLSKIMADIRAQYDELAQKNREELDKYWSQQIEESTSVVTSQSAEIGAAEMTLTELRRTVQSLEIDLDSMRNLKATLENSLREVEARYALQMEQLNGVLLHLESELAQTRAEGQRQTQEYEALLNIKVKLEAEINTYRRLLEDGEDFNLGDALDSSNSRQTIQKTTTLRLVDGKVVSETSDTKVLRH

SEQ ID NO: 732 - protein, 1043 aa, Bos taurus
MNWPFFRAAVVLFIFLVVLEVNSDFRIQVRDYNTKNGTIKWHSLRRQKREWIKFAAACREGEDNSKRNPIAKIHSDCAANQQVTYRISGVGIDQPPYGIFVINQKTGEINITSIVDREVTPFFIIYCRALNSLGQDLEKPLELRVRVLDINDNPPVFSMSTFVGEIEENSNANTLVMVLNATDADEPNNLNSKIAFKIIRQEPSDSPMFIINRYTGEIRTMNNFLDREQYGQYSLAVRGSDRDGGADGMSAECECNIKILDVNDNIPYMELPTQSISIEENSLNSNLLQIRVIDLDEEFSANWMAVIFFISGNEGNWFEIEMNERTNVGTLKVVKPLDFEAMNNLQLSLGVRNKAEFHQSIMSQYKLTATAISVTVLNVVEGSVFRPGSKTFVVNSNMGQNYKIGEYVAWDLDANRPSTTVRYVMGRNPTDLLAIDSKTAIITLRNKVTMEQYKILGGKYQGTILSIDDALQRTCTGTIVINLENGGWKTERPNVNGSTTSAYGLTSGGVTTNGYTTGGGVGTVTFAVGTNGYGVGTGVYQPLRDNVHFGPAGIGLLIMGFLVLGLVPFLLMCCDCGGAPGGGAAFEPVPECSDGAIHSWAVEGAQADPGVLANSAVPCIPVTNANVIEYVDNSGVYTNEYGAREMQDLGGGERTTGFELTDGVKMSGGPEICQEYPGTLRRNSMRECREGGLNMNFMESYFCQKAYAYADEDEGRPSNDCLLIYDIEGAGSPAGSVGCCSFIGEDLDDSFLDTLGPKFKKLADISLGKDVEPFPDSDPSWPPKSTEPVCPPQGTEPTGGGHPPISPRFGTTTVISENTYPSGPGVQHPTPIPDPLGYGNVTVTESYTSSGTLKPSVHIHDNRHASNVVVTERVVGPISGADLQGMLEMPDLRDGSNVIVTERVIAPSSSLPTTLTIPDPRQSSNVVVTERVIQPTSGIVGNLSMHPELSNTHNVIVTERVVSGSGITGSSSLLGSAGGGSGGGIGLGSLGGGGGLSSSLGGAATIGHLRGSAEHHFSNTLGSASPTTTRSRITKYSTVQYTK

SEQ ID NO: 733 - protein, 461 aa, Sus scrofa
MGKEKTHINIVVIGHVDSGKSTTTGHLIYKCGGIDKRTIEKFEKEAAEMGKGSFKYAWVLDKLKAERERGITIDISLWKFETSKYYITIIDAPGHRDFIKNMITGTSQADCAVLIVAAGVGEFEAGISKNGQTREHALLAFTLGVKQLIVAVNKMDSTEPAFSAARFQEITKEVSNYIKKIGYNPASVAFVPISGWHGDNMLEPSTNMPWFKGWKVERKEGNATGVTLLEALDSILPPTRPVNKPLRLPLQDVYKIGGIGTVPVGRVETGFLKAGMVVTFAPNNVTTEVKSVEMHHEALAEALPGDNVGFNVKNVSVKDIRRGNVAGDSKNDPPMEASSFVAQVIVLNHPGQIHAGYSPVLDCHTAHISCKFAELREKMDRRSGKKLEDNPKALKSGDAAMVQMVPSKAMCVETFSQYPPLGRFAVRDMRQTVAVGVIKAVEKKTATTAKVTKAAVKASKK

SEQ ID NO: 734 - protein, 360 aa, Saccharomyces cerevisiae
  strain FostersB
MRTLLEKEKSEFQTEKKALQEATVDQVTTLETKLEQLRIELDSSTQNLDAKSNRDFVDDQQSYEEKQHASFQYNRLKEQLESSKANWDSIEYALNTKIVNLENRFESIMKEKNDIEEKYQTALRSSETLGKQLEKEKENHSKAVLEVKDLERRVETLKSSLQSISDDYNLLKKKYEIQRSQLEQKENELKPHQENSNEKIIDKIPVELTDSLNSMEGNIEDEWTLPQENSMLSLSMSKLGELGSDPSLKPIYNESHETICSEESQHFDRKNVDFSIDDIPEEAAALQAIREGESMKSLNNTSIPYRRASVQLSNSNGHISAHLVNKLSTELKRLEGELSASKELYDNLLKEKTKANDEIS

SEQ ID NO: 735 - protein, 968 aa, Saccharomyces cerevisiae
  strain FostersB
  MOD_RES (368)..(368): Any amino acid
  MOD_RES (444)..(444): Any amino acid
  MOD_RES (948)..(948): Any amino acid
MSRIDSDLQKALKKACSVEETAPKRKHVRACIVYTWDHQSSKAVFTTLKTLPLANDEVQLFKMLIVLHKIIQEGHPSALAEAIRDRDWIRSLGRVHSGGSSYSKLIREYVRYLVLKLDFHAHHRGFNNGTFEYEEYVSLVSVSDPDEGYETILDLMSLQDSLDEFSQIIFASIQSERRNTECKISALIPLIAESYGIYKFITSMLRAMHRQLNDAEGDAALQPLKERYELQHARLFEFYADCSSVKYLTTLVTIPKLPVDAPDVFLINDVDESKEIKFKKREPSVTPARTPARTPTPTPPVVAEPAISPRPVSQRTTSTPTGYLQTMPTGATTGMMIPTATGAANAIFPQATAQMQPDFWANQQAQFXNEQNRLEQERVQQLQQQQAQQELFQQQLQKAQQDMMNMQLQQQNQHQNDLIALTNQYEKDQALLQQYDQRVQQLEXEITTMDSTASKQLANKDEQLTALQDQLDVWERKYESLAKLYSQLRQEHLNLLPRFKKLQLKVNSAQESIQKKEQLEHKLKQKDLQMAELVKDRDRARLELERSINNAEADSAAATAAAETMTQDKMNPILDAILESGINTIQESVYNLDSPLSWSGPLTPPTFLLSLLESTSENATEFATSFNNLIVDGLAHGDQTEVIHCVSDFSTSMATLVTNSKAYAVTTLPQEQSDQILTLVKRCAREAQYFFEDLMSENLNQVGDEEKTDIVINANVDMQEKLQELSLAIEPLLNIQSVKSNKETNPHSELVATADKIVKSSEHLRVDVPKPLLSLALMIIDAVVALVKAAIQCQNEIATTTSIPLNQFYLKNSRWTEGLISAAKAVAGATNVLITTASKLITSEDNENTSPEQFIVASKEVAASTIQLVAASRVKTSIHSKAQDKLEHCSKDVTDACRSLGNHVMGMIEDDHSTSQQQQPLDFTSEHTLKTAEMEQQVEILKLEQSLXNARKRLGEIRRHAYYNQDDD

SEQ ID NO: 736 - protein, 545 aa, Solanum lycopersicum
MPMDTETNQSGDFIFRSKLPDIYIPKHLPLHSYCFENLSEFSSRPCLIDGSNDRIYTYAEVELTSRKVAVGLSKLGIQQKDTIMILLPNCPEFVFAFIGASYLGAISTMANPLFTPAEVVKQAKASSAKIVITQACFAGKVKDYAIENDLKVICVDSAPEGCVHFSELIQSDEHEIPEVNIQPNDVVALPYSSGTTGLPKGVMLTHKGLVTSVAQQVDGENANLYMHSDDVLMCVLPLFHIYSLNSVLLCALRVGAAILIMQKFDIAQFLELIQKHKVTIGPFVPPIVLAIAKSPLVDNYDLSSVRTVMSGAAPLGKELEDAVRAKFPNAKLGQGYGMTEAGPVLAMCLAFAKEPFDIKSGACGTVVRNAEMKIVDPDTGCSLPRNQPGEICIRGDQIMKGYLNDPEATARTIEKEGWLHTGDIGYIDDDDELFIVDRLKELIKYKGFQVAPAELEALLVNHPNISDAAVVPMKDEQAGEVPVAFVVRSNGSTITEDEVKDFISKQVIFYKRIKRVFFVETVPKSPSGKILRKDLRARLAAGISN

SEQ ID NO: 737 - protein, 247 aa, Sus scrofa
MCDQQKQTQFPSSCVKGSGLGAGQSIKGTSVKCPPPCPTQTYVKCQVPCQTQTYVKCPTPCQTTTYVKCPPPCQTTYVKCPPPCQTTYVKCPPPCQTTYVKCPTPCQTYVKCPPPCQTTYVKCPAPCQTQTCYVQSPSPCQTYYVQAPASGSAASCSVPNPCSAPCSTSYCCLAPRTFGVSPLRRWVQRPQDCNSGSSGCCDNSGGCGSDCCGCGCGCCGSGCCCLGIIPMRSRGPACCDNEDDCCC

SEQ ID NO: 738 - protein, 459 aa, Sus scrofa
SSCLSSRSGVCKSSSCVTTQRFSCTSASGPRPGRCCITAAPYRGVSCYRGLTGGFGSRSVSGGFGAGSSGRSFGYRSGGVVRPSPPCITTVSINESLLAPLNLEIDHNAQSVKQEEKEQIKILNSRFAAFIDKVRFLEQQNKLLETKLQFFQNRKCCESNLEPLFNGYIETLRREAERVEADRGRLASELNHVHEVLEGYKKKYEEEVALRTTAENEFVRIKQEVNSLSVQKADLKANAQSLAEEVGFLKTLYEEEIRVLQAHISDTLVIVKMDNSRDLNMDSIIAEIKAHYDDIASRSRAEAESWYRTKYEEIKATVVQHGETLRRTKEEINELNRVIQRLTAEIENAKRQNSKLEAAVSQAEQQGQAALNDARYKLTELEAALQKAKQDMAFLLKEYQEVMSSKLALDIEIATYRRLLEGEEQSIRLCEGVGAVNISVSSSRGGVVCEDLSATRTCG

SEQ ID NO: 739 - protein, 531 aa, Bos taurus
MSKHHSDAGTAFIQTQQLHAAMADTFLEHMCRLDIDSPPITARNTGIICTIGPASRAVETLKEMIKSGMNVARLNFSHGTHEYHAETIKNVREATESFASDPILYRPVAVALDTKGPEIRTGLIKGSGTAEVELKKGATLKITLDNAYMEKCDENILWLDYKNICKVVDVGSKIYVDDGLISLLVKQKGPDFLVTEVENGGSLGSKKGVNLPGAAVDLPAVSEKDIQDLKFGVEQNVDMVFASFIRKASDVHEVRKVLGEKGKNIKIISKIENHEGVRRFDEILEASDGIMVARGDLGIEIPAEKVFLAQKMMIGRCNRAGKPVICATQMLESMIKKPRPTRAEGSDVANAVLDGADCIMLSGETAKGDYPLEAVRMQHLIAREAEAAIYHLQLFEELRRLSPITSDPTEAAAVGAVEASFKCCSGAIIVLTKSGRSAHQVARYRPRAPIIAVTRNHQTARQAHLYRGIFPVVCKDPVQEAWAEDVDLRVNLAMNVGKARGFFKKGDVVIVLTGWRPGSGFTNTMRVVPVP

SEQ ID NO: 740 - protein, 437 aa, Saccharomyces cerevisiae
  strain FostersB
MGQGVSSGQDKKKKKGSNQKPKYEPPVQSKFGRKKRKGGPATAEKLPNIYPSTRCKLKLLRMERIKDHLLLEEEFVSNSEILKPFEKKQEEEKKQLEEIRGNPLSIGTLEEIIDDDHAIVTSPTMPDYYVSILSFVDKELLEPGCSVLLHHKTMSIVGVLQDDADPMVSVMKMDKSPTESYSDIGGLESQIQEIKESVELPLTHPELYEEMGIKPPKGVILYGAPGTGKTLLAKAVANQTSATFLRIVGSELIQKYLGDGPRLCRQIFKVAGENAPSIVFIDEIDAIGTKRYDSNSGGEREIQRTMLELLNQLDGFDDRGDVKVIMATNKIETLDPALIRPGRIDRKILFENPDLSTKKKILGIHTSKMNLSEDVNLETLVTTKDDLSGADIQAMCTEAGLLALRERRMQVTAEDFKQAKERVMKNKVEENLEGLYL

SEQ ID NO: 741 - protein, 455 aa, Saccharomyces cerevisiae
  strain FostersB
MDIFRHTFGNNDDSFIRIPGAFREEPPADLNGRTEDQNSNTNEPTQSRDGRLKSILHFLFQAPLIVLYYLLNFIVRSSRLLKPLLRLHGFYQRKHNRLLDHSSQLHRLLENLENEAQAVTCSEGNGNNDDGSNTDSTSNNESSGVQFSFGSLYNPENGTFSKSIMQNSYTELLDACSEQVKFGVIYLHDPLLDNHMDYVNKILCSEAFVNMIRKYQVLLWYGDVTTSEGLQVSNALKIRQYPLLGIISLKAEKKIELIARVEGSISNYKAQDLEAIFSKNYSRLIQLRQQRQNIEMQRLIRQQQDSRYQDSLRRDQQRESERLEQTQREQMEREHQRIENQWLLWRKSQLKPEPSSDKDASKVAIRLENGQRLVRKFDASLPTEEIYAFVELQLHDMLNSENDTLPVYQPANYQHQYSFKLITPVPRRELDLSTKISDVSGIYPSGNIVMERLDE

SEQ ID NO: 742 - protein, 978 aa, Glycine max
MASATSFSGPTLRPSVPICAHRNNDTRFSQLRVSFNFPANPTSLKGLNSTPLKKREAFSNGSSRTRRNPLFFVRCTVSSSGKITQQEFTEMAWQAIISAPEVAKENKHQIVETEHLMKALLEQKNGLARRIFSKVGVDNTRLLETTDKHIQRQPKVVGESTGSMLGRDLEALIQRARDFKKEYGDSFVSVEHFVLGFAQDKRFGKILFRDFQISQQALKSAIESIRGRQLVIDQDPEGKYEALEKYGKDLTAMAKAGKLDPVIGRDDEIRRCIQILSRRTKNNPVLIGEPGVGKTAISEGLAQRIVQGDVPQALMNRRLISLDMGALIAGAKYRGEFEDRLKAVLKEVTESDGQTILFIDEIHTVVGAGASNGAMDAGNLLKPMLGRGELRCIGATTLDEYRKYIEKDPALERRFQQVYVDQPSVEDTISILRGLRERYELHHGVRISDSALVDAAILSDRYISGRFLPDKAIDLVDEAAAKLKMEITSKPTALDEINRSVLKLEMERLSLMNDTDKASKDRLNRLETELSLLKEKQDELTGQWEHEKSVMTNLQSIKEEIDRVNLEIQQAEREYDLNRAAELKYGSLNSLQRQLESAEKELHEYMNSGKSMLREEVTGNDIAEIVSKWTGIPISKLQQSDREKLLYLEEELHKRVVGQDPAVKAVAEAIQRSRAGLSDPHRPIASFMFMGPTGVGKTELAKALASYLFNTEEALVRIDMSEYMEKHTVSRLIGAPPGYVGYEEGGQLTETVRRRPYAVILFDEIEKAHSDVFNVFLQILDDGRVTDSQGRTVSFTNTVIIMTSNVGSQYILNTDDDTVPKESTYEAIKQRVMDAARSIFRPEFMNRVDEYIVFQPLDRDQISSIVRLQLERVQKRIVDRKMKIQVTEAAIQLLGSLGYDPNYGARPVKRVIQQNVENELAKGILRGEFKEEDTILVDTEVTVLANGQIPQQKLVFRRVEADSSSAAEDRREGFPQIL

SEQ ID NO: 743 - protein, 97 aa, Sus scrofa
MSSQQQKQPCTPPPQPQQQQVKQPCQPPPQEPCVPKTKEPCHPKVPEPCQPKVPEPCQPKVPEPCHPKVPEPCQPKVPEPCPSPVIPAPAQQKTKQK

SEQ ID NO: 744 - protein, 898 aa, Sus scrofa
LMAVASAAPGSDFCKQLLFSLLVLILFCDACQKISLQVPSHLPAEALVGKVNLKECLQSASLIQSSDPDFRIQEDGSIYTTHDLMLSSEKKSFSILLSDTQREEQKKIAIVLEAGGQKGPERHLEDTVLKRSKRRWAPIPCSLMENSLGPFPQHVQQVQSDAAQNYTIFYSISGPGVDKEPFNLFFINKDTGDIFCTRSIDREQYEQFPLYAYATTADGYAPEYPLPLLFKVEDDNDNAPYFENKVTIFSVPENCRTGTSVGKVTAIDHDEPDTLHTRLKYKILQQIPDHPKHFSIHPDTGVITTTTPLLDREKCDTYKLIMEVRDMGGQPFGLFNTGTITISLEDENDNSPYFTETSYFTEVEENRIDVEILRMAVRDQDLPNTPHSKAIYKILQGNENGNFKISTDPNTNEGVLCVVKPLNYELNRQIVLQIGVLNEAQFSKAANAQTPTMCTTTVTVKIKDLDEGPECQPSVKVIQSKDGLPAGKELLGYKAVDPEKGSSEGLRYKKIGDEDNWFEINEHTGNLKTVKVLDRESKFVKNNQYNVSVIAMDADGRSCTGTLVVFLEDDNDHPPDIREKEVTICRHDKDFAVLEPVDLDGPDNGPPFQFFLDNAASKLWTIETKDGKTAILRERQNLDYDTYTVPIQVKDRHGFAARHILAVRVCDCTTPSDCKMTPKGVRDIKPSNVILGRWAILAMVLGSALLLCILFTCFCVTAKKTVKKCFPEDVAQQNLIVSNTEGPGEEVMEANMRLPTQTCNICDTSVSVGTLGGQGVKTQQSFEMVKGGYTLDSSKGGGHQTLESVKGLGQGGMDTGRYGYTEWHSFTQPRLGEKVYLCGQDEEHKHSEDYVRSYNYEGKGSVAGSVGCCSDRQEEEGLEFLDHLEPKFRMLAKTCVKK

SEQ ID NO: 745 - protein, 527 aa, Sus scrofa
MADNRDPASDQMKHWKEQRAAQKPDILTTGSGNPIGDKLNILTAGPRGPLLVQDVVFTDEMAHFDRERIPERVVHAKGAGAFGYFEVTHDITRFSKAKVFEHVGKRTPIAVRFSTVAGESGSADTVRDPRGFAVKFYTEDGNWDLVGNNTPIFFIRDAILFPSFIHSQKRNPQTHLKDPDMVWDFWSLRPESLHQVSFLFSDRGIPDGHRHMNGYGSHTFKLVNEKGEAVYCKFHYKTDQGIKNLSVEDAARLSQEDPDYGIRDLFNAIATGNYPSWTFYIQVMTFQEAEAFPFNPFDLTKVWPHSEYPLIPVGKLVLNRNPVNYFAEVEQMAFDPSNMPPGIEPSPDKMLQGRLFAYPDTHRHRLGPNYLQIPVNCPFRARVANYQRDGPMCFQDNQGGAPNYYPNSFSAPEQTHSALEHCTRYSGDVQRFNSANEDNVTQVRTFYLNVLNEEERKRLCENIAGHLKDAQLFIQKKAVKNFSDVHPDYGARIQALLDKYNAEKPKNAVHTYVQAGSHLAAREKANL

SEQ ID NO: 746 - protein, 264 aa, Sus scrofa
MEEVRDPQALGGGMEADEPASPQEPPSPPPPPSPLAPAAPETPGLPTLEQPTEAYARQLLLQEWAPPGGSLELPPRLTWKLLFLRRPLYRNLLRSPNPEGINIYEPAPPTGPTQQPLETLGNFRGWHIRTEKLQQNLSWTVKQQCVDLLAEGLWEELLDDEQPHITVMDWCVYEDSQLDTCVYELHVWLLAADRRTVIAQHHVAPRTSGRGPPGRWVQVSHVFRHYGPGVRFVHFLHKTKNRMERGGLRRTRATDSSVSVQFRE

SEQ ID NO: 747 - protein, 509 aa, Oryza sativa
  subsp. japonica
MEFSPRAAELTTLLESRMTNFYTNFQVDEIGRVVSVGDGIARVYGLNEIQAGEMVEFASGVKGIALNLENENVGIVVFGSDTAIKEGDLVKRTGSIVDVPAGKAMLGRVVDALGVPIDGKGALSDHERRRVEVKAPGIIERKSVHEPMQTGLKAVDSLVPIGRGQRELIIGDRQTGKTAIAIDTILNQKQMNSRGTNESETLYCVYVAIGQKRSTVAQLVQILSEANALEYSILVAATASDPAPLQFLAPYSGCAMGEYFRDNGMHALIIYDDLSKQAVAYRQMSLLLRRPPGREAFPGDVFYLHSRLLERAAKRSDQTGAGSLTALPVIETQAGDVSAYIPTNVISITDGQICLETELFYRGIRPAINVGLSVSRVGSAAQLKAMKQVCGSLKLELAQYREVAAFAQFGSDLDAATQALLNRGARLTEVSKQPQYEPLPIEKQIVVIYAAVNGFCDRMPLDRISQYEKAILSTINPELLKSFNEKGGLTNERKIELDAFLKQTAKEIN

SEQ ID NO: 748 - protein, 961 aa, Oryza sativa
  subsp. japonica
MAALVRPAVLPVCAMTGGGGNDKRSPPQQRSWWGGNKQRLPHQPRRQPGGNGGRGGGGGALDQVLGVLRRDGEFLQAAAGAPLRDIFWLRFLEKKKQQRRRKQPKPKPKPPEQQQQQEEAAAAIQAPSFPPPSYQPGLSCLDLMTADFEALKLYIGYSKHAIEQQFLKGKRQPQHQQTPKPKLQQQQQQQKKKQQQQEQQNQTLQPPAFPPPSYPPGLSCMELMMADIEALKLYINYYVAILTTPLPQHYDPEILSRYFTSRPHILAFRTIQIIFAFVSAAVKMQISKRTNLITDATYSCNSTGSKGFNASQYMVGQLLKETFLDLGPTFVKVGQSLSTRPDITGSEISEALAELHEKVPPFPRKDAMKIIEGEFELPVSHIFSYISDEPVAAASFGQVYQGRTVDGALVAIKVQRPNLLPSVLRDIYILRLGLSFVRKVAKRKSNIALYADELGKGLVGELDYNIEAANATKFLEYHSRYSFMLVPKVLKQLTRRRVLTMEWVSGENPTDLLSLSKGISSEIAESSEKQKIEATARLLDLVNKGVEASLVQLLETGLLHADPHPGNLRYTPEGRVGFLDFGLLCMMEKKHQHAMLASIVHIVNGDWASLVYDLTAMDVVPPRTNLRRVTMDLEDALGEVTFEDGIPDIKFSRVLGKIWSVAFKYHFRMPPYYTLVLRSLASLEGLAIAADGTFKTFQAAYPYVVRKLLSDNSVATRRLLHQAIFNKRKEFQWNKITVFLKLASARGNFRYNTGVLPERKGLDVAKLVEISDASSSLHLNRATPERALHTANLCLRLLLSKESIVIRRLVMTANAKSLARDLISKDASIYRVLLSRVLADVIFQWMVKATGFKRAGQLEPHPRVTAGKNDEDLGLSKEAPALVTFQTAVRDRRLKVIFSKFVRDIREDPILMVRVSWNMFAISVVSAAIGVHRFIVVLSEEFLSTLPPPVPPPRLVQIQSI

SEQ ID NO: 749 - protein, 322 aa, Bos taurus
MSSKPQSIGVIGAPFSKGQPRGGVEEGPTVLRKAGLLEKLKELECDVKDYGDLSFADNLDDSPFQIVKNPRCVGKASEKLADVVAEVKKTGRISLVLGGDHSLAIGSISGHARVHPDLCVIWVDAHTDINTPLTTKTGNLHGQPVSFLLKELKEKMPEVPGFYWVAPCISAKDIVYIGLRDVDPGEHYILKTLGIKYFSMTEVDKLGIGKVMEETFSYLLGRKKRPIHLSFDVDGLDPSFTPATGTPVQGGLTYREGLYITEEIYKTGLLSGLDIMEVNPSLGKTPEEVTRTVNTTVAITMACFGVAREGNHKPIDYLSPPK

SEQ ID NO: 750 - protein, 446 aa, Bos taurus
MTMFENVTRALTRQLNPRGDLTPLDSLIDFKRFHPFCLVLRKRKSTLFWGARYVCTDYTFLDILEPGSSPSDPTDSGNFGFKNMLDARVEGEVDVPKTVKVKGTAGLSRNSTLEVQTLSVAPKALETLHQERKLMAEHPFLEEMRRRGENLYVVMEVVEAVQEVTLERAGRAEGCFSLPFFASLGLQGSVNHKEAVTIPKGCVLAFRVRQLMVKGKDEWDIPHIYNDNMHTFPPGEKPEDEKFTLIQASDVGAVHEDFRTLKEEVQRETQEVEKLSPEGKSSLLSSLSKLLGKKKELQDLELTLEEALGKGHEETLEALPKNVLLSKGAMDAILYFLGALAELSEAQQKLLVKSMEKKILPVQLKLVESTMEQNFLQDKEGVFPLRPELLSSLGEEELTLTEALVGLSGLEVQRSGPQYTWDPDTLPRLCALYAGLSLLQLLTKAS

SEQ ID NO: 751 - protein, 563 aa, Bos taurus
MCDQQQIQCYQPHPQYCVTCSPCYISQTPCANSQVVVQAPCEMQIVECPAPCPVQVSQVKCQAPCQSKTTEVKGKAPCESKTTQVKGKASCESKTTQVKGQAPSQPQFTCVQCQVPCQSEVSYVQCEGPCPVQTCYVECAPVCYTETCYVECPGQSYVPCPAPQPVQTYVTGPLVCQPQGRFSTQCQYQGSYSGCDPQLQSRASFSTWAPQCQTRGSYGSFPAQSRSRSTSRCLPPRQLQPSYRSCSPPRRSEPYYSSSCLPSRCSLGSYNYCTPPRRSEPIYNSDCSRRPTLGCSQRCGPKCRIEISSPRCPRQVPPQKCPVQIPPIRRCSESCAPRPSWGTSCPDLRSRAEPCPLPSFHPPRRLDQCPEPSLRRSPPPAPCPRPLPAPRTCSRPERCVSPEFRPCSPPRRLSEPCLYPEPRPVPYPAPRHPRPVQCDLSAPRPYPQPYERQESFPLLEPIPLPEPIPLPSPCPSPEPCVEPRPNPCTGDLGCHESSPHRLDTEAPICGPAGYNWWQDSEPGCRPCDVGLPESQGLGGCGDQGGVSVGMKGGTRGGVKGAYF

SEQ ID NO: 752 - protein, 463 aa, Saccharomyces cerevisiae
  strain FostersB
MLSRATRTAAAKSLVKSKVARNVMAASFVKRHASTSLFKQANKVESLGSIYLSGKKISVAANPFSITSNRFKSTSIEVPPMAESLTEGSLKEYTKNVGDFIKEDELLATIETDKIDIEVNSPVSGTVTKLNFKPEDTVTVGEELAQVEPGEAPAEGSGESKPEPTEQAEPSQGVAARENSSEETASKKEAAPKKEAAPKKEVTEPKKADQPKKTVSKAQEPPVASNSFTPFPRTETRVKMNRMRLRIAERLKESQNTAASLTTFNEVDMSALMEMRKLYKDEIIKKTGTKFGFMGLFSKACTLAAKDIPAVNGAIEGDQIVYRDYTDISVAVATPKGLVTPVVRNAESLSVLDIENEIVRLSHKARDGKLTLEDMTGGTFTISNGGVFGSLYGTPIINSPQTAVLGLHGVKERPVTVNGQIVSRPMMYLALTYDHRLLDGREAVTFLKTVKELIEDPRKMLLW

SEQ ID NO: 753 - protein, 832 aa, Saccharomyces cerevisiae
  strain FostersB
MGSSLRSFIKDVRGAKTLADERAIITKQSAKIRTKLRDDHLPHEKRRVNIQKLLYLYILGEKTHFGQVESINLIASDDFVDKRLGYLAATLLLDESEDLLTLLTNMLNNDLHHPNKYAVSLALTSLGFLSSPELARDLYPDVENIIKNSRDPFLLKKALQCAAKLIFKDVSLLEIFNIEDITKILSSHSICTHGVLLGVTKIIQSILLIGLNRKKDEDEDEDGIDYSNDILSPLSLLLRDFFIRLENMNSKNIEPGYDVQGICDPFLQCEIIYTLKLYFQVGELLNSNNVLDYKDNFCDLLTRIATNTDSTKNSGQAILYETVKTIFSLDLNQPLRVLGINILAKFLAGKDNNTKYVSLNTLLKVVPQEPTAVQRHRKFISHCLQDTDVSIRMRALELSFAILDDSNLVELVNELMKFLAKQDEDSKDLIIYTIDHLIDTFDTRVVKDESWKLEVFFNILKLVGSFINYEKINDILIIINNTSQLSDKSEFLRKMLTISLNGTSAEISEENIGWQLVLIWCIGEYGDLVLNEGNKNGADIINESSITDYLLTLQKLYTATNLKIINYILTAALKLSVRFHDAKNIEKLRQLILSYTDSTDLSLQMKSNQYEIFFNQSISVKKIILETMPKFEKITEEQDNGKALSKNLISNEPVDLLSDLLGEDSKAESKASTGDNVKPIDILEEIFGEKNDIAQLPKNANKEESINHSSAVEANSGVTLPLDANKIYDSSSLNVYASLLSANSGLAHLDLYFQAKSLISDLKTFCAVPKAQKLTLGQLYPSSTINASQICKQSLKISGSGKLKLRVKLDFHLNGSSSITNEQFDHKFDETL

SEQ ID NO: 754 - protein, 437 aa, Vitis vinifera
MAPKRPPPAEDPPAPSSTSEEEEENEENEENEEEEEEEEESSPEESSEEEEEGEENKSTVLTPPPAVDKKASSNKLVATTPAKSTPQSSSEDEEDGSESESESDSPPKSRRSSRGADPTIKPIATKPMEETPKSKKARSKPGVSVTPSPVKSSPVKPSNSKRPGEIGLERKESKRAKKKEPEAEAEEEEDGKKTGDDSKKQMFQRIWSEEDELGILKGMIDYSAKNGSVPYPNGDMNEFYDFVKNTLHGDFSRVQLTDKARRLKKKYSNNVSRAKLGEDPTFQKPHEQRAFELSKKIWGGEGNSVGVQQSNKANGKARKNQKPNKAVKVEDVEVLSVINGDDKEAVKLENEPKSEPPKKYSLVVSDFTRINESVGMSSSMDRAIEIGLGLLSEPLKAELKEKWKELEDEEFQLYMKKLDLIQMEARVSMQAYRAKHQ

SEQ ID NO: 755 - protein, 229 aa, Glycine max
MEEKAKAEQKKIGMTETWLKKHRLLYNGATRHPLIISIRDGTINTASFKTWLAQDYLFVRAFVPFVASVLIKAWKESDCSGDMEVILGGMASLEDEISWFKTEANKWGISLSDVVPQQANKNYCGLLESLMSPDAEYTVAITAFWAIETVYQESFAHCIEEGSKTPPELKETCVRWGNEAFGKYCQSLQNIANRCLQKASDEELKKAEVMLLSVLEHEVEFWNMSRGNV

SEQ ID NO: 756 - protein, 1474 aa, Ovis aries
MFSFVDLRLLLLLAATALLTHGQEEGQEEGQEEDIPPVTCVQNGLRYHDRDVWKPVPCQICVCDNGNVLCDDVICDELKDCPNAKVPTPPRPVSPHPPPPPPPPTTTKQRGGRGGPCPRPGAHRPSHSPPQGPAGPPGRDGIPGQPGLPGPPGPPGPPGPPGLGGNFAPQLSYGYDEKSTGISVPGPMGPSGPRGLPGPPGAPGPQGFQGPPGEPGEPGASGPMGPRGPPGPPGKNGDDGEAGKPGRPGERGPPGPQGARGLPGTAGLPGMKGHRGFSGLDGAKGDAGPAGPKGEPGSPGENGAPGQMGPRGLPGERGRPGAPGPAGARGNDGATGAAGPPGPTGPAGPPGFPGAVGAKGEAGPQGPRGSEGPQGVRGEPGPPGPAGAAGPAGNPGADGQPGAKGANGAPGIAGAPGFPGARGPSGPQGPSGPPGPKGNSGEPGAPGSKGDTGAKGEPGPTGIQGPPGPAGEEGKRGARGEPGPAGLPGPPGERGGPGSRGFPGSDGVAGPKGPAGERGAPGPAGPKGSPGEAGRPGEAGLPGAKGLTGSPGSPGPDGKTGPPGPAGQDGRPGPPGPPGARGQAGVMGFPGPKGAAGEPGKAGERGVPGPPGAVGPAGKDGEAGAQGPPGPAGPAGERGEQGPAGSPGFQGLPGPAGPPGEAGKPGEQGVPGDLGAPGPSGARGERGFPGERGVQGPPGPAGPRGANGAPGNDGAKGDAGAPGAPGSQGAPGLQGMPGERGAAGLPGPKGDRGDAGPKGADGAPGKDGVRGLTGPIGPPGPAGAPGDKGETGPSGPAGPTGARGAPGDRGEPGPPGPAGFAGPPGADGQPGAKGEPGDAGAKGDAGPPGPAGPAGPPGPIGNVGAPGPKGARGSAGPPGATGFPGAAGRVGPPGPSGNAGPPGPPGPAGKEGSKGPRGETGPAGRAGEVGPPGPPGPAGEKGAPGADGPAGAPGTPGPQGIAGQRGVVGLPGQRGERGFPGLPGPSGEPGKQGPSGASGERGPPGPMGPPGLAGPPGESGREGAPGAEGSPGRDGAPGAKGDRGETGPAGPPGAPGAPGAPGPVGPAGKSGDRGETGPAGPAGPIGPVGARGPAGPQGPRGDKGETGEQGDRGIKGHRGFSGLQGPPGPPVSMLSPSPAPSPASSLQGPPGSAGTPGKDGLNGLPGPIGPPGPRGRTGDAGPAVSPPTLSAHGPPALKAPSPRSRYDLSFLPQPPQEKAHDGGRYYRADDANVVRDRDLEVDTTLKSLSQQIENIRSPEGSRKNPARTCRDLKMCHPDWKSGEYWIDPNQGCNLDAIKVFCNMETGETCVYPTQPSVPQKNWYISKNPKDKRHVWYGESMTGGFQVREGGQGSDPADVAIQLTFLRLMSTEASQNITYHCKNSVAYMDQQTGNLKKALLLQGSNEIEIRAEGNSRFTYSVTYDGCTSHTGAWGKTVIEYKTTKTSRLPIIDVAPLDVGAPDQEFGFDIGSVCFL

SEQ ID NO: 757 - protein, 1462 aa, Ovis aries
MPKNAAVSNLDVESKLSVYYRAPWHQQRNIFLPATRPPCVEELHRQARQSLQALRREHRSRSDRREQRAAAPIPAAAPPLPAYPPAHSQRRREAKDRHFLTFNSTRSPSPTECCHMTPWSRKSHPPEDEDTDVMLGQRPKNPVHNIPSTLDKQTNWSKALPLPTPEEKMKQDAQVISSCIIPINVTGVGFDREASIRCSLVHSQSVLQRRRKLRRRKTISGIPRRVQQEIDSDESPVARERNVIVHTNPDPSNTVNRRSGTRDSECQTEDILIAAPSRRRIRAQRGQSIAASLSHSAGNISALADKGDTVFTTAVSSRTRSRSLPREGNRAGDAEPKVGAKPSAYEEGEPFVGDQERTLTDCSEAPSSPGAQEHQPALSLACSQHLHSPQHKLNERGRSRLSRMAADSGSCDISSNSDTFGSPIHCISTAGVLLSSHMDQKDDHQSSSGNWSGSSSTCPSQTSETIPPAASPPLTGSSHCDSELSLNTAPHANEDTSVFVTEQYNDQLEKVRGHRTNSFTSTVADLLDDPNNSNTSDSEWNYLHHHHDASCRQDFSPERPKADSLGCPSFTSMATYDSFLEKSPSDKADTSSHFSVDTEGYYTSMHFDCGLKGSKNYVCHYAALGPENGQGIGVPPALSDCAWQDYLDHRRQGRPSISFRKPKAKPTPPKRSSSLRKSDGNADTSEKKEPKTSSGQLLPHSSREMKLPLDFSNTPSRMENANLPTKPEPSWMNQNEHGIKEPQLDTPDVPPFKDEGAESTHYADLWLLNDLKTNDPYRSLSNSSTATGTTIIECIKSPESSESQTSQSESRATTPSLPSVDNEFKLASPEKLAGLASPSSGYSSQSETPTSSFPTAFFSGPLSPGGSKRKPKVPERKSSLQQPSLKDGALSLSKDLELPIIPPTHLDLSALHNVLNKPFHHRHPLHVFSHNKQNTVGETLRSNPPPSLAITPTVLKSVSLRSISKSEEVKQKEGNNTDLPYLEESTLTTGKIRPHVIKKSLPCQYATEDTILSFLDSSAVEMGPDKLQLEKKHTFDVKHHCDPETVTSAGSNLLDSSVTRDQMHMESEPVSENKPSKSCDFLMEGFQRVSVARPNDSDGKTLQYGAGPDGALAQVQKLSFVDREEAAPPESVDVLTPQSDSPTRVTDIGYQLKPQLGMSHHHDKVPGNISSEAEISTINPCPEKCSEQENIASGISAKSASDNSGAEETQGSVDEVSLKESSPSDDSVISPLSEDSQAEAESVFVSPNKPRTTEDLFAVIHRSKRKVLGRKDSGDMSVRSKSRASLGSSSSNSAGSVTSPNSNVTTPNSQRSPGLIYRNAKKSNTSNEEFKLLLLKKGSRSDSSYRMSATEILKSPILPKPPGDLTAESPQSPHEAHQGSPGTEALSPLSPCSPRVNAEGFSSKNFVTSASARVGRSRAPPAASRYSVRCRLYNAPMQAISEGETENSDGSPHDDRSSQSST

SEQ ID NO: 758 - protein, 828 aa, Sus scrofa
MPSPTPPSGTTDGARSDVGRWGGNPWQPPTTPSPEPEPEPDRRSRRDGRSFWARCCGCCSCRNTDDDWGPRGDRGAGSRDRGSGSGSRRPDSRGSDSRRPGSRGSGVNAAGDGTIREGMLVVKGVDLLSSRSDQNRREHHTDEFEYDELIIRRGQPFYMVLLLSRPYESSDYVALELLIGNNPEVGKGTHIIIPVGKGGSGGWKAQVTKSSGQNLNLRVHTSPNAIIGKFQFTVRTRSEAGEFQLPFNPRNEIYILFNPWCPDTEDIVYVDHEDWRQEYVLNESGRIYYGTEAQIGERTWNYGQFDHGVLDACLYILDRRGMPYAGRGDPVSVSRVISAMVNSLDDNGVLIGNWSGDYSRGTNPSAWVGSVEILLSYLRTGYSVPYGQCWVFAGVTTTVLRCLGLATRTVTNFNSAHDTDTSLTMDIYFDENMKPLEHLNHDSVWNFHVWNDCWMKRPDLPSGFNGWQVVDATPQETSSGIFCCGPCSVESIKNGLVYMKYDTPFIFAEVNSDKVYWQRQNDGSFKIVYVEEKAIGTLIVTKAIGSHMREDVTHIYKHPEGSEAERKAVETAAAHGSKPNVYATRDSAEDVAVQVEAQDAVMGQDLTVCVVLTNRGGSRRTVKLHLYLSVTFYTGVTGSVFKESKKEVVLEPGASERVTMPVAYKEYQPHLVDQGAMLLNVSGHVKENGQVLAKQHTFRLRTPDLSLTLLGAAVVGQECEVQIVFKNPLPVTLTNVVFRLEGSGLQRPKILNVGDIGGNETVTLRQTFVPVRPGPRQLIASLDSPQLSQVHGVIQVDVAPAAGGGVFSDARGNSRSGETIPMASRGEA

SEQ ID NO: 759 - protein, 143 aa, Sus scrofa
LEDFKLDFGNSQGKTSETWHGGIATFESPGDEVWGVVWKMNKSNLSSLDEQEGVKSGMYVPIEVNVSAQKGKEITCRSYQMTNYESAPPSPQYKKVIICTGAKENGLPLEYQKKLNAIEPNDYKGKVSEEIEDIIKRGETKAH

SEQ ID NO: 760 - protein, 858 aa, Bos taurus
MVNFTVDQIRAIMDKKANIRNMSVIAHVDHGKSTLTDSLVCKAGIIASARAGETRFTDTRKDEQERCITIKSTAISLFYELSENDLNFIKQSKDGSGFLINLIDSPGHVDFSSEVTAALRVTDGALVVVDCVSGVCVQTETVLRQAIAERIKPVLMMNKMDRALLELQLEPEELYQTFQRIVENVNVIISTYGEGESGPMGNIMIDPVLGTVGFGSGLHGWAFTLKQFAEMYVAKFAAKGEGQLGPAERAKKVEDMMKKLWGDRYFDPATGKFSKSANSPDGKKLPRTFCQLILDPIFKVFDAIMNFKKEETAKLIEKLDIKLDSEDKDKEGKPLLKAVMRRWLPAGDALLQMITIHLPSPVTAQKYRCELLYEGPPDDEAAMGIKSCDPKGPLMMYISKMVPTSDKGRFYAFGRVFSGLVSTGLKVRIMGPNYTPGKKEDLYLKPIQRTILMMGRYVEPIEDVPCGNIVGLVGVDQFLVKTGTITTFEHAHNMRVMKFSVSPVVRVAVEAKNPADLPKLVEGLKRLAKSDPMVQCIIEESGEHIIAGAGELHLEICLKDLEEDHACIPIKKSDPVVSYRETVSEESNVLCLSKSPNKHNRLYMKARPFPDGLAEDIDKGEVSARQELKQRARYLAEKYEWDVAEARKIWCFGPDGTGPNILTDITKGVQYLNEIKDSVVAGFQWATKEGALCEENMRGVRFDVHDVTLHADAIHRGGGQIIPTARRCLYASVLTAQPRLMEPIYLVEIQCPEQVVGGIYGVLNRKRGHVFEETQVAGTPMFVVKAYLPVNESFGFTADLRSNTGGQAFPQCVFDHWQILPGDPFDNTSRPSQVVAETRKRKGLKEGIPALDNFLDKL

SEQ ID NO: 761 - protein, 559 aa, Bos taurus
MGSSRASQIGCVGGRGVLALLLAGLLLQGTLAKSIGTFLDPCKDPTRITSPNDPCLLGKGGSSSSSGGSSGSSGGGSSGSSSGSSGSSSSSSGVSSGLSGHPSGGSSGSSSGSNVSSGPSGSSSGSSGVSSGLSGRPSGGYSGSSSGVSSSASGSGSTGSIVAHGGSSGSSLFKPGTGYSQISYSSGSGSSLQGASSSLPSGSISSPSGGGLSSSGSQTSWLSSSGGQKVSSKLRPCGPDIPDSPCSGGPIVSHSGPYISSSHSVSGGQRPVVVVVEQHGSGGPGGPGVGQRVPCLNGGPPGKPCPPITSVDQYGSYEVVGGSSNSYLVPGMTYSGGKIYPVGYFTKEGPIKGSPGVPSFAAGPPISEGKYFSGNPIIPSHSSSSSNIYQSGASSTVVFQPVGSGGVQPCVVGSSGSKGPCSLSSSGVSSSSSISSSSSSSFHPCGGVSQGPCSPPGTGSLSGSSSSLSGGKIILQPCGSKSSAPGHPCISVSSSTLSGGPNGSPQPDPSAGAKPCGPGNSGKTPCRSIRDILAQVKPLGPQLADPEVFLPQGDLPNSS

SEQ ID NO: 762 - protein, 145 aa, Ovis aries
MLTAEEKAAVTGFWGKVKVDEVGAEALGRLLVVYPWTQRFFEHFGDLSNADAVMNNPKVKAHGKKVLDSFSNGMKHLDDLKGTFAQLSELHCDKLHVDPENFRLLGNVLVVVLARHHGNEFTPVLQADFQKVVAGVANALAHKYH

SEQ ID NO: 763 - protein, 375 aa, Gallus gallus
MDDDIAALVVDNGSGMCKAGFAGDDAPRAVFPSIVGRPRHQGVMVGMGQKDSYVGDEAQSKRGILTLKYPIEHGIVTNWDDMEKIWHHTFYNELRVAPEEHPVLLTEAPLNPKANREKMTQIMFETFNTPAMYVAIQAVLSLYASGRTTGIVMDSGDGVTHTVPIYEGYALPHAILRLDLAGRDLTDYLMKILTERGYSFTTTAEREIVRDIKEKLCYVALDFEQEMATAASSSSLEKSYELPDGQVITIGNERFRCPEALFQPSFLGMESCGIHETTFNSIMKCDVDIRKDLYANTVLSGGTTMYPGIADRMQKEITALAPSTMKIKIIAPPERKYSVWIGGSILASLSTFQQMWISKQEYDESGPSIVHRKCF

SEQ ID NO: 764 - protein, 142 aa, Bos taurus
MVLSAADKGNVKAAWGKVGGHAAEYGAEALERMFLSFPTTKTYFPHFDLSHGSAQVKGHGAKVAAALTKAVEHLDDLPGALSELSDLHAHKLRVDPVNFKLLSHSLLVTLASHLPSDFTPAVHASLDKFLANVSTVLTSKYR

SEQ ID NO: 765 - protein, 2335 aa, Bos taurus
QPADMTSATEFENVGNQPPYSRINARWDGPDDELDNDNSSARLFERSRIKALADEREVVQKKTFTKWANSHLVHVSCRITDLYKDLRDGRMLIKLLEVLSGEMLPKPTKGKMRIHCLENVDKALQFLREQRVHLENMGSHDIVDGNHRLVLGLIWTIILRFQIQDIVVQTQEGRETRSAKDALLLWCQMKTAGYPHVNVTNFTSSWKDGLAFNALIHKHRPDLIDFDKLKDSNARHNLEHAFEVAERELGIIPLLDPEDVFTENPDEKSIITYVVAFYHYFSKMKVLAVEGKRVGKVIDHAIETEKMIEKYSGLASDLLTWIEQTITILNSRKFANSLAGVQQQLQAFSTYRTVEKPPKFQEKGNLEVLLFTIQSRMRANNQKVYTPHDGKLVSDINRAWESLEEAEYRRELALRDELIRQEKLEQLARRFDRKAAMRETWLNENQRLVAQDNFGYDLAAVEAAKKKHEAIETDTAAYEERVRALEDLAQELERENYHDQKRIMARKDNILRLWDYLQELLQARRQRLEKTLDLQKLFQDMLHSIDWMDGIKAHLLSAEFGKHLLEVEDLLQKHKLMEADIAIQGDKVKAITTATLQFTEGPGYQPCDPQVIQDRVSHLEQCFEELSNTAAGRKAQLEQSKQLCKFFWEMDEAESWIKEKEQIYSSLDYGKDLTSVLILQRKHKAFEDELRGLDAHLDQIFREAEGMVARKQFGHERIEVRIKKVSDQWNELKDLAAFCKKNLQDTENFFQFQGDADDLKAWLQDAHRLLSGEDVGHDEGATRALGKKHKDFLEELEESRGVMEHLEQQAQAFPQGFQDSPDVTNRLQALRDLYQQVVAQADMRQQRLQDALDLYTVFGETDACELWMGEKGKWLAQMEIPDTLEDLEVVQHRFDILDQEMKTLMTQIDGVNLAANSLVESNHPRSAEVKKYQDRLNTRWQDFQTMVSERREAVDSALRVHNYCVDCEETGKWIADKTKVVESTKDLGRDLAGVIAIQRKLSGLERDVAAIQARLGTLERESQQLMASHPELKEDIEQRQAYVEELWQGLMQALKSQEASLGEASQLQAFLQDLDAFQAWLSTTQKDVASKDMPESLPEAEQLLQQHAAIKDDIDRHQESYQKVRVSGEKVTHGQTDPEYLLLGQRLDGLEKGWDALSRMWESRSQALTQCLGFQEFQKDAKQAEAILSNQEYTLAHLEPPDSLEAAEAGIRKFEDFLLSMENNRDKVLSPVDSGNKLVAEGNLYSDKIKEKVQLIEDRHRKNNEKAQEASDLLKDNLELQNFLQNCQELTLWINDKLLTSQDVSYDEARNLHNKWLKHQAFVAELASHQGWLENIDAEGKQLMEEKPQFAVLVSQKLEALHQLWDELQANTQEMAQHLSAARSSDLRSQTQADLNKWIRAMEDQLQSDDLGKDLTSVNRMLAKLKRVEDQVNVRKEELQELFAQMPSLGEEAGDEALSIEKRFLDLLEPLGRRKKQLESSRAKLQISRDLEDETLWVEERLPLAQSTDYGTNLQTVQLFMKKNQTLQNEILGHTPRVEDVLHRGQQLVAAAEIDCQDVEERLGKLQGSWDTLQEAAASRLQHLREASEAQQYYLDAGEAEAWIGEQEFYVFSDENPQDEESAIVMLKRHLRQQRAVDEYGRNIKQLAGRAQGLLSAGHPEGEQIIRLQGQVDKQYAGLKDMAEERRRKLENMYHLFQLKREVDDLEQWITEKDTVASSSEMGQDFDHVTVLRDKFRDFARETGAIGQERVDNVNAIIERLIDAGHSEAATIAEWKDGLNEMWADLLELIDTRMQLLAASYDLQRYFYTSSEILGLIGEKHRELPEDVGLDASTAESFHRTHTAFERELHLLGEQVQQFQDVAARLQTAYAGEKADIIQNKEQEVSAAWQALLDACAGRRTQLVDTADKFRFFSMARDLLSWMESIVRQIETQEKPRDVSSVELLMKYHQGIQAEIETRSKNFSTCLELGESLLQRQHQASEEIREKREQVVSRREEMQEKWEARWERLRMLLEVCQFFRDASVAEAWLIAQEPYLASRDYGHTVDSVEKLIKRHEAFEKSAASWEGRFAALEKPTTLELKERQTPERTEEEPGLQEEEGETAGEAPRGPHQATTERTSPGEEERPWPQDLQPPPPPGPHEDGQEEKSSTDERPATEPLFKVLDTPLSEGDEPTTLPAQRDRGHSVQMEGFLGRKHDLEGPNKKASNRSWNNLYCVLRNSELAFYKDAKNLALGVPYHGEEPLALRHAICEIAANYKKKKHVFKLRLSNGSEWLFHGKDEEEMLSWLQGVSTAINESQSIRVKAQSLPLPPITGPEASLGKKDKEKRFSFFPKKK

SEQ ID NO: 766 - protein, 447 aa, Oryza sativa
  subsp. japonica
MREILHIQGGQCGNQIGAKFWEVVCAEHGIDATGRYDGDSDLQLERVNVYYNEASCGRFVPRAVLMDLEPGTMDSVRSGPYGHIFRPDNFVFGQSGAGNNWAKGHYTEGAELIDAVLDVVRKEAENCDCLQGFQVCHSLGGGTGSGMGTLLISKIREEYPDRMMLTFSVFPSPKVSDTVVEPYNATLSVHQLVENADECMVLDNEALYDICFRTLKLTTPSFGDLNHLISATMSGVTCCLRFPGQLNSDLRKLAVNLIPFPRLHFFMVGFAPLTSRGSQQYRALTVPELTQQMWDAKNMMCAADPRHGRYLTASAMFRGKMSTKEVDEQMLNVQNKNSSYFVEWIPNNVKSTVCDIPPTGLKMASTFIGNSTSIQEMFRRVSEQFTAMFRRKAFLHWYTGEGMDEMEFTEAESNMNDLVSEYQQYQDATADDEGEYEDEEEEADLQD

SEQ ID NO: 767 - protein, 447 aa, Oryza sativa
  subsp. japonica
MGKEKTHINIVVIGHVDSGKSTTTGHLIYKLGGIDKRVIERFEKEAAEMNKRSFKYAWVLDKLKAERERGITIDIALWKFETTKYYCTVIDAPGHRDFIKNMITGTSQADCAVLIIDSTTGGFEAGISKDGQTREHALLAFTLGVKQMICCCNKMDATTPKYSKARYDEIVKEVSSYLKKVGYNPDKIPFVPISGFEGDNMIERSTNLDWYKGPTLLEALDQINEPKRPSDKPLRLPLQDVYKIGGIGTVPVGRVETGVLKPGMVVTFGPSGLTTEVKSVEMHHEALQEALPGDNVGFNVKNVAVKDLKRGYVASNSKDDPAKEAASFTSQVIIMNHPGQIGNGYAPVLDCHTSHIAVKFAELVTKIDRRSGKELEKEPKFLKNGDAGMVKMIPTKPMVVETFSEYPPLGRFAVRDMRQTVAVGVIKNVEKKDPTGAKVTKAAAKKK

SEQ ID NO: 768 - protein, 632 aa, Glycine max
MAGKGEGPAIGIDLGTTYSCVGVWQHDRVEIIANDQGNRTTPSYVGFTDTERLIGDAAKNQVAMNPINTVFDAKRLIGRRFSDASVQSDIKLWPFKVLSGPAEKPMIQVSYKGEDKQFAAEEISSMVLMKMREIAEAYLGSSIKNAVVTVPAYFNDSQRQATKDAGVIAGLNVMRIINEPTAAAIAYGLDKKATSVGEKNVLIFDLGGGTFDVSLLTIEEGIFEVKATAGDTHLGGEDFDNRMVNHFVQEFKRKNKKDISGNPRALRRLRTACERAKRTLSSTAQTTIEIDSLYEGIDFYSTITRARFEELNMDLFRKCMEPVEKCLRDAKMDKRTVHDVVLVGGSTRIPKSINPDEAVAYGAAVQAAILSGEGNEKVQDLLLLDVTPLSLGLETAGGVMTVLIPRNTTIPTKKEQVFSTYSDNQPGVLIQVYEGERTRTRDNNLLGKFELSGIPPAPRGVPQITVCFDIDANGILNVSAEDKTTGQKNKITITNDKGRLSKEEIEKMVQEAEKYKSEDEEHKKKVEAKNALENYSYNMRNTIKDEKIGGKLDPADKKKIEDAIEQAIQWLDSNQLGEADEFEDKMKELESICNPIIAKMYQGGAGPDVGGAMDDDVPAAGSGAGPKIEEVD

SEQ ID NO: 769 - protein, 248 aa, Ovis aries
MERASLIQKAKLAEQAERYEDMAAFMKSAVEKGEELSCEERNLLSVAYKNVVGGQRAAWRVLSSIEQKSNEESSEEKGPEVQEYREKVETELRGVCDTVLGLLDTHLIKEAGDAESRVFYLKMKGDYYRYLAEVATGDDKKRIIDSARSAYQEAMDISKKEMPPTNPIRLGLALNFSVFHYEIANSPEEAISLAKTTFDEAMADLHTLSEDSYKDSTLIMQLLRDNLTLWTADNAGEEGGEAPEEPQS

SEQ ID NO: 770 - protein, 450 aa, Oryza sativa
  subsp. japonica
MREIISIHIGQAGIQVGNACWELYCLEHGIEPDGTMPSDTTVGVAHDAFNTFFSETGAGKHVPRAIFVDLEPTVIDEVRTGSYRQLFHPEQLISGKEDAANNFARGHYTVGKEIVDLCLDRVRKLADNCTGLQGFLVFNAVGGGTGSGLGSLLLERLSVDYGKKSKLGFTIYPSPQVSTAVVEPYNSVLSTHSLLEHTDVAVLLDNEAIYDICRRSLDIERPTYTNLNRLISQIISSLTTSLRFDGAINVDVTEFQTNLVPYPRIHFMLSSYAPVISAEKAYHEQLSVPEITNAVFEPSSMMAKCDPRHGKYMACCLMYRGDVVPKDVNAAVATIKTKRTVQFVDWCPTGFKCGINYQPPSVVPGGDLAKVQRAVCMISNNTAVAEVFSRIDHKFDLMYAKRAFVHWYVGEGMEEGEFSEAREDLAALEKDYEEVGAEGADDENDDGEDY

SEQ ID NO: 771 - protein, 563 aa, Vitis vinifera
MIRSRGIFLGVVLWVFFAMEGNQSVATLIDSTTCKIQQLQKAFAELESHRALTLNLKWKQLEEHFHGLEKSLKRRFNELEDQEKEFEMKTMEAQQLLEKREAAVVAKEQDSLRRLQEKRDAAVFAIVNALGKHDKLSSSGHAVVASENRAGVPIMEEKPLDAMAAESNLEDVKGSSEIENVELKSYPQLIKLCEDMDSEGLHKFISDNRKNLAAMREEIPQALKAAMDPARFVLDSLEDFYRIEIPNLDGKKDANLLGLRRTCIMLMECLSILLTNPDLGPVSEVSDDVKEIAKAIAEEWKPKLDALDIDASNGNSLEAHAFLQLLATFGIASDFDQEEISRLIPMVSRRRQTADLCRSLGLSEKMPGVIEILINSGRQIDAVNLAFAFELTEQFSPVPLLKSYLKEARKASSPLKPGNASPTAQNEVNERELTALKAVIKCIEDHKLEEEYPLDPLQKRVVQLEKAKADKKRATEAAKPQPKRPRANGVGYGPRATNVAADKTFYARVTDRYPQYIYDRPYVYPVSTDNHGPSLLGSATYNLSPSHGNYFGNGYQYQAPYLH

SEQ ID NO: 772 - protein, 703 aa, Vitis vinifera
MSSHLSAEVKRPVVSFRSSIWGNRFINYTPDDEITRAYNQQRVEDLKEEVKRELMVAAGKPSQHLNFIDAVQRLGMAYHFEEEIEEAIGHIYDNYHHSDDKYDDLCNVSLRFRLLRQQGYNISCDIFERFKDENGSFKECLNNDVEGMLGLYEAAHLRVQEEDILDEALAFTTAHLESLVEDLDYPLAAQATQALYRPIRKGLERLEARPHISIYQDEASHSKALLELAKLDFNLLQSLYKKELSYITRWWKDLDFSSKLPFVRDRVVETYLWIVAECFEPQYSYARRIQTKLLVLITVIDDVYDAYGTLEELELFTEAIERWDNNSIDSLPEYMKPCYQAVLDVYKEIEEKENEERPYCVHYAKKAVRSVRAYFNEGKWLHAEYVPTMEEYMGVALVSSDVPMFTIISFVGMGMMATKEAFDWVLNGPKIVRACSTIITLAYNQQRIEDLKEEVRRELMAAAGKPSQQLNFIDAVQRLGVAYHFEEEIEEALGHTFKRFTDENGSFKECLIKDVEGMLGLYEAAHLRVQEEDILDEAIAFTTTHLRSLVEHLDCPLAAPVNRALYRPIRKCLERLEARPYITMYQDEASHSKDLLELAKLDFNQLQSLYKKELSHITRWWKDLDFSSKLPFFRDRAVETYLWIAVACFEPQYSYARRIQAKLLAIATVIDDMYDAYGTPEELELFTEAIERYDIKILHLRGG

SEQ ID NO: 773 - protein, 2408 aa, Ovis aries
MESDGPKVLETAEEIQERRQEVLTRYQRFKERVAERGQKLEDSYHYQVFIRDADDHEKWISEKIKIATDKSYEDPTNIQGKYQKHEAFEAEVQAKSSILPDLEETRETRFPEGHFAHEDTKGLLEELNRLWDLLLELTRKKGALLLRALKLQQYFQECADILEWIGDKEALVTSVELGDDWERTEVLHKKFEEFLADLAVRKERVNEVNRYANECAEEKHPELPSIESKQKEVNAAWERLHGLALQRRKMLSSAADLQRFKRDVTEAIQWIKEKEAQVTSEDYGKDLVSSEALFHSHKTLERNLAVMNDKVKELCAKADKLKLSHPSDAAEIQQMKEDLVSNWEHIRNLATSRYEKLQASYGYQRFLSDYDELLGWMEEKTALINADELPKDVTGGEALLDRHQQHKHEIDSYDDRFQSADETGQALLDANHEASDEVLEKMSVLSNNRAALLELWEKRQQQYEQCLNLHLFYRDSEQVDSWMSRQEAFLENEDLGNSLGSVEALRQKHDDFEEAFTAQEEKITTIDKTATKLIDDKHYDSENIAAIRDQLLARRDDLRKRAATRRRLLEDSFLLQQLYQDSDDLKNWINKKKKLADDEDYKEILNLKSQVQKQKVFEEELAANKIRLNNIQKTGQEMIDSNHYASDKVADRLREVDSLWTELQEATEQKGIQLYEANRQLQFENNAEDLIQWLDEVEWQARSQDYGKGLADVQNLLRKHGLLESAVATRQDQVDTLTDLVTYFEEIIHPDAGNIRERQEYLVSQFEALKERLAYRKNKLIDLFHLYQIQRDIEDEEAWIQETEPSVASTYLGKDLIASKNLLNRHHVIQANIASHEPRIQMITEKGNKMIEEGHFAAEDVASRVKSLNENMESLQARATRRQNDLEANVQFQQYLVDLHEAEAWIREKEPIVDNTNYGADEEAAGALLKKHEAFLVDLKAFGNSIQALRDQAEACQEQQAAPVEVAAPEERVVALYDFQARYSREVTMKKDDVLTLLSSISKDWWKVETDDHQGFVPAVYVRKLARDEFPMLPQRKREEPGNIIQRQEQIENQYHSLLLRADERRRRLLQRYNEFLLAYEAGDMLDWIQEKKAENTGVELDDVWELQKKFDEFQMDLKTNEPRLRDINKVADDLQFEGLLTPEGAQIQQELNARWGSLQRLAEEQRQLLGSAHAVEMFHREADDTKEQIEKKCQALNTADPGSDLFSVQALQRQHENFERDLVPLGEKVEVLRDTADRLSESHPDATDDLQSKRLELKDAWDDLQELTKDRKENLQEALKFYQFLSQARDLQNWISGIGGMVSSKELAEDLTGTEIMIERHQEHRADMEAQDPAFQAFEDFGTDLTISGHRASPEIEEKLQAVRLERDELESAWEQRKKMLDQCLELQLFRGNCDQAESWMAARENYLRSDDKGSLDSLEALMKKRDDLDKAITDQENRITELDLFAEQLIAEDHYAKEEIAARNQRILDRWNILKEQLIAERMKLGDYADLKQFYHDLKDQEEWISEMLPIACDESYKDPTNIQRKYLKHKTFEDEVNSRAEQVEGVIFLGYALVERRACDGNEESVKDQIEELEKNWNYLLIRTTDKGQKLDEASRQQRFNTGIRDFEFWLSEAETLLTMKDQARDLASAGNLLKKHQLLEREMLARQDALQDLNTLAKNLISSGTFNTDQIMEKMDNVNERFLNVKELAAEHHEKLKEAYALFQFFQDLDDEEFWIEEKLVRVRSQDYGRDLQGVQNLLKKHRRLEGELVAHEPAIQNVLDMAETLGDKAAVGREEIQDRLDLLVQHWDQLQELTKARGIQLGESLEYLEFMENAEEEEAWISEKEALVAQGDSGDTLAATQSLQKKLEALENDFVVHEIRVQNVCAQGEDILSKGESQHKEKISNKIQALNEKIPSLAKSLAVWKSQLEDDYDFQQFNWKADVVEAWIAEKEANLKTNSDDADLAALSILLAKQDTLHASLQSFQQERLSEITDLKDQLVAAEHSQTKAIEERHAALLRRWEQLLQASEVHRQELLEKRRPLLEAEVLFMEFAHKASAFNNWCEKAEEDLSEPVRCVSLDAIRKLRKDHEAFLASLTKARADFNDLRELDKQIKALNVLSSPYTWLTVEVLERVWNHLFDIIKEREQELENEEARQINNFEMCQEFEQNASAFLNWILETRDYFLDGSLLKETGTLESQLEANKRKQKEIQAKKHQLTKIEDLGESLEEALVLDLKYSTIGLAQQWDQLYQLGMRRQHSLEQQIQARDITGLSEETRQEFETTFRHFDENLTGRLSHKDFRSCLRGLNYYLPMVEEGEPEPKFEKFLDAVDPGRKGYISKDEYIDFLTDKESENIRSSDELEDSFQALAEGKAYITKEDMKQALTPEQVSFCASRMQQYVDPRGRSQPAGYDYVGFISSYFGN

SEQ ID NO: 774 - protein, 181 aa, Oryza sativa
  subsp. japonica
SSQPKRRLRRRGRRRRFSPVTTTTEAHACRCSAVLHPTAVSRTLSLVDPSTGDPHPSGPKNFGGIRGAVVLAERSCLQKYQFSHGDVVLFKCPSDHRELFVKRLIALPGEWMQLPGTPDIIKIPEGHCWVEGDNAACSWDSRSFGPIPLGLIKGRVAHVIWPPSKIGRVDTKMPENRISPL

SEQ ID NO: 775 - protein, 786 aa, Gallus gallus
MSQQDVVAVLSERLLIAAYKGQVDNVVQLINKGAKVAVTKHGRTPLHLAAHKGHLHVVQILLKAGCDLDIQDDGDQTALHRAAVVGNTDVIASLIQEGCALDRQDKDGNTALHEACWHGFSQSAKVLVKAGANVLAKNKAGNTPLHLACQNSHSQSTRVLLLGGSRADLKNNAGDTCLHVAARYNHLPIVRVLLSAFCSVHEKNQAGDTALHVAAALNHRKVVKLLLEAGADTSVVNNAGQTPLEVARQHNNPEVALLLTKASQVSRFNRGRSLRKKRERLKEERRAQSVPRDEVVQSKGSVSAADDTQSSDQPAQGKTELKDEPRSTSPDPKGKKSKKKKPKEKVSALSDPISPADQQTLPRPQQNVPKRRSRHHCSSPPAPHEVRAYQLYTLYRGKDGKVMQAPINGCRCEPLINKLENQLEATVEEIKAEFGTVQDKMNIKLGQMESKTQHQLRVLDKLMAERLSAERTECLHRLQQHSELEKTEGEKRQISLVDELKTWCMLKIQNLELKLSGDSRSSRPKSTLSTCESLTETLDTENNPHSAKDCRATQPLLPAEGSHQHSYMALPNSLLEDGGRSRVPVSEQSFGQQFCSAEQQLIVAGAVQSSAPAQDVRPKDKAVSASTFHRFQQELPSSELLGSKSRHVRVQAALQPLTEPAKTEPQSCYFLNKGTQTKKSSKSGQSRHKALHHAGAPQSQEQQHSTLPVGQSPGPALRDTSQALEITQYFFEAVSTQMEKWYERKIEEARCQANQKAQQDKAALKEHIKSLEEELSKLRTKVQKES

SEQ ID NO: 776 - protein, 616 aa, Bos taurus
LRFSESDTSRMSCVARSGGGGGGAFGFRSGAGGFGSRSLYNLGGNKSISISVAGSRAGGFGGGRSSCVSGFGSGYGGGYGGGFGGGRGMGGGFGGAGGFGGAGGFGGAGGFGGLGGFGGPGGFGPGGFGPGGFPGGIQEVTVNQSLLQPLNVEIDPQIGQVKTQEREQIKTLNNKFASFIDKVRFLEQQNKVLETKWSLLQQQGTHPITGTNNLEPLFENYINSLRSYLDSILGERGRLDSELRNMQDLVEDFKKKYEDEINKRTAAENEFVTLKKDVDAAYMNKVELQAKVDALTDEINFLTTLYDMELSQMQSHVSDTSVVLSMDNNRSLDLDSIIAEVKAQYEEIAQRSKAEAEALYQTKLGELQTTAGRHGDDLKSTKSEISELNRVIQRLRAEIENVKKQIAKLQSAIAEAEQRGELALKDANAKLQELQAALQQAKDDLARLLRDYQELMNVKLALDVEIATYRKLLEGEECRMSGECPSAVSISVVSSSSTTSASAGGFGGGYGGGVGVGGGARSGFGGGSGFGGGSGFGGGSGFGGGSGISGSSGFGGGSGSGFGGGSGFSGSSGFGGGSSGFGSGSGGRSGVSGGGLSSGSSRGGSVRFSQSSQRTS

SEQ ID NO: 777 - protein, 1958 aa, Sus scrofa
MAQQAADKYLYVDKNFINNPLAQADWAAKKLVWVPSDKSGFEPASLKEEVGEEAIVELVENGKKVKVNKDDIQKMNPPKFSKVEDMAELTCLNEASVLHNLKERYYSGLIYTYSGLFCVVINPYKNLPIYSEEIVEMYKGKKRHEMPPHIYAITDTAYRSMMQDREDQSILCTGESGAGKTENTKKVIQYLAHVASSHKSKKDQGELERQLLQANPILEAFGNAKTVKNDNSSRFGKFIRINFDVNGYIVGANIETYLLEKSRAIRQAKEERTFHIFYYLLSGAGEHLKTDLLLEPYNKYRFLSNGHVTIPGQQDKDMFQETMEAMRIMGIPEEEQMGLLRVISGVLQLGNIVFKKERNTDQASMPDNTAAQKVSHLLGINVTDFTRGILTPRIKVGRDYVQKAQTKEQADFAIEALAKATYERMFRWLVLRINKALDKTKRQGASFIGILDIAGFEIFDLNSFEQLCINYTNEKLQQLFNHTMFILEQEEYQREGIEWNFIDFGLDLQPCIDLIEKPAGPPGILALLDEECWFPKATDKSFVEKVMQEQGTHPKFQKPKQLKDKADFCIIHYAGKVDYKADEWLMKNMDPLNDNIATLLHQSSDKFVSELWKDVDRIIGLDQVAGMSETALPGAFKTRKGMFRTVGQLYKEQLAKLMATLRNTNPNFVRCIIPNHEKKAGKLDPHLVLDQLRCNGVLEGIRICRQGFPNRVVFQEFRQRYEILTPNSIPKGFMDGKQACVLMIKALELDSNLYRIGQSKVFFRAGVLAHLEEERDLKITDVIIGFQACCRGYLARKAFAKRQQQLTAMKVLQRNCAAYLKLRNWQWWRLFTKVKPLLQVSRQEEEMMAKEEELVKVREKQLAAENRLTEMETLQSQLMAEKLQLQEQLQAETELCAEAEELRARLTAKKQELEEICHDLEARVEEEEERCQHLQAEKKKMQQNIQELEEQLEEEESARQKLQLEKVTTEAKLKKLEEDQIIMEDQNCKLAKEKKLLEDRIAEFTTNLMEEEEKSKSLAKLKNKHEAMITDLEERLRREEKQRQELEKTRRKLEGDSTDLSDQIAELQAQIAELKMQLAKKEEELQAALARVEEEAAQKNMALKKIRELESQISELQEDLESERAARNKAEKQKRDLGEELEALKTELEDTLDSTAAQQELRSKREQEVNILKKTLEEEAKTHEAQIQEMRQKHSQAVEELAEQLEQTKRVWGPGTGSGRLYHRGREGVARGAQAPALSNSHSVHQPARPESFMDLEFSEAQPLSRPPLTVLESGWRIKGEVPGDSSEPWPSTLGPVAISSSPPGTLCSAKVTGGQNPYKISKTSRFWILSSDLNGLEDLRQLRRGSESPPHLGRDLPAGPAQVTDMRKKMEDGVGCLELAEEAKRKLQKDLEGLGQRFEEKVAAYDKLEKTKTRLQQELDDLLVDLDHQRQSVSNLEKKQKKFDQLLAEEKTISAKYAEERDRAEAEAREKETKALSVARALEEAMEQKAELERLNKQFRTEMEDLMSSKDDVGKSVHELEKSKRALEQQVEEMKTQLEELEDELQATEDAKLRLEVNLQAMKAQFERDLQGRDEQSEEKKKQLVRQVREMEAELEDERKQRSMAVAARKKLEMDLKDLEAHIDSANKNRDEAIKQLRKLQAQMKDYMRELEDTRASREEILAQAKENEKKLKSMEAEMIQLQEELAAAERAKRQAQQERDELADEIANSSGKGALALEEKRRLEARIAQLEEELEEEQGNTELVNDRLKKANLQIDQINTDLNLERSHAQKNENARQQLERQNKELKVKLQEMEGTVKSKYKASIAALEAKIAQLEEQLDNETKERQAACKQVRRAEKKLKDVLLQVDDERRNAEQYKDQADKASTRLKQLKRQLEEAEEEAQRANASRRKLQRELEDATETADAMNREVSSLKNKLRRGDLPFVVPRRMGRKGAGDCSDEEVDGKADGAEAKAAE

SEQ ID NO: 778 - protein, 1864 aa, Sus scrofa
TYSGLFCVVINPYKNLPIYSENIIEMYRGKKRHEMPPHIYAISESAYRCMLQDREDQSILCTGESGAGKTENTKKVIQYLAHVASSHKGRKDHNIPGELERQLLQANPILESFGNAKTVKNDNSSRFGKFIRINFDVTGYIVGANIETYLLEKSRAVRQAKDERTFHIFYQLLSGAGEHLKSDLLLEGFNNYRFLSNGYIPIPGQQDKDNFQETMEAMHIMGFSHVQRKAMLKVVSSVLQFGNISFKKERNTDQASMPENTVAQKLCHLLGMNVMEFTRAILTPRIKVGRDYVQKAQTKEQADFAVEALAKATYERLFRWLVHRINKALDRTKRQGASFIGILDIAGFEIFELNSFEQLCINYTNEKLQQLFNHTMFILEQEEYQREGIEWNFIDFGLDLQPCIDLIERPANPPGVLALLDEECWFPKATDKTFVEKLVQEQGSHSKFQKPRQLKDKADFCIIHYAGKVDYKADEWLMKNMDPLNDNVATLLHQSSDRFVAELWKDVDRIVGLDQVTGMAETAFGSAYKTKKGMFRTVGQLYKESLTKLMATLRNTNPNFVRCIIPNHEKRAGKLDPHLVLDQLRCNGVLEGIRICRQGFPNRIVFQEFRQRYEILTPNAIPKGFMDGKQACERMIRALELDPNLYRIGQSKIFFRAGVLAHLEEERDLKITDIIIFFQAVCRGYLARKAFAKKQQQLSALKVLQRNCAAYLKLRHWQWWRVFTKVKPLLQVTRQEEELQAKDEELLKVKEKQTKVEGELEEMERKHQQLLEEKNILAEQLQAETELFAEAEEMRARLAAKKQELEEILHDLESRVEEEEERNQILQNEKKKMQAHIQDLEEQLDEEEGARQKLQLEKVTAEAKIKKMEEEILLLEDQNSKFIKEKKLMEDRIAECSSQLAEEEEKAKNLAKIRNKQEVMISDLEERLKKEEKTRQELEKAKRKLDGETTDLQDQIAELQAQIDELKIQVAKKEEELQGALARGDDETLHKNNALKVVRELQAQIAELQEDFESEKASRNKAEKQKRDLSEELEALKTELEDTLDTTAAQQELRTKREQEVAELKKALEEETKNHEAQIQDMRQRHAAALEELSEQLEQAKRFKANLEKNKQGLETDNKELACEVKVLQQVKAESEHKRKKLDAQVQELHAKVSEGDRLRVELAEKANKLQNELDNVSTLLEEAEKKGIKFAKDAASLESQLQDTQNKQELLQEETRQKLNLSSRIRQLEEEKNSLQEQQEEEEEARKNLEKQVLALQAQLTDTKKKVDDDVGTIEGLEEAKKKLLKDAEALSQRLEEKALAYDKLEKTKNRLQQELDDLLVDLDHQRQIVSNLEKKQKKFDQLLAEEKNISARYAEERDRAEAEAREKETKALSLARALEEALEAKDEFERQNKQLRADMEDLMSSKDDVGKNVHELEKSKRALEQQVEEMRTQLEELEDELQATEDAKLRLEVNMQAMKAQFERDLQTRDEQNEEKKRLLIKQVRELEAELEDERKQRALAVASKKKMEIDLKDLEAQIEAANKARDEVIKQLRKLQAQMKDYQRELEEARASRDEIFAQSKESEKKLKSLEAEILQLQEELASSERARRHAEQERDELADEIANSASGKSALLDEKRRLEARIAQLEEELEEEQSNMELLNDRFRKTTLQVDTLNAELAAERSAAQKSDNARQQLERQNKELKAKLQELEGAVKSKFKATISALEAKIGQLEEQLEQEAKERAAANKLVRRTEKKLKEIFMQVEDERRHADQYKEQMEKANARMKQLKRQLEEAEEEATRANASRRKLQRELDDATEANEGLSREVSTLKNRLRRGGPISFSSSRSGRRQLHLEGASLELSDDDTESKTSDVNETQPPQSE

SEQ ID NO: 779 - protein, 1458 aa, Sus scrofa
AQTAHIVLEDGTKMKGYSFGHPSSVAGEVVFNTGLAGYPEALTDPAYKGQILTMANPIVGNGGAPDTTALDELGLSKYMESDGIKVAGLLVLNYSDDYHHWLATKSLGQWLQEEKVPAVYGVDTRMLTKIIRDKGTMLGKIEFEGQSVDFVDPNKQNLIAEVSTKDVKVYGKGNPTKVVAVDCGIKNNVIRLLVKRGAEVHVVPWNHDFTNMEYDGLLIAGGPGNPALAEPLIQNVKKILESDRKEPLFGISTGNLITGLAAGAKAYKMAMANRGQNQPVLNITNRQAFITAQNHGYALDSTLPAGWKPLFVNVNDQTNEGIMHESKPFFGVQFHPEVSPGPLDTEYLFDSFFSLIKKGKGTTITSVLPKPALVASRVEVSKVLILGSGGLSIGQAGEFDYSGSQAVKAMKEENVKTVLMNPNIASVQTNEVGLKQADTVYFLPITPQFVTEVIKAERPDGLILGMGGQTALNCGVELFRRGVLKEYGVKVLGTSVESIMATEDRQLFSDKLNEINEKIAPSFAVESIEDALKAADTIGYPVMIRSAYALGGLGSGICPNKETLLDLSTKAFAMTNQILVERSVTGWKEIEFEVVRDADDNCVTVCSMENVDAMGVHTGDSVVVAPAQTLSNVEFQMLRRTSINVVRHLGIVGECNIQFALHPTSMEYCIIEVNARLSRSSALASKATGYPLAFIAAKIALGIPLPEIKNVVSGKTSACFEPSLDYMVTKIPRWDLDRFHGTSSRIGSSMKSVGEVMAIGRTFEESFQKALRMCHPSIDGFTSRLPMNKEWPSNIDLRRELADPSSTRIYAIAKALEDNMSLDEIMKLTSIDKWFLYKMRDILNMEKTLKGLNSESITEETLKKAKEIGFSDKQISKCLRLTEAQTRELRLKKNIHPWVKQIDTLAAEYPSVTNYLYVTYNGQEHDINFDEHGMMVLGCGPYHIGSSVEFDWCAVSSIRTLRQLGKKTVVVNCNPETVSTDFDECDKLYFEELSLERILDIYHQEACGGCIISVGGQIPNNLAVPLYKNGVKIMGTSPLQIDRAEDRSIFSAVLDELKVAQAPWKAVNTLNEALEFAKSVGYPCLLRPSYVLSGSAMNVVFSEDEMKKFLEEATRVSQEHPVVLTKFIEGAREVEMDAVGKDGRVISHAISEHVEDAGVHSGDATLMLPTQTISQGAIEKVKDATRKIAKAFAISGPFNVQFLVKGNDVLVIECNLRASRSFPFVSKTLGVDFIDVATKVMIGENIDEKPLPTLEHPIIPADYVAIKAPMFSWPRLRDADPILRCEMASTGEVACFGEGIHTAFLKAMLSTGFKIPQKGILIGIQQSFRPRFLGVAEQLHNEGFKLFATEATSDWLNANNVPATPVAWPSQEGQNPSLSSIRKLIRDGSIDLVINLPNNNTKFVHDNYVIRRTAVDSGIALLTNFQVTKLFAEAVKKSRNVDAKSLFHYRQYGAGKAA

SEQ ID NO: 780 - protein, 222 aa, Bos taurus
MKFFIFTCLLAVALAKNTMEHVSSSEESIISQETYKQEKNMAINPSKENLCSTFCKEVVRNANEEEYSIGSSSEESAEVATEEVKITVDDKHYQKALNEINQFYQKFPQYLQYLYQGPIVLNPWDQVKRNAVPITPTLNREQLSTSEENSKKTVDMESTEVFTKKTKLTEEEKNRLNFLKKISQRYQKFALPQYLKTVYQHQKAMKPWIQPKTKVIPYVRYL

SEQ ID NO: 781 - protein, 591 aa, Meleagris gallopavo
MSRISYRSSTGGGMRGFSSGSAIVGGGSGTRSSFSSVSVSRVGGGRAGGGGGFGAGGGFGSRSLYNLGGSKRISLGGGLRSGAGAGYGFGGGAGFGLGYGGGAGAALGLGGAGGGGGYGLGGFGMGGPGFGGRGGPGFPCPPGGIHEVTVNQSLLAPLKLDIDPEIQKVRTHEREQIKTLNNKFASFIDKVRFLEQQNKVLETKWSLLQEQGHTVTRKSLEPLFESYINNLRRQLDSLMGERGRLDSELRSMQDMVEDFKNKYEDEINRRTGAENEFVVLKKDVDGAYMNKVELQAKADGLADEINFLRALYEAELSQMQQQVSDTSVVLSMDNNRSLDLNSIIAEVKAQYEDIANRSRAEAEAWYQNKYEELQVSAGRHGDDLRNTKMEISEINRMVQRLRNEIESVKKQCASLQAAIAEAEERGEMALKDAKSKLAELEDALQKAKADLARQLREYQELMNVKLALDIEIATYRKLLEGEESRLAGEGVGAVSVSVVSSSSGMGYGGGMGGGLGMGGGLGMGSGLGMGGGGSYTMSSSGGGGGFGGGSASYSYGGGSNFSSSSSRGVSSSTGGSVRIVSKTTTSKKTIR

SEQ ID NO: 782 - protein, 466 aa, Sus scrofa
MSTRTVSSSSYRRMFGGPGTASRPSSSRSYVTTSTRTYSLGSALRPSTSRSLYTSSPGGVYATRSSAVRLRSSVPGVRLLQDAVDFSLADAINTEFKNTRTNEKVELQELNDRFANYIDKVRFLEQQNKILLAELEQLKGQGKSRLGDLYEEEMRELRRQVDQLTNDKARVEVERDNLAEDIMRLREKLQEETLQREEAESTLQSFRQDVDNASLARLDLERKVESLQEEIAFLKKLHDEEIQELQAQIQEQHVQIDMDVSKPDLTAALRDVRQQYESVAAKNLQEAEEWYKSKFADLSEAANRNNDALRQAKQESNEYRRQVQSLTCEVDALKGTNESLERQMREMEENFAVEAANYQDTIGRLQDEIQNMKEEMARHLREYQDLLNVKMALDIEIATYRKLLEGEESRISLPLPNFSSLNLRETNLESLPLVDTHSKRTLLIKTVETRDGQVINETSQHHDDLE

SEQ ID NO: 783 - protein, 369 aa, Solanum lycopersicum
MLCRGTFQAGNVAIGDHNECYKRFFNSVSIGCRKSFVSSCSVGARSGPVLAVATNETTKTKQMAYEPSLADRLRLGTMSEDGMSYKEKFIVRCYEVGINKTVTVETIANLLQEVGCNHAQSVGFSTDGFATTHSMRKLHLIWVTARMYIEIYKYPAWSDVVEIETWCQSEGRIGTRRDWILKDCATGEVIGRATSKWLMMNQDTRRLQKVTDEVRDELELYFPKELRLAFPEENNGSLKKIAKLEDPAEYSKLGMVPRRADLDMNQHVNNVTYIGWVLESIPQEIIDTHELETITIDYRRECQHDDVVDSLTSVEPIEDADALESHGSNGSATAPKDVNKSFLHLLRLSSDGLEINRCRTEWRKKSART

SEQ ID NO: 784 - protein, 811 aa, Saccharomyces cerevisiae
  strain FostersB
MLRQATKAPIQKYLQRTQLLRRSTPRIYTIVQCKRSICSFNARPRVANKLLSDIKTNALNEVAISTCALKSSYGLPNFKRTYVQMRMDPNQQPEMPALEQFGTNLTKLARDGKLDPVIGRDEEIARAIQILSRRTKNNPCLIGRAGVGKTALIDGLAQRIVAGEVPDSLKDKDLVALDLGSLIAGAKYRGEFEERLKKVLEEIDKANGKVIVFIDEVHMLLGLGKTDGSMDASNILKPKLARGLRCISATTLDEFKIIEKDPALSRRFQPILLNEPSVSDTISILRGLKERYEVHHGVRITDTALVSAAVLSNRYITDRFLPDKAIDLVDEACAVLRLQHESKPDEIQKLDRAIMKIQIELESLKKETDPVSVERREALEKDLEMKNDELNRLTKIWDAERAEIESIKNAKANLEQARIELEKCQREGDYTKASELRYSRIPDLEKKVALSEKSKDGDKVNLLHDSVTSDDISKVVAKMTGIPTETVMKGDKDRLLYMENSLKERVVGQDEAIAAISDAVRLQRAGLTSEKRPIASFMFLGPTGTGKTELTKALAEFLFDDESNVIRFDMSEFQEKHTVSRLIGAPPGYVLSESGGQLTEAVRRKPYAVVLFDEFEKAHPDVSKLLLQVLDEGKLTDSLGHHVDFRNTIIVMTSNIGQDILLNDTKLGDDGKIDTATKNKVIEAMKRSYPPEFINRIDDILVFNRLSKKVLRSIVDIRIAEIQDRLAEKRMKIDLTDEAKDWLTDKGYDQLYGARPLNRLIHRQILNSMATFLLKGQIRNGETVRVVVKDAKLVVLPNHEEGEVVEEEAEK

SEQ ID NO: 785 - protein, 462 aa, Bos taurus
MGKEKTHINIVVIGHVDSGKSTTTGHLIYKCGGIDKRTIEKFEKEAAEMGKGSFKYAWVLDKLKAERERGITIDISLWKFETSKYYVTIIDAPGHRDFIKNMITGTSQADCAVLIVAAGVGEFEAGISKNGQTREHALLAYTLGVKQLIVGVNKMDSTEPPYSQKRYEEIVKEVSTYIKKIGYNPDTVAFVPISGWNGDNMLEPSANMPWFKGWKVTRKDGNASGTTLLEALDCILPPTRPTDKPLRLPLQDVYKIGGIGTVPVGRVETGVLKPGMVVTFAPVNVTTEVKSVEMHHEALSEALPGDNVGFNVKNVSVKDVRRGNVAGDSKNDPPMEAAGFTAQVIILNHPGQISAGYAPVLDCHTAHIACKFAELKEKIDRRSGKKLEDGPKFLKSGDAAIVDMVPGKPMCVESFSDYPPLGRFAVRDMRQTVAVGVIKAVDKKAAGAGKVTKSAQKAQKAK

SEQ ID NO: 786 - protein, 725 aa, Gallus gallus
MPEQVQHGEDEVETFAFQAEIAQLMSLIINTFYSNKEIFLRELISNASDALDKIRYESLTDPSKLDTGKDLKIDIVPNPRDPTLTLLDTGIGMTKADLVNNLGTIAKSGTKAFMEALQAGADISMIGQFGVGFYSAYLVAEKVVVITKHNDDEQYAWESSAGGSFTVRTDHGEPIGRGTKVILYLKEDQTEYLEERRVKEVVKKHSQFIGYPITLYVEKEREKEVSDDEAEEEKVEKEEEESKDEEKPKIEDVGSDEEEEEGEKSKKKKTKKIKEKYIDQEELNKTKPIWTRNPDDITQEEYGEFYKSLTNDWEDHLAVKHFSVEGQLEFRALLFIPRRAPFDLFENKKKKNNIKLYVRRVFIMDSCDELIPEYLNFIRGVVDSEDLPLNISREMLQQSKILKVIRKNIVKKCLELFTELAEDKENYKKFYEAFSKNLKLGIHEDSTNRKRLSELLRYHTSQSGDEMTSLSEYVSRMKESQKSIYYITGESKEQVANSAFVERVRKRGFEVVYMTEPIDEYCVQQLKEFDGKTLVSVTKEGLELPEDEEEKKNMEESKAKFETLCKLMKEILDKKVEKVTISNRLVSSPCCIVTSTYGWTANMERIMKAQALRDNSTMGYMMAKKHLEINPDHPIVETLRQKADANKNDKAVKDLVVLLFETALLSSGFSLEDPQTHSNRIYRMIKLGLGIDEDEVIAEESSIAPPDEIPPLEGDEDTSRMEEVD

SEQ ID NO: 787 - protein, 382 aa, Oryza sativa
  subsp. japonica
MAEQANQPTVLQKFGGQFHLGSSFSEGVRARNICPSVSSYDRRFTTRSYMTQGLVNGGINVPMMSSSPIFANAPAEKGGKNFMIDFLMGGVSAAVSKTAAAPIERVKLLIQNQDEMIKAGRLSEPYKGIGDCFGRTIKDEGFASLWRGNTANVIRYFPTQALNFAFKDYFKRLFNFKKDKDGYWKWFGGNLASGGAAGASSLFFVYSLDYARTRLANDAKAAKGGGERQFNGLVDVYRKTLKSDGIAGLYRGFNISCVGIIVYRGLYFGMYDSLKPVVLTGSLQDNFFASFALGWLITNGAGLASYPIDTVRRRMMMTSGEAVKYKSSMDAFSQILKNEGAKSLFKGAGANILRAIAGAGVLSGYDQLQILFFGKKYGSGGA

SEQ ID NO: 788 - protein, 528 aa, Bos taurus
MLGLVGRVVAASASGALRGLSPSAPLPQAQLLLRAAPAALQPARDYAAQASPSPKAGATTGRIVAVIGAVVDVQFDEGLPPILNALEVQGRETRLVLEVAQHLGESTVRTIAMDGTEGLVRGQKVLDSGAPIRIPVGPETLGRIMNVIGEPIDERGPIKTKQFAAIHAEAPEFVEMSVEQEILVTGIKVVDLLAPYAKGGKIGLFGGAGVGKTVLIMELINNVAKAHGGYSVFAGVGERTREGNDLYHEMIESGVINLKDATSKVALVYGQMNEPPGARARVALTGLTVAEYFRDQEGQDVLLFIDNIFRFTQAGSEVSALLGRIPSAVGYQPTLATDMGTMQERITTTKKGSITSVQAIYVPADDLTDPAPATTFAHLDATTVLSRAIAELGIYPAVDPLDSTSRIMDPNIVGSEHYDVARGVQKILQDYKSLQDIIAILGMDELSEEDKLTVSRARKIQRFLSQPFQVAEVFTGHLGKLVPLKETIKGFQQILAGEYDHLPEQAFYMVGPIEEAVAKADKLAEEHS

SEQ ID NO: 789 - protein, 428 aa, Oryza sativa
  subsp. japonica
TCQAIVKSTIGIGVDEEDRKRTWVADAEECKKRGSIETARAIYAHALSVFVSKKSIWLKAAQLEKSHGTKESLYNLLRKAVTYNPRAEVLWLMSAKEKWLAGDVPAARAILQEAYASLPNSEEIWLAAFKLEFENNEPERARILLSKARERGGTERVWMKSAIVERELGNVDEERKLLEEGLKLFPSFFKLWLMLGQMEDRLGHGSKAKEVYENALKHCPSCIPLWLSLANLEEKINGLSKSRAVLTMARKKNPATPELWLAAVRAELRHGNKKEADALLAKALQECPTSGILWAAAIEMVPRPQRKAKSSDAIKRCDHDPHVIAAVAKLFWHDRKVDKARSWLNRAVTLAPDIGDFWALYYKFELQHGNADTQKDVLQRCVAAEPKHGERWQAITKAVENSHLSIEALLKKAVLALGQEENPNAADP

SEQ ID NO: 790 - protein, 128 aa, Ovis aries
MQIFVKTLTGKTITLEVEPSDTIENVKAKIQDKEGIPPDQQRLIFAGKQLEDGRTLSDYNIQKESTLHLVLRLRGGIIEPSLRQLAQKYNCDKMICRKCYARLHPRAVNCRKKKCGHTNNLRPKKKVK

SEQ ID NO: 791 - protein, 769 aa, Bos taurus
MRLSSVLALLRPALPLILGLSLGCSLSLLRVSWIQGEGDDPCVEAVGKAGGPQSLDSRTQLDQSDEDFKPRIVPYYRDPNKPYKKVLRTRYIQTELGSRERLLVAVLTSRATLSTLAVAVNRTVAHHFPRLLYFTGQRGARTPAGMQVVSHGDERPAWLMSETLRHLHTHFGADYDWFFIMQDDTYVQAPRLAALAGHLSINQDLYLGRAEEFIGAGEQARYCHGGFGYLLSRSLLLRLRPHLDGCRGDILSARPDEWLGRCLIDSLGIGCVSQHQGQRYRSFELAKNRDPETESSLAFLSAFAVHPVSEGTLMYRLHKRFSALELERAYSEIEQLQAQIRNLTALTPEGEAGLSWPLGLPAPFTPHSRFEVLGWDYFTEQHTFSCVDGAPKCPLQGASRADVGDAVETALEQLNRRYQPRLRFQKQRLLNGYRRFDPARGMEYTLDLLLEAVTQRGHRRALARRVSLLRPLSRVEILPMPYVTEATRVQLVLPLQAAEAAAAPTFLEAFAAGVLEPREHALLTLLLVYGPREGGRGAPDPFVGVKAAAAELERRYPGTRLAWLAVRAEAPSQVRLMDVVSKKHPVDTLFFLATVWTRPGPEVLNRCRMNAISGWQAFFPVHFQEFNPALAPQRPPPGAGPDPPSPPGADPARGAAGGGRFDRQASAEGCFYNADYLAARARLAADLAGQEEEEALEGLEVMDVFLRFSGLHLFRAVEPGLVQKFSLRDCSPRLSEELYHRCRLSNLEGLGGRAQLAMALFEQEQANST

SEQ ID NO: 792 - protein, 1744 aa, Gallus gallus
MALAELYTQYNRVWIPDSEEVWQSAEITKDYKAGDRFLHVQLEDGTELHYPVDPSALPPLRNPDILVGENDLTALSYLHEPAVLHNLKVRFVESRLIYTYSGIILVAINPYKQLPIYGDAIIHAYSGQNMGDMDPHIFAVAEEAYKQMARNGKNQSIIVSGESGAGKTVSARYTMRYFATVSKSSSNAHVEDKVLASNPITEAVGNAKTTRNDNSSRFGKYTEISFDQRYRIIGANMRTYLLEKSRVVFQSENERNYHIFYQLCASAMQPEFKHLKLGSAEEFNYTRMGGSTTIEGVDDRANMIETQKTFALLGLKEDFQMDVFKTLAAILHLGNLEITAVGDERSSINLEDNHLNIFCELLELNSDKMAQWLCHRKIITTSETVIKPMTKPQALNARDALAKKIYSHLFDFIVERINQALQFSGKQHTFIGVLDIYGFETFDVNSFEQFCINYANEKLQQQFNLHVFKLEQEEYMKEDIPWTLIDFYDNQPVIDLIEAKMGILELLDEECLLPHGTDENWLQKLYNNFVNKNTLFEKPRMSNTSFIIQHFADKVEYKCEGFLEKNRDTVYEVLMEILKESKFRLCANFFQDNPVSVSPFSSTISIKSARPVLKSPNKQLRMTVGSKFRSSLSLLMETLNATTPHYVRCIKPNDEKRPFEFDSKRVAQQLRACGVLETIRISAQSYPSRWTYIEFFSRYSILMTQQELSVNDKKQICKIVLQRLIQDPNQYQFGRTKIFFRAGQVAYLEKLRSDKLRHACVVIQKSVRGWLQRRRFLCLRRAALTIQQYFRGQRTVRLRQAITARALKETWAAIIIQKYCRGYLVRKLCQLIHVAAVTIQAHTRGFLARKKYRKMLEEHKAVILQKYARAWLARRRFQNVRRFVLNIQLSYRVQRLQKKIEEQSKENHGLLERLTNLASTHMNDLDTIQKLESELEKLAAQKRTYEEKGKKYKEDSEQKILKLESQNKELREQKETLEVKLQEKTEEMKEKMDDLTKQLFDDVRKEESQRMILEKNFQNQRQDYEKEIESLKGEIKVLREEKTQLQQQIQQEMSIQDDLKMEVGQLTKQVQKIPELQKEIELLQTQKLDVEKQAQSQKREMREKMSEVTKQLLESYDFEDVRSRLSTEDLEHLNEDGELWFAYEGLKKATRVLESHFQTQKENYEKEIEGLNLKVEHLSQDINHLQKLFREENDINDGIRLEVSRLTSENLVIPDLKQQVSELENQKLDLENRLQEQTAKLKGKSIAKEISNRLHHEPEGDRTLRRTNEVQNEADMKEERLNVIPQEMEGLSNGLKQDEVQAEVKSKMKQETTRLTVENMDLEEELDMKDRIIKKLEDQIKTLTKTTEKDGEVHVSALPKEYIGMMEYKREDEERIVQNLILDLKPRGVVVNMIPGLPAHILFMCVRYADYLNDADMLKSFINVTIDGIKQVVKENSEDFEMLSFWLSNTYYFLNCLKQYSGEEEFMKYNTPHQNKNCLKHFDLSEYRQVLSDLAIRIYHQFILVMENNIQHMVVPGMLEYESLQGISGLKPTGFRKRSSSIDDTDTYTMTSILQQLSYFYSTMCQNGLDPELLKQAVKQLFFLIGAVTLNSLFLRKDMCSCRKGMQIRCNISYLEEWLKDKNLQSSNAKETLEPLSQAAWLLQVKKITDDDAKEICEHCTSLSTVQIVKILNSYTPIDDFEKRVTPSFVRKVQAMLNNREDGPQLMLDTKYRFQVTFPFTPSPHALEMIQVPSSFKLGFLTRV

SEQ ID NO: 793 - protein, 220 aa, Glycine max
MAFKLYGLPMSTNTTRAMICLHEKEVDFELVPVNVFAAEHKQPPFLSKNPFGLIPLLEDGDLTLFESRAITAYVAEKFKETGADLIRHKDAKEAALVKVWTEVESHYYEPAVSPIIYEYFVAPFQGKEPDKSVIDTNVEKLKKVLDVYEAKLSSTKYLAGDFYSLADLSNVSETHYLMQTPCASTVNERPHVKAWWEDISSRPAFTKVVGGMTFGQNQEE

SEQ ID NO: 794 - protein, 1021 aa, Glycine max
MQLVHSDEPAPERRDWPEKPEDPKADNDSLDSGTDDGAALDVTGKSVEFPAAENAEDSAECLYVYKNVYSLIPKSVSRLARLRTLKFFGNEINLFAPEFGNLTTLECLQMKISSPGIGGLPLHTLKGLKELELSKGPPRPSAFPILTEISGLKCLTKLSICHFSIRYLPPEIGCLKKLEYLDLSFNKMKTLPAEITYLKGLISMKVANNKLVELPAAMSSLSRLESLDLSNNRLTSLGSLELASMHRLQELNLQYNKLLRIFQIPSWMCCNMEGNDEARYKDDCSSSVEMDLYESNFQENDETLSDGPHNTSSSMLTSPSSSSRCFASRKSGKRWKRRYYLQQKARQERLNNSRKWKAVDHDDLLLSKKIHRISESGNHDSLASESCAEIESENGSLDDNNKRIFSERAVNDNAIDNDNNDEVITEKQFSGEDCCTTESKDEKDASLCSLEKRQSEQEEASCLELLESVSKSKRHLDRDLDNPKPCKSRKSISSSSLLSCKYSKISFCGTEDHLSDGFYDAGRDRPFMPLESYEQNQCLASREVILLDRKRDEELDAVMLAAQALVYNLKKLNGLNRHGNQVGVDNLQTASLLALFVSDHFGGSDRSAIVERTRKSVSGSNYNKPFVCTCSAGSSTSISSPTEPVANTIEDITLSKMSEKSLDSMKKRQNSIIIPIGSVQYGVCRHRALLFKYLCDHMEPPVPCELVRGYLDFSPHAWNIILIKRGATWVRMLIDACQPLDIREEKDPEYFCRYIPLNRTTIPLSTIGCPGPDYSFPSLTTCDELETKASTSLVKCKFGSVEAAAKVRTLEEQGSSADKIKNFKYNCLGEIRILGALKHPCIVEMYGHQISCQWSVSADGNPEHRVLRSAIFMEYVEGGSLKSYLEKLSEAGEKHVPVELALLIAKDVSCALSELHSRHIIHRDIKSENILFDLDRKRDDGTPTVKLCDFDSAVPLRSTLHACCIAHAGTPPPCVCVGTPRWMAPEVMRTMYKKNSYGLVRSSSYQSAIYFEFITNCVADI

SEQ ID NO: 795 - protein, 1849 aa, Oreochromis niloticus
MAAQDELNQLERVFLRLGHAETDEQLQDIISKFLPPVLLKLSSVQEGVRKKVMELLVHLNKRIKSRPKIQLPVETLLVQYQDPAAASFVTNFTIIYIKMGYPRLEVVKQCELAPTLITAMEGKPQPQQDSLMHLLIPTLYHIKYPTDTSKSASLFNLTERPKTMHLLLEFMLDVLLMPYGFVLNESPTRPAPSSSQGTSGDGTVAASSQGLPQPPPGMSVYAAKRVIGEAQWNAEQLEQCKLGIVKFIEAKQVPEVETVVHLVVASSDTRHSVATAADLELKSKQSIIDWNNPLIINKMFKVYLGDVPLKTKGGGMKQELKHEPVSTRVKLKILPHLLRSRLAAECFPANIQVVYDGLFGANTNNKLLSLTLQFVHHICMVCPDTNKPLGLMLLNGLTKLINEYKEDPKLLCVAYSAVGKLSSRMPQLFTKDIALVQQFFESMCKEEADVRLAIQEALSMMVGAYANLQGALLNLMEALVAAYIGKPEVQVRQVAMKFASTVFAPDHVPSRYLLLLAAGDPREEVSGEAQRVLRAFHAKSSEKEGPKPMPSFPDMVAYVQEKAAQRIKTPAKYIVGTSTIPFNPSAFGEIMLYLRMCLAHSAGAMPMSTRLSDMQDDAPAIGHYVHTLLFSDSQPSGSKGSEANPVHVYMDLLQQLLSAVGGIPVMYCLLEVVSVCPEKLAPRFADKIDWIKSLMNTNKEDMRELAAQLYAVVVSTMTGNELQKAVQNLVKITKDNHSPETQHGAILALGYMVGRNMSRKKAATSIDSTENMGQQMNISSQEDDELAAMATKTIGSFLDNSSAMLAIAACTALGEIGRNGPLLIPAEGEGLTKLSVVENLLARIPSGKESTKMKERAIMTLGYLPVGDEDFPHQKKLLQGLMDSVEAKQVELQFTVGEAITSGAVGTSSGAARDPWTCTEDHYTPPQNVKNNDVVPWVLNAILTKYITSQNPHVRQAACIWLLSLVKKLSQHKEITSHLKEIQGAFISVLSDPDELSQDVASKGLGLVYEMGGEGDQQELVSTLVETLMTGKRVKHAVSGDTEVFQGEGLGKTPDGHGLSTYKELCSLASDLNQPDLVYKFMNLANHHAMWNSRKGAAFGFHMIAAKAGEQLAPFLPQIIPRLYRYQFDPNLSIRQAMTSIWDALVTDKTLVDKYLKEILQDVISNLTNNAWRVRESSCLALNDLIRGRQADDLIDHLAEIWETLFRVLDDIKESVRKAADLTLKTLSKVCTRMCESTGSGAQRTVAVILPTLLEKGIVSNVAEVRSLSIQTLVKISKTAGARLKPHASRLIPALLESLSTLEPQVLNYLSLRATEQEKSAMDAARLSAAKASPMMETVNMCLQHLDVAVLGELVPRLCDLLKSGVGLGTKGGCASVIVSLTVQCPQDLTPHSGKLMSSLLNGIHDRSTVVQKAYAFALGHLVRTAKDSSVEKLLLKLNTWYLEKEEPVYKSSCALTVHAISHYSPDVLKGHAGVALPLAFLGMHQAPGPDEEKGESHDATLWSEVWQENVPGSFGGIRLYMTELIAITQKALQSQSWKMKAQGAAAMATVAKEQTGSLVAPHLGLVLTALMQGLSGRTWAGKEELLKAIGSVVSKCSTELQKPCSGQPTISEVLEVVLKECRKESLVYKIAALRCAGDVLHSSQEDRFADMAEILFPLIKKRSPESGAGSPRSLEDDDDDDDKDVKEKELQTEAIICAFETLGKSWPRKPETQTRFQAEVCNLMCEKLKLSTWKVQLAVLQSMKAYFQGLLLLEKGNEDLNSLSEILTETCAALTYPLENKSYSSVRTEALSVVDLIVKRTGESEQWDCVSVKSREQLQRSLSTLQSDSRPDLRDKAQELRRHIQSQP

SEQ ID NO: 796 - protein, 1313 aa, Ovis aries
MAAAATAGEPGTTEPSPRARPHRATFRQQAGSRNRKRNWLGRPLTSFPRRDGVNVVSVVTGLRVLFGAWDSGVAGSKMSVLTSPRGKVEVVHCRRTESQDIYCIKNLIRKFTQKLFGNLNIIYLLEKANLAITLHNDQEEIMAQATFLDYPNWNIATQDDWVSVFRELDSDIPCTPLNTLFMHLFVAVDEYSVGCCKEIIRTVFKAVLDLHFVFLIVPSCMSLGSTLITVFSQVGYVPSLTNDEEFAVHVCHRHNHYPQLHIRKARVEDHDNLMPIFLHHDTILKETYGEYFLAELIEAQDEENHAVVCEVEGVAVGFMSVCSQVNLELLHKCFDLGPFHGLCVPHQDDILEPPQEFSIHESSDSKLENSGEESQKIVKEPQEAVSLETRESIQRKGTEAAVEEALSPVTSENTGEVEDSEKLSQVSSMVYMGYYISHRSSLSLSLAEDASSFRPIYKGASTAFCIQLFFIDEKYEARSLDFMNFVFHLFRDKDFCIISVPHLTPEFVLIQSFVKVVPFNNCTLEQDLYVFHRAGLLKTIEIRLATLSDTPGVEKLISTLMPCKSILEDLKQYNEARRDPDGTPLQVFVAEVAEQVVGIAVIRNEMDIEYIRSHYNIEDFIYFNHHQREEHGHLYHFVLNPIFRHYTKFFLKEILRLGYKSCLYYPVYPQVKEGKVQSPKAHSLTSALHYLVPVRPRRQIVYPLEKLGINAPSKEVSKGTLSYALNHTNRKLSLEPKITVNAKIVVVGASNVGISFLETLVFCSHLKFSNLTLISTYGLPGKKLLGNEQRKFLANDHCYNDRDHELMSLCSWVNVVAARMTAIDRAAKQVIVSREKVVLYDHLILCTGRQYQVPCPTEVDISLHPTNREVSNSCLRRYTGPIPCNHFTLNDEEDCLRALAWIKNNSITTEGNVIIYGNSIDTYTTVETLLNLGVRGSCIHLVQHPPTSIITCINDCAVEGAIEEALQAAGVNVYRDALLAQWNNGLYSDPIHTASFTTPAKPFQLPCSMFFSFLEKNVDYETFKAFNDACLVYDGRLVIDSNFHTNDIAIRAAGPLTKFSNRYYSNEWTHSNFNSKEIGFQLAAAMLKLFDPTLEPVTEPPADLDRLIPMYKGAKIKGGILPGSYHYLHVSKPAIPTPLEVQRAQSDFGSEIVTGNVKNGNYFRIHINKYRMVETITCLSKVPFPASNYIRLFGQHEQALNNLCARYEDGLVPDLYSYFTEPWCMALFHDRFIDLRKALHQILSSKEDENLPSMEELARQIEDEEINLPEKPRNYLKRVFQETIYRPLVEKSILDYLHYNHYHLPMYAWPGII

SEQ ID NO: 797 - protein, 380 aa, Saccharomyces cerevisiae
  strain FostersB
  MOD_RES (17)..(17): Any amino acid
  MOD_RES (221)..(221): Any amino acid
MTQTSPSPNQNSIQSKXSNQNMLTNLSQLNETLKEALSNYMIQRTSEVITELNTQYENSKREFEKNLQKNLLQEVDEFKENLTKQKDKELEEKLKANEELLQAKHANEVGLLSITQVKEFNKIIKDKIEKERNGRLAHLEEINSEVNDLSKSIDRSSKILSKNEALVQLTFQVDEIKSRINNNNLPDVNIDKELSRLKLLSNLLSTFNKKSCCDDGDCCSXKKGNKNEGKEGKISCKCKPKTNPPSLLSVALDELESTCSGKKILSNEQIYNRWNLLADDFKTASLLPPNSGILGQLTAKVFSLFLFTKTGNPSNATDFDSVYARVGDNLRVSNLNDAVEEVVSLKGWPHKVCESWIEDARRKLEVQRLVEILDCEIRTL

SEQ ID NO: 798 - protein, 603 aa, Saccharomyces cerevisiae
  strain FostersB
  MOD_RES (517)..(517): Any amino acid
MLSPERRPSMAERRPSFFSFTQNPSPLVVPHLAGIEDPLPATTPDKVDVLIAGTGMVESVLAAALAWQGSNVLHIDKNDYYGDTSATLTVDQIKRWVNEVNEGSVSCYKNAKLYVSTLIGSGKYSSRDFGIDLSPKILFAKSDLLSILIKSRVHQYLEFQSLSNFHTYENDCFEKLTNTKQEIFTDQNLPLMTKRNLMKFIKFVLNWEAQTEIWQPYAERTMSDFLVEKFKLEKPQVFELIFSIGLCYDLNVKVPEALQRIRRYLTSFDVYGPFPALCSKYGGPGELSQGFCRSAAVGGATYKLNEKLVSFNPTTKVATFQDGSKVEVSEKVIISPTQAPKDSKHVPQQQYQVHRLTCIVENPCTEWFNEGESAAMVVFPPGSLKSGNKEVVQAFILGAGSEICPEGTIVWYLSTTEQGPRAEMDIDAALEAMEMALLRESSSGLENDEEIVQLTGNGHTIVNSVKLGQSFKEYVPRERLQFLFKLYYTQYTSTPPFGVVNSSFFDVNQDLEKKYIXGASDNGVIYTTMPSAEISYDEVVTAAKVLYEKIVGSDDDFFDLDFEDEDEIQASGVANAEQFENAIDDDDDVNMEGSGEFVGEMEI

SEQ ID NO: 799 - protein, 496 aa, Saccharomyces cerevisiae
  strain FostersB
MTAAHPVAQLTAEAYPKVKRNPNFKVLDSEDLAYFRSILSNDEILNSQAPEELASFNQDWMKKYRGQSNLILLPNSTDKVSKIMKYCNDKKLAVVPQGGNTDLVGASVPVFDEIVLSLRNMNKVRDFDPVSGTFKCDAGVVMRDAHQFLHDHDHIFPLDLPSRNNCQVGGVVSTNAGGLNFLRYGSLHGNVLGLEVVLPNGEIISNINALRKDNTGYDLKQLFIGAEGTIGVVTGVSIVAAAKPKALNAVFFGIENFDTVQKLFVKAKSELSEILSAFEFMDRGSIECTIEYLKDLPFPLENQHNFYVLIETSGSNKRHDDEKLTAFLKDTTDSKLISEGMMAKDKADYDRLWTWRKSVPTACNSYGGMYKYDMSLQLKDLYSVSAAVTERLNAAGLIGDAPKPVVKSCGYGHVGDGNIHLNIAVREFTKQIEDLLEPFVYEYIASKKGSISAEHGIGFHKKGKLHYTRSDIEIRFMKDIKNHYDPNGILNPYKYI

SEQ ID NO: 800 - protein, 223 aa, Ovis aries
MKFFIFTCLLAVALAKHKMEHVSSSEEPINISQEIYKQEKNMAIHPRKEKLCTTSCEEVVRNANEEEYSIRSSSEESAEVAPEEVKITVDDKHYQKALNEINQFYQKFPQYLQYLYQGPIVLNPWDQVKRNAGPFTPTVNREQLSTSEENSKKTIDMESTEVFTKKTKLTEEEKNRLNFLKKISQYYQKFAWPQYLKTVDQHQKAMKPWTQPKTNAIPYVRYL

SEQ ID NO: 801 - protein, 894 aa, Glycine max
MAVETSDKPNLPHDFEDDDDGPVIYKRYSSSKKNQSHSEVRKSSSHSHDGQSYRQISNAPSSSGQTSCLQKGNTVPSAKPSPVKPSVGISKASKSLVNTSSTKLPVANSKSPSLGDRQKMSVDIKGEPKTIEHHAKNFVEDSEDDEDNKPLSFRLKNSNHDNKVTSVIAKKSSEDSDDDVPLAKKLYRNSNLGTTSSNHDDSNQKKPISKIQKEQKNGSGMSNKLDRPSPLPAKRPLDNSNSLHPSVKKSKVLDPVASIKSKAVSVKHELKVEDDDDDDDIPISQRIKKSAMSGDKSSSMKKVLTKVTKVNKPGSKPFKKQIKKTVKKSGSGSEYSKSSKILPSSGDGQKKWTTLVHNGVIFPPPYQPHGVKMLYKGRPVDLTPEQEEVATMYAVMRDTEYMQKDKFKENFWNDWRKLLGRNHVIQNLKDCDFTPIYDWYQSEKDKKKQMTTEEKKALKEEKMKLEEKYMWAIVDGVKEKVGNFRVEPPGLFRGRGEHPKMGKLKKRIHPGDITINIAKDAPIPECPIPGERWKEIRHDNTVTWLAYWSDPINPKLFKYVFLAASSSLKGQSDKEKYEKARTLKDYIGNIRSAYTKDFTSKDITKQQIAVATYLIDKLALRAGNEKDDDEADTVGCCTLKVENVTREPPNKLKFNFLGKDSIKYENTVEVELPVYNAILKFQKDKKPGDDLFDKLDTSKLNAHLKELMPGLTAKVFRTFNASITLDVMLNKETKDGDVGEKIVVYQHANKQVAIICNHQRSVSKSHTAQMSKLTEKIDELQAVLKELKTDLDRARKGKPPSKSSDGKRKKNLSPEMLEKKISQTNAKIEKMQRDMKTKEDLKTVALGTSKINYLDPRITVAWCKRHEVPIEKIFNKSLLAKFCWAMDVDPDFRF

SEQ ID NO: 802 - protein, 525 aa, Bos taurus
MSRQFTCKSGAAAKGGFSGCSAVLSGGSTSSYRAGGKGLSGGFGSRSLYNLGGVRSISFNVASGSGKSGGYGFGRGRASGFAGSMFGSVALGPMCPTVCPPGGIHQVTVNESLLAPLNVELDPEIQKVRAQEREQIKALNNKFASFIDKVRFLEQQNQVLETKWELLQQLDLNNCKNNLEPILEGYISNLRKQLETLSGDRVRLDSELRSVRDVVEDYKKRYEEEINRRTAAENEFVLLKKDVDAAYANKVELQAKVDSMDQEIKFFKCLYEAEIAQIQSHISDMSVILSMDNNRDLNLDSIIDEVRAQYEDIALKSKAEAEALYQTKFQELQLAAGRHGDDLKNTKNEISELTRLIQRIRSEIENVKKQASNLETAIADAEQRGDNALKDARAKLDELEAALHQSKEELARMMREYQELMSLKLALDMEIATYRKLLESEECRMSGEFPSPVSISIISSTSGSGGYGFRPSSVSGGYVANSGSCISGVCSVRGGESRSRSSTTDYKDALGKGSSLSAPSKKASR

SEQ ID NO: 803 - protein, 214 aa, Ovis aries
MKLLILTCLVAVALARPKHPIKHQGLSSEVLNENLLRFVVAPFPEVFRKENINELSKDIGSESIEDQAMEDAKQMKAGSSSSSEEIVPNSAEQKYIQKEDVPSERYLGYLEQLLRLKKYNVPQLEIVPKSAEEQLHSMKEGNPAHQKQPMIAVNQELAYFYPQLFRQFYQLDAYPSGAWYYLPLGTQYTDAPSFSDIPNPIGSENSGKITMPLW

SEQ ID NO: 804 - protein, 526 aa, Saccharomyces cerevisiae
  strain FostersB
MSSATAAATSAPTANAANALKASKAPKKGKLQVSLKTPKGTKDWADSDMVIREAIFSTLSGLFKKHGGVTIDTPVFELREILAGKYGEDSKLIYNLEDQGGELCSLRYDLTVPFARYVAMNNIQSIKRYHIAKVYRRDQPAMTKGRMREFYQCDFDVAGTFESMVPDSECLSILVEGLTSLGIKDFKIKLNHRKILDGIFQIAGVKDEDVRKISSAVDKLDKSPWEAVKKEMTEEKGQSEETADKIGEYVKLNGSLKEIHAVLSADANITSNEKAKQGLDDIATLMKYTEAFDIDSFISFDLSLARGLDYYTGLIYEVVTSASAPPENASELKKKAKSAEDASEFVGVGSIAAGGRYDNLVNMFSEASGKKSTQIPCVGISFGVERIFSLIKQRINSSTTIKPTATQVFVMAFGGGKDWTGYLPERMKVTKQLWDAGIEAEYVYKAKANPRKQFDAAEKAGCHIAVILGKEEYLEGKLRVKRLGQEFADDDGELVSAADIVPIVQGKLSQIHEDGLNEVTRLIKGL

SEQ ID NO: 805 - protein, 222 aa, Ovis aries
MKVLILACLVALALAREQEELNVVGETVESLSSSEESITHINKKIEKFQSEEQQQTEDELQDKIHPFAQAQSLVYPFTGPIPNSLPQNILPLTQTPVVVPPFLQPEIMGVPKVKETMVPKHKEMPFPKYPVEPFTESQSLTLTDVEKLHLPLPLVQSWMHQPPQPLPPTVMFPPQSVLSLSQPKVLPVPQKAVPQRDMPIQAFLLYQEPVLGPVRGPFPILV

SEQ ID NO: 806 - protein, 360 aa, Saccharomyces cerevisiae
  strain FostersB
MCKAGFAGDDAPRAVFPSIVGRPRHQGIMVGMGQKDSYVGDEAQSKRGILTLRYPIEHGIVTNWDDMEKIWHHTFYNELRVAPEEHPVLLTEAPMNPKSNREKMTQIMFETFNVPAFYVSIQAVLSLYSSGRTTGIVLDSGDGVTHVVPIYAGFSLPHAILRIDLAGRDLTDYLMKILSERGYSFSTTAEREIVRDIKEKLCYVALDFEQEMQTAAQSSSIEKSYELPDGQVITIGNERFRAPEALFHPSVLGLESAGIDQTTYNSIMKCDVDVRKELYGNIVMSGGTTMFPGIAERMQKEITALAPSSMKVKIIAPPERKYSVWIGGSILASLTTFQQMWISKQEYDESGPSIVHHKCF

SEQ ID NO: 807 - protein, 859 aa, Saccharomyces cerevisiae
  strain FostersB
  MOD_RES (626)..(626): Any amino acid
MTYKYNCCDDGSGTTVGSVVRFDNVTLLIDPGWNPSKVSYEQCIKYWEKVIPEIDVIILSQPTIECLGAHSLLYYNFTSHFISRIQVYATLPVINLGRVSTIDSYASAGVIGPYDTNKLDLEDIEISFDHIVPLKYSQLVDLRSRYDGLTLLAYNAGVCPGGSIWCISTYSEKLVYAKRWNHTRDNILNAASILDATGKPLSTLMRPSAIITTLDRFGSSQPFKKRSKIFKDTLKKGLSSDGSVIIPVDMSGKFLDLFTQVHELLFESTKINAHTQVPVLILSYARGRTLTYAKSMLEWLSPSLLKTWENRNNTSPFEIGSRIKIIAPNELSKYPGSKICFVSEVGALINEVIIKVGNSEKTTLILTKPSFECASSLDKILEIVEQGERNWKTFPEDGKSFLCDNYISIDTIKEEPLSKEETEAFKVQLKEKKRDRNKKILLVKRESKKLANGNAIIDDTNGERAMRNQDILVENVNGVPPIDHIMGGDEDDDEEEENDNLLNLLKDNSEKSAAKKNTEVPVDIIIQPSAPSKHKMFPFNPAKIKKDDYGTVVDFTMFLPDDSDNVNQNSRKRPLKDGAKTTSPVNEEDNKNEEEDGYNMTDPVSKRSKHRASRYSGFSGTGEAEXFDNLDYLKIDKTLSKRTVSTVNVQLKCSVVILNLQSLVDQRSASIIWPSLKSRKIVLSAPKQIQNEEITAKLIKKNIEVVNMPLNKIVEFSTTIKTLDISIDSNLDNLLKWQRISDSYTVATVVGRLVKESLPQVNNHQKTASRSKLVLKPLHGSSRSHKTGALSIGDVRLAQLKKLLTEKNYIAEFKGEGTLVINEKVAVRKINDAETIIDGTPSELFDTVKKLVTDMLAKI

SEQ ID NO: 808 - protein, 894 aa, Saccharomyces cerevisiae
  strain FostersB
  MOD_RES (82)..(82): Any amino acid
MSSDKSIEKNTDTIASEVHEGDNHSNNLVSMEEEIKSTLSDQYEEIAIIPTEPLHSDKELNDKQQSLGHEAPTNVSREEPIXISGDEDTQITEQNVNEQRQETREPSSEIDLNEPLDVEKDVTTDVQAPNGLNIEKEYDAVKENEKVYADTKEVVSSPENREVTGKNSGGEKSSSSKFLDDESGTTTAANANDISISSEVTPERSSENDNNQIHITNEVAAGINLNENKEQKAAIEDGPVTAENLSSETARKVPPIPTQIINEKDDNSSENEVSAIPTTSSPPLPPRQNVATSTSPKLPPRGKQREQPPKTKNAVPPPLEEEMKSEKFRKNFEETKRNSYHHVPLTGSKTAQLESTAEINLIASRYRKTSHHLNKEGEETRESLQEGQSFLKSTFTSFLENLSEYNEVENVNEEDREMFKIDWSFWTQVVNDYATVASNEPENLEAHVTNGIPPQIRGIIWQLMANSKSREMEDIYETLLDTECLHEATIRRDLRRTKFVAEDKMESLYKVIKVYSVYDPDVGYTQGMGFIAAPLLINCENEAESFGLLVGLMKNYGLRELFLPGMPGLMLMLYQFDRLLEEHSPSLYNRLIREGISSTMYATQWFLTFFAYKFPLEFVLRIFDIVFVEGIEVLLKFAVNLMLKNEETLVKLRFDELLDFLKDELFNYYLMGNQDDASVVQMGLSNGNSFKGNDDGTFSYNVDLFVHDAMTGVYITPLTLRRYRGEYVEIHEKEQKKEDHYESLRIQNHQLQREAQKLEHDYSILNKENISAANELIQNRLNMEMLLDEKNDLINTITDIKSQIEEEIRKQNLPNPDASLPKADLREDLERTISRNNEVMRENGQLEERITELQAEIDELININKEQVSTASLLERDSKAKGRKGWTGFKKVFK

SEQ ID NO: 809 - protein, 192 aa, Ovis aries
MMKSFFLVVTILALTLPFLGAQEQNQEQRICCEKDERFFDDKIAKYIPIQYVLSRYPSYGLNYYQQRPVALINNQFLPYPYYAKPVAVRSPAQTLQWQVLPNAVPAKSCQDQPTAMARHPHPHLSFMAIPPKKDQDKTEIPAINTIASAEPTVHSTPTTEAVVNAVDNPEASSESIASAPETNTAQVTSTEV

SEQ ID NO: 810 - protein, 727 aa, Saccharomyces cerevisiae
  strain FostersB
MLDAGIHPAYQGLASLPFYDEFDLSKVDILLISHFHLDHAASLPYVMQRTNFQGRVFMTHPTKAIYRWLLRDFVRVTSIGSSSSSMGTKDEGLFSDEDLVDSFDKIETVDYHSTVDVNGIKFTAFHAGHVLGAAMFQIEIAGLRVLFTGDYSREVDRHLNSAEVPPLSSNVLIVESTFGTATHEPRLNRERKLTQLIHSTVMRGGRVLLPVFALGRAQEIMLILDEYWSQHADELGGGQVPIFYASNLAKKCMSVFQTYVNMMNDDIRKKFRDSQTNPFIFKNISYLRNLEDFQDFGPSVMLASPGMLQSGLSRDLLERWCPEDKNLVLITGYSIEGTMAKFIMLEPDTIPSINNPEITIPRRCQVEEISFAAHVDFQENLEFIEKISAPNIILVHGEANPMGRLKSALLSNFASLKGTDNEVHVFNPRNCVEVDLEFQGVKVAKAVGNIVNEIYKEENEDNLDSQAEKGLVDEEEHKDIVVSGILVSDDKNFELDFLSLSDLREHHPDLSTTILRERQSVRVNCKKELIYWHILQMFGEAEVLQDDDRVTNQEPKVKEESKDNLTNTGKLILQIMGDIKLTIVNTLAVVEWTQDLMNDTVADSIIAILMNVDSAPASVKLSSHSCDDHDHNNVQSNAQGKIDEVERVKQISRLFKEQFGDCFTLFLNKDEYASNKEETITGVVTIGKSTAKIDFNNMKILECNSNPLKGRVESLLNIGGNLVTPLC

SEQ ID NO: 811 - protein, 463 aa, Saccharomyces cerevisiae
  strain FostersB
MSDGTQKLWGGRFTGETDPLMHLYNASLPYDYKMYKADLEGTKVYTAGLQKLGLLTETELAKIHEGLAEIKKEWDADKFVRHPNDEDIHTANERRLGELIGRDIAGKVHTGRSRNDQVVTDLRIYCRDIVNDTLFPALKGLVEVLIKRAEGEIDVLMPGYTHLQRAQPIRWSHWLSSYATYFTEDYKRLGQILHRLNQSPLGAGALAGHPYGIDREFLAEGLGFNSVIGNSLVAVSDRDFIVELMFWGTLFMNHISRFAEDLIIYCTAEFGFIQLSDAYSTGSSLMPQKKNADSLELLRGKSGRVFGDLTGFLMSLKGIPSTYDKDMQEDKEPLFDCLTTVEHSMLIATGVISTLTVNKEKMEAALTMDMLATDLADYLVRKGVPFRETHHISGECVATAERLGLSGIDKLTLEQYQKIDSRFGQDLFETFNFEQSVERRDATGGTAKSAVLKQLDNLKSQLN

SEQ ID NO: 812 - protein, 279 aa, Saccharomyces cerevisiae
  strain FostersB
  MOD_RES (84)..(84): Any amino acid
MVDLTITGDDDDILSMFFDEEFVPHAFVDILLSNALNEDQIQTQSVSSLLLTRLDFYTKNLTKELESTIWNLDKLSQTLPRTWXSSRYHKEAEQNDSSLYSTESLKSSKLEYYLDTLASAVRALETGMHNVTEKLSDLDNENNHNTNVRQQLQSLMLIKERIEKVVYYLEQVRTVTNISTVRENNTTSTGTDLSITDFRTSLKALEDTIDESLSSAIDNEAKDETNKDLIGRIDSLSELKCLFKGLDKFFAEYSNFSESIKSKAQSYLSTKDIDDGMIS

SEQ ID NO: 813 - protein, 523 aa, Solanum lycopersicum
MALMSQAGSSHCIYSEKVRCISGHRSIINNMDMFRMREICFGVDISSRNASRRVQGNYLNHIGVGSRRGDLTIVAASPPTEDAVVAAEPLTKEDLVGYLASGCKSKEKWRIGTEHEKFGFEFGTLRPMKYDQIADLLNGIAERFDWEKVMEGDKIIGLKQGKQSISLEPGGQFELSGAPLETLHQTCAEVNSHLYQVKAVAEEMGIGFLGTGFQPKWGLKDIPIMPKGRYEIIRNYMPKVGSLGLDMMFRTCTVQVNLDFSSEADMIRKFRAGLALQPIATALFANSPFTEGKPNGYLSKRSHIWTDTDNNRAGMLPFVFDDSFGFEQYVDYALDVPMYFVYRKKKYVDCTGLSFRDFMNGKLPPIPGEYPTLNDWENHLTTIFPEVRLKRYLEMRGADGGPWRRLCALPAFWVGILYDEGSLQSVLDMTFDWTAEERDMLRNKVPKSGLKTPFRDGLLMHVAQDVVKLAKEGLERRGFKETGFLNEVAEVVKTGVTPAEKLLELYHGKWGQSVDPIFEELLY

SEQ ID NO: 814 - protein, 147 aa, Gallus gallus
MRSLLILVLCFLPLAALGKVFGRCELAAAMKRHGLDNYRGYSLGNWVCAAKFESNFNTQATNRNTDGSTDYGILQINSRWWCNDGRTPGSRNLCNIPCSALLSSDITASVNCAKKIVSDGNGMNAWVAWRNRCKGTDVQAWIRGCRL

SEQ ID NO: 815 - protein, 686 aa, Saccharomyces cerevisiae
  strain FostersB
  MOD_RES (642)..(642): Any amino acid
MANTTSFPIAPQAPPNWSFTPSDISGKTNEIINKSNNFYDSMSKVESPSVSNFVEPFMKFENELGPIINQLTFLQHVSSDKEIRDASVNSSMKLDELNIDLSLRHDIFLQFARVWQDVQSKADSVERETFKYVEKSYKDYIHSGLELDEGNRLKIKEIKKKISVNSINFSKNLGEQKEYITFTKEQLEGVPDSILTQFETIKSDKESDETLYKVTFKYPDIFPVMKLASSAQTRKQAFLADQNKVPENEAILLDTLKLRDELASLLGYDTYANYNLYDKMAKDSTTVMNFLNDLKDKLIPLGRKELQVLQDMKAEDVKKLNQGADPNYYIWDHRYYDNKYLLENFNVDLEKISEYFPLEATITGMLEIYETLFNLKFIETKDSQNKSVWHDDVKQIAVWNMDDAKSPNFVGWIYFDLHPRDGKYGHAANFGLSSSFMIDDTTRSYPVTALVCNFSKSTKDKPSLLKHNEIVTFFHELGHGIHDLVGQNKESRFNGPGSVPWDFVEAPSQMLEFWTWNKNELINLSSHYKTGEKIPESLINSLIKTKHVNGALFTLRQLHFGLFDMKVHTCKDLQNLSICDTWNQLRQDISLISNGGTLSKGYDSFGHIMSDSYSAGYYGYLWAEVFATDMYHTKFAKDPLNXKNGIQYRDIVLARGGLYDINDNLKEFLGREPSKDAFLKELGLQN

SEQ ID NO: 816 - protein, 874 aa, Saccharomyces cerevisiae
  strain FostersB
MILVCNAIQHDLQHPNEYIRGNTLRFLTKLREAELLEQMVPSVLACLEYRHAYVRKYAILAVFSIFKVSEHLLPDAKEIINSFIVAETDPICKRNAFIGLAELDRENALHYLENNIADIENLDPLLQAVFVQFIRQDANRTPALKAQYIELLMELLSTTTSDEVIFETALALTVLSANPNVLVPAVNKLIDLAVKVSDNNIKLIVLDRIQDINANNVGALEELTLDILRVLNAEDLDVRSKALDISMDLATSRNAEDVVQLLKKELQTTVNNPDQDKAMQYRQLLIKTIRTVAVNFVEMAASVVSLLLDFIGDLNSVAASGIIAFIKEVIEKYPQLRANILENMVQTLDKVRSAKAYRGALWIMGEYAEGESEIQHCWKHIRNSVGEVPILQSEIKKLTQNQEHTEENEVDATAKPTGPVILPDGTYATESAFDVKTSQKSVTDEERDSRPPIRRFVLSGDFYTAAILANTIIKLVLKFENVSKNKTVINALKAEALLILVSIVRVGQSSLVEKKIDEDSLERVMTSISILLDEVNPEEKKEEVKLLEVAFLDTTKSSFKRQIEIAKKNKHKRALKDSCKNIEPIDTPISFRQFAGVDSTNVQKDSIEEDLQLAMKGDAIHATSSSSISKLKKIVPLCGFSDPVYAEACITNNQFDVVLDVLLVNQTKETLKNLHVQFATLGDLKIIDTPQKTNVIPHGFHKFTVTVKVSSADTGVIFGNIIYDGAHGEDARYVILNDVHVDIMDYIKPATADDEHFRTMWNAFEWENKISVKSQLPTLHAYLRELVKGTNMGILTPSESLGEDDCRFLSCNLYAKSSFGEDALANLCIEKDSKTNEVIGYVRIRSKGQGLALSLGDRVALIAKKTNKLALTHV

SEQ ID NO: 817 - protein, 511 aa, Saccharomyces cerevisiae
  strain FostersB
MTIIQLKKLKSDYWKLYGVDESELSIPSDMSIVDNILLVSTMNEKDNLKLFEISAEKKLKELQTITVPGKPITCICLLPMVDFPPQIFPSSQINPNHNQLILTGHQDGIVNLIATSTYKGCAKIIKRFNHNKFLKSTVSTSIPILEITPKTAPILKVSPWNKTGFVSLLNDSLFIYDLKSNLDCIKTPIFLQSYPGINSFAVNEFHDPFLLALVGSKFGPNGISLLDLRTNLYIPDILDNSISAACGKDHLQRKNTSLDCVWISNHHVAQSLNDKIQIWDIQSCDGKPVCELYAKKGYIESLKFNEKTGALYSSDDQGFVICWDLQNLQNMKYGELVHGFNSISLDSENELLLTKQVFQCGNIIVSGMSDKNICLKSNDTKANGKGCGFLFLDMANDGSLVTLDNFCELGLHQICQVQFNVDTGKIIDGNGTGKSGISDSSMLSLSNESDHSMTETSDDMFSNSGNWDCSSANTVSEGRLNDDQEDIVFTKRMYSVNDVHLSGSTIDTTVV

SEQ ID NO: 818 - protein, 753 aa, Saccharomyces cerevisiae
  strain FostersB
  MOD_RES (100)..(100): Any amino acid
  MOD_RES (127)..(127): Any amino acid
  MOD_RES (596)..(596): Any amino acid
MVEFSLKKARNNWKHVKKSASSPAKQKTPPSPAKPKQKTKKNPYSDLKDPATSYTLPTINARERSRVATSMQRRLSIHNTNYAPPTLDYSMPLPDMPNMXVPNDNVDSSHNNSSFTTENESVSSKGXSNSLNLSTADLSLNDSSYNKVPARSAMRNTVNPSGSNDPFNNSTSLRKMLANPHFNAKDFVHDKLGNASAITIDKFTSNLTDLSIQVQEEVKLNINKSYNEIMTVNNDLNVAMLELKRVRANINDLNEVLDQCTKIAEKRLQLQDQIDQERQGNFNNVESHSNSPALLPPLKAGQNGNLMRRDRSSVLILEKFWDTELDQLFKNVEGAQKFINSTKGRHILMNSANWMELNTTTGKPLQMVQIFILNDLVLIADKSRDKQNDFIVSQCYPLKDVTVTQEEFSTKRLLFKFSNSNSSLYECRDADECSRLLDVIRKAKDDLCDIFHVEEENSKRIRESFRYLQSTQQTPGRENNRSPNKNKRRSMGGSITPGRNVTGAMDQYLLQNLTLSMHSRPRSRDMSSTAQRLKFLDEGVEEIDIELARLRFESAVETLLDIESQLEDLSERISDEELMLLNLISLKIEQRREAIXSKLSQSILSSNEIVHLKSGTENMIKLGLPEQALDLFLQNRSNFIQDLILQIGSVDNPTNYLTQLAVIRFQTIKKTVEDFQDIFKELGAKISSILVDWCSDEVDNHFKLIDKQLLNDEMLSPGSIKSSRKQIDGLKAVGLDFVYKLDEFIKKNSDKIR

SEQ ID NO: 819 - protein, 103 aa, Oreochromis niloticus [sequence omitted]

SEQ ID NO: 820 - protein, 550 aa, Saccharomyces cerevisiae
  strain FostersB
  MOD_RES (455)..(455): Any amino acid
MSSDEEDFNDIYGDDKPTTTEEVKKEEEQNKAGSGTSQLDQLAALQALSSSLNKLNNPNSNNSSSNNSNQDTSSNKQDGTANDKEGSNEDTKNEKKQESATSANANANASSAGPSGLPWEQLQQTMSQFQQPSSQSPPQQQVTQTKEERSKADLSKESCKMFIGGLNWDTTEDNLREYFGKYGTVTDLKIMKDPATGRSRGFGFLSFEKPSSVDEVVKTQHILDGKVIDPKRAIPRDEQDKTGKIFVGGIGPDVRPKEFEEFFSQWGTIIDAQLMLDKDTGQSRGFGFVTYDSADAVDRVCQNKFIDFKDRKIEIKRAEPRHMQQKSSNNGGNNGGNNMNRRGGNFGNQGDFNQMYQNPMMGGYNPMMNPQAMTDYYQKMQEYYQQMQKQTGMDYTQMYQQQMQQMAMMMPGFAMPPNAMTLNQPQQDSNATQGSPAPSDSDNNKSNDVQTIGNXSNTDSGSPPLNLPNGPKGPSQYNDDHNSGYGYNRDRGDRDRNDRDRDYNHRSGGNHRRNGRGGRGGYNRRNNGYHPYNRLKKKKSSRKLEKSFLV

SEQ ID NO: 821 - protein, 709 aa, Saccharomyces cerevisiae
  strain FostersB
  MOD_RES (47)..(47): Any amino acid
MASETFEFQAEITQLMSLIINTVYSNKEIFLRELISNASDALDKIRXKSLSDPKQLETEPDLFIRITPKPEQKVLEIRDSGIGMSKAELINNLGTIAKSGTKAFMEALSAGADVSMIGQFGVGFYSLFLVADRVQVISKSNDDEQYIWESNAGGSFTVTLDEVNERIGRGTILRLFLKDDQLEYLEEKRIKEVIKRHSEFVAYPIQLVVTKEVEKEVPIPEEEKKDEEKKDEEKKDEDDKKPKLEEVDEEEEKKPKTKKVKEEVQEIEELNKTKPLWTRNPSDITQEEYNAFYKSISNDWEDPLYVKHFSVEGQLEFRAILFIPKRAPFDLFESKKKKNNIKLYVRRVFITDEAEDLIPEWLSFVKGVVDSEDLPLNLSREMLQQNKIMKVIRKNIVKKLIEAFNEIAEDSEQFEKFYSAFSKNIKLGVHEDTQNRAALAKLLRYNSTKSVDELTSLTDYVTRMPEHQKNIYYITGESLKAVEKSPFLDALKAKNFEVLFLTDPIDEYAFTQLKEFEGKTLVDITKDFELEETDEEKAEREKEIKEYEPLTKALKEILGDQVEKVVVSYKLLDAPAAIRTGQFGWSANMERIMKAQALRDSSMSSYMSSKKTFEISPKSPIIKELKKRVDEGGAQDKTVKDLTKLLYETALLTSGFSLDEPTSFASRINRLISLGLNIDEDEETETAPEASTAAPVEEVPADTEMEEVD

SEQ ID NO: 822 - protein, 716 aa, Oryza sativa
  subsp. japonica
MAWRMLRRKDFHTGLVNLASRVDHGGAKNFSSGTFGKLADFVLSDTHTPIVKGAANCTAYKHCTIRNFHAGVYMLAWSRKREEVAGLKAPKKEKRVKRETRTQPPVEAPYVAPKQKIAIKSSPDKTVDIFDGMTLLDLSKRTGASIGALQDILTDLGEKVESEFDAISIDLAELVAMELGVNIRRMHTGEGTLEPRPAVVTIMGHVDHGKTSLLDSLRQTSVAAKEAGGITQHIGAFVVEMPSGASITFLDTPGHAAFSAMRARGAAVTDIVVLVVAADDGVMPQTLEAMSHAKAANVPIVVAVNKCDKSGADPERVRIQLGSEGLLLEDMGGDVQVVEISAVTKLGLDKLEEALLLQAEIMDLKARIDGPAQAFVVEARVDRGRGPLATAIVKAGTLVSGQHIVVGAEWGRIRSLRDTAGKITESAKPAMPVEIEGLRGLPMAGDDVVVVDSEERARMLSQGRKKKQEKDRLRKIDEDMTEEAEIGEETPERVEMPIIVKADVQGSVQAVTDALRSLNSPQVFVNIVHVGVGPISQHDIDLAQACRAYIVGFNIRTPPSAITLAATQANIKILLHKVIYHLLEEMGREIVEKAPGTPETQVSGEAEVLNIFELKGRSKSKGPDIKIAGCRITDGHLSKTGTMRLLRSGDVVFEGPCASLKREKQDAETVDKGNDCGLVIQDCNDFQVGDIVQCLEQVIRKPKFISTQSGAVRIEC

SEQ ID NO: 823 - protein, 547 aa, Vitis vinifera
MGMSAQPISKERKAAPVIIPEKRKPVTEVDTRFVRCTVFSKLVSECLSEKWLSTPIHVSIFFPLLCLARRLHIVPVFFLWSSSYSSSMDETMGSMPSQKTLGNYRLGKTLGIGAFGKVKVALHTTTKLKVAIKILDRQSIDDSTADRVKREINILRLFSHPHIVRLYEVIETRTKIYVVMEYMNSGELFDYITENDRLQEDEARHFFQQIISGVECCHVNMVVHRDLKPENLLLDTKRNVKVADFGLSNVMRDGHFLKTSCGSPNYAAPEVISEQLYSGPEVDVWSCGVILFALLCGRLPFDADSLSGLYAKIKSGIYTFPNHLSRAARDLIARILVVDPIKRISIPEIRRHPWFQQHLPKYIALRTIDAIYTTNKVDEEIVQQVVKIGFDINEVIQSLQNRLQNEATVAYHLLLDNHFRIHCSYLKNEFIESLPQDPNPTDHPEMQMSSLAPMQRQWALGLKSQARPIETMTTVLKVFERLNVKWKKIGPYNMKCLWIPPLAAYPKLTVGNDPAQDHIYSVDPSIMAMNKRAIRSQNAVKFEIQGK

SEQ ID NO: 824 - protein, 501 aa, Vitis vinifera
MGDKSCCWLVFFLFIFSSFVEQSHGRVRKQTELLKLLQKAKMQGNSGIDTSLFEVNEIKSEAESYKILPQKGMKEKDRIERLPGQPHVGFSQYGGYVTIDESKGEAFYYYFVEAPTSRESLPLLLWFNGGPGCSSLAYGAMQELGPFRVHSDGKTLYRNQYAWNKVANVLFLESPAGVGFSYSNTTSDNQSGGDRKTANENYAFLVNWLERFPEYKKRDFYISGESYAGHYVPQLAHTILHHNKKANGPIINLKGIIIGNAVIDDEADDIGRYQYLGSHALVSEKTIHQMEKHCNFSPGATSQSKECTEAVDEVHSNIDVIDIYNIYSPLCFNTILTAKPKKVTPEFDPCSDYYVSAYLNRADVQKALHANVTKLKYEWRPCSDIDKNWTDSPLTIIPLLREFMANGLRVWVFSGDTDGDVPVTSTMASIGKMRLSVKTPWHPWFVAGEVGGYTEVYKGDLTFATVRGAGHQVPSFRPKRALSLIVHFLSGTPLPKPSSKH

SEQ ID NO: 825 - protein, 1278 aa, Saccharomyces cerevisiae
  strain FostersB
MNGSGKTTIIECLKYATTGDLPPNSKGGVFIHDPKITGEKDIRAQVKLAFTSANGLNMIVTRNIQLLMKKTTTTFKTLEGQLVAINNSGDRSTLSTRSLELDAQVPLYLGVPKAILEYVIFCHQEDSLWPLSEPSNLKKKFDEIFQAMKFTKALDNLKSIKKDMSVDIKLLKQSVEHLKLDKDRSKAMKLNIHQLQTKIDQYNEEVSEIESQLNEITEKSDKLFKSNQDFQKILSKVENLKNTKLSISDQVKRLSNSIDILDLSKPDLQNLLANFSKVLMDKNNQLRDLETDISSLKDRQSSLQSLSNSLIRRQGELEAGKETYEKNRNHLSSLKEAFQHKFQGLSNIENSDMAQVNHEMSQFKAFISQDLTDTIDQFAKDIQLKETNLSDLIKSITVDSQNLEYNKKDRSKLIHDSEELAEKLKSFKSLSTQDSLNHELENLKTYKEKLQSWESENIIPKLNQKIEEKNNEMIILENQIEKFQDRIMKTNQQADLYAKLGLIKKSINTKLDELQKITEKLQNDSRIRQVFPLTQEFQRADLEMDFQKLFINMQKNIAINNKKMHELDRRYTNALYNLNTIEKDLQDNQKSKEKVIQLLSENLPEDCTIDEYNDVLEETELSYKTALENLKMHQTTLEFNRKALEIAERDSCCYLCSRKFENESFKSKLLQELKTKTDANFEKTLKDTVQNEKEYLHSLRLLEKHIITLNSINEKIDNSQKCLEKAKEETKTSKSKLDELEVDSTKLKDEKELAESEIRPLIEKFTYLEKELKDLENSSKTISEELSSYNTSEDGIQTVDELRDQQRKMNDSLRELRKTISDLQMEKDEKVRENSRMINLIKEKELTVSEIESSLTQKQNIDDSIRSKRENINDIDSRVKELEARIISLKNKKDEAQSVLDKVKNERDIQVRNKQKTVADINRLIDRFQTIYNEVVDFEAKGFDELQTTIKELELNKAQMLELKEQLDLKSNEVNEEKRKLADSNNEEKNLKQNLELIELKSQLQHIESEISRLDVQNAEAERDKYQEESLRLRTRFEKLSSENAGKLGEMKQLQNQIDSLTHQLRTDYKDIEKNYHKEWVELQTRSFVTDDIDVYSKALDSAIMKYHGLKMQDINRIIDELWKRTYSGTDIDTIKIRSDEVSSTVKGKSYNYRVVMYKQDVELDMRGRCSAGQKVLASIIIRLALSETFGANCGVIALDEPTTNLDEENIESLAKSLHNIINMRRHQKNFQLIVITHDEKFLGHMNAAAFTDHFFKVKRDDRQKSQIEWVDINRVTY

SEQ ID NO: 826 - protein, 469 aa, Saccharomyces cerevisiae
  strain FostersB
MDLFKRKVKEWVYSLSTDDHYAEYNPDETPTFNMGKRLNSNNGQVNPSQMYLNSVDEEMSMGFQNGVPSNEDINIDEFTSTESNDGVSETLLAWRHIDFWTSEHNPDLNATLSDPCTQNDITHAEEDLEVSFPNPVKASFKIHDGQEDLESMTGTSGLFYGFQLMTLDQVVAMTQAWRNVAKNLNKRSQQGLSHVTSTGSSSSMERLNGNKFKLPNIPDQKSIPPNAVQPVYAHPAWIPLITDNAGNHIGVDLAPGPNGKYAQIITFGRDFDTKFVIAENWGEFLLSFANDLEAGNWYLVDDNDDYFSGDGELVFRDKKSNGPIQDYFEVLKRRTWIKYQENLRSQQQKSQPDTSLQEQKYVPASQKKVAAEQPSTLNAESIKGEDSGSADVQSVQDHESVKIVKTEPSEAETTTVNTESLGQAEHEIKADNVDIKQESERKEDEKQPKVEEKEHVENEHVTESAKKRR

SEQ ID NO: 827 - protein, 1098 aa, Saccharomyces cerevisiae
  strain FostersB
  MOD_RES (374)..(374): Any amino acid
  MOD_RES (412)..(412): Any amino acid
  MOD_RES (415)..(415): Any amino acid
  MOD_RES (761)..(761): Any amino acid
MALIVASLFLPYQPQFELDTSLPENSQVDSSLVNIQAMANDQQQQRALSNNISQESLVAPAPEQGVPPAISRSATRSPSAFNRASSTTNTATLDDLVSSDIFMENLTANATTSHTPTSKTMLKPRKNGSVERFFSPSSNIPTDRIASPIQHEHDSGSRIASPIQQQQQDPTTNLLKNVNKSLLVHSLLNNTSQTSLEGPNNHIVTPKSRAGNRPTSAATSLVNRTKQGSASSGSSGSSAPPSIKRITPHLTASAAKQRPLLAKQPSNLKYSELADISSSETSSQHNESDPDDLTTAPDEEYVSDLEMDDAKQDYKVPKFGGYSNKSKLKKYALLRSSQELFSRLPWSIVPSIKGNGAMKNAINTAVLENIIPHXHVKWVGTVGIPTDEIPENILANISDSLKDKYDSYPVLXDDXTFKAAYKNYCKQILWPTLHYQIPDNPNSKAFEDHSWKFYRNLNQRFADAIVKIYKKGDTIWIHDYHLMLVPQMVRDVLPFAKIGFTLHVSFPSSEVFRCLAQREKILEGLTGADFVGFQTREYARHFLQTSNRLLMADVVHDEDLKYNGRVVSVRFTPVGIDAFDLQSQLKDGSVMQWRQLIRERWQGKKLIVCRDQFDRIRGIHKKLLAYEKFLVENPEYVEKSTLIQICIGSSKDVELERQIMIVVDRINSLSTNISISQPVVFLHQDLDFSQYLALSSEADLFVVSSLREGMNLTCHEFIVCSEDKNAPLLLSEFTGSASLLNDGAIIINPWDTKNFSQAILXGLEMPFDKRRPQWKKLMKDIINNDSTNWIKTSLQDIHISWQFNQEGSKIFKLNTKTLMEDYQSSKKRMFVFNIAEPPSSRMISILNDMTSKGNIVYIMNSFPKPILENLYSRVQNIGLIAENGAYVSLNGVWYNIVDQVDWRNDVAKILEDKVERLPGSYYKINESMIKFHTENAEDQDRVASVIGDAITHINTVFDHRGIHAYVYKNVVSVQQVGLSLSAAQFLFRFYNSASDPLDTSSGQITNIQTPSQQNPSDQEQQPPASPTVSMNHIDFACVSGSSSPVLEPLFKLVNDEASEGQVKAGHAIVYGDATSTYAKEHVNGLNELFTIISRIIED

SEQ ID NO: 828 - protein, 720 aa, Agaricus bisporus
  var. bisporus
  strain H97 / ATCC MYA-4626 / FGSC 10389
MTVKEIPDRSIRICADRGGTFCDIHASYPDPENPSEQKELVVKLLSQDTANYKDAPTEGIRRVLEQVTGKSIPRGSVLSTDKIDYIRLSTTVATNALLERKGHKHALLITKGFKDLLLIGNQARPKIFDLNIRRPPPLYSKVIEVDERVTLVGYTSDPKSEEHAVQFDADGKVTRGYRGKGWDNEGLAEGPGEIIRGISGEAVRIMKKPDMKAVEKDLRDLYSEGYRSIAIVLVHSYTFPDHEVAIGSLARSIGFAQVSESAQLLPMIKMVPRGVSSTADAYLTPILREYLDGFFDNFDEKLRDGKVKSPRVEFMGSDGGLVDLERFSGLKSILSGPAGGVVGYALTSWDVKVKKPIIGLDVGGTSTDVSRFDGRYEVVYETTTAGVTIQSPQLDINTVAAGGGSCLTFRNGLFLAGPESAGAQPGPACYRKGGPLAVTDANLMLGRLIPDYFPKIFGKSEKEPLDSDASRVLFEQLAKDINASHEGEFSLDDVVYGFIKVANETMARPIRALTEARGHATSKHVLATFGGAGGQHACEIAKLLGITTILVHRYSSILSAYGLALADRANEIQEPSSTFYTPQNRAGLLSRLDKLTKQVRTELEQEGFEDKRISMERMLNMRFEGTDTALMVLPNENDGDGNEDFLAAFNRAYKAEFGFLLESKSVIVDDIKVRGIGKTFDSLGDSVYTEVASLQSSNSIKALSPTQADSRHSVYFDVIG

SEQ ID NO: 829 - protein, 1413 aa, Bos taurus
LQSADIDNHHALIEYNEAEGSFVLQDFNSRSGTFVNECHIQNVAVKLLPGDLLRFGTGGLTYELVIENPASVSFPWTMGPAPWPRPQPSRTTQQPNQSPSPPQVPFHPGVRPVPVQRSWSQGFPRPSVVPPASHKRPMSASGKMFSFMMDGTAHGVPIIKQVWTNAVDLSDQPVAEEIPGAGSAREMFVDHDLAQREKDEIILLLGKEVSRLSDFELESKYKDAVISNLQNEVARLSQKLSETATSRQNERVVPPKLQVLEEDDDAQQREIENLKSQISALQQGYSQVLCQTLSERNLEITSLKNQGENLRRDNAITSEMVSSLQKDMLAKDEQVQQLKQEVNQLKSENKEKDHQLEALNSRCSVLKEELKKEDAQKGEEAQEKELKLYKTQIHGMEKEVRKLREELKRSSTEQSLISKTLREKSKVEEKLQEDSRRKLLQLQEMGNRENLIKANLERAVGQLEHFRSQVIKATYGRTKPFQDKPISDQQLIEKITQVTEDNINFQQKKWTLPKESQLGLCRHEEVTDSVERLKKALDSCQACMKMSCCSNDLRKEVSLLQHLQVSPPVSGLQKVSLDILRLSLSWLEETEHLLQDVGIQFSSSNKGLSLYLKYLLEHYKKITSRTQELQIKISSSQETQQSLMQEKLREHLAEKEKLSEERLQQEEKLKARVQCLMEEKAALEETISQEKSRAKEALEGQQSKVQELENRLTHQKEVLESSMAHEKRKAKEALETEKRKVQDLENHLTQQKEISESSIAYEKNKAKEAIEKEKKKVQDLENRITKQKEEMDLKMQKEDILNNKLNDALAMLEKAQKTKIAESLKAENLTMKLNETLAELETAKTKMIMMEERMQLQQHRVMALQEEQESQKHEFEKQIMEYKEQIKQHSQTIVSLEERLQKVTEHHRKIEGEIATLKDNDPAQEGDAQPDPAAAPLGESSSKDAMCDHLIEDLLTAQKEILSQQEIIMRLRKNLTEAHNRMSDLRGELNEKQKIELERNVALVQQQSSELSVLKDKMVQMTGLVEKKDKELEVLKQALRASQEKQKLQLHKEKEQKPRNTTKMCDISVQIEPVHTDIFLSSQEEQSFSDLGAKCKGSRHEEVIQRQKKALSELRARIKELEKAGSSNPKDHMDESFLDLKTLGMEKNVQKILDVKPDLPTFSRVESRVPQNGLSSSGSIMATNKLGKTDATEALDLSEKLYMDMSKTLGSLMNIKDMSGHVSMKHLSPKERERVNQLRQRDLDMVFDKITQLKNRLERKEELLRGYEKDIEQLRQSKVSVQMYQSQVAKLEDDIYKEAEEKALLKEALERMEQQLHQEKRVNRAIRQQKERLEDLEQRNAKESAACNCSFKEKERQRQMFVEAVKNKMQNSNFQVGARKATAKMDQEREMLKREMSSKSSQSLLFSKPGGRN

SEQ ID NO: 830 - protein, 267 aa, Glycine max
CSEKKRPSPPYILWMKDQRNEIKKVNPEAGFKEISTMLGVKWKTVTAEEKKPYEGIYHAEKEAYLQVIAKEKHETESMRLLEDEQKQRTAMELLEQYMQFKQEAEKDGKKNKKEKDPLKPKHPMSAYFLFTNDRRAALAAENKNFLEVPKITFEEWKNMTEEQKRPYEEMAKKNKEQYALEMEAYKQKKDEEAGHFMKEEEDHMKVQKQEALQLLKKKEKIENIIKFFSSNLQKKKQNKDDKNSDPNRPKMQHTSLLQLSFSSCSFY

SEQ ID NO: 831 - protein, 915 aa, Agaricus bisporus
  var. bisporus
  strain H97 / ATCC MYA-4626 / FGSC 10389
MSTEIPAVPPRAPRYGPPQLPWGRSFDYTYSDDDGIKESFLVFSSKAYELDKQLGQLANGCLRLGRVAGLLLAIKRTREMLRRTREVFFHNATALVPELFELAREDCNSKSGASNSERFHISSQYFDQHLPPFEMLPTNLEELATSFYLLYVRIDEFREFTDEGKLLKSLLMTLDRDLKYRASCAGFYSGRLNTPLIQRYVHQFINELQVDFEKVTAAVDEFAAVGVSAISHEQARSSLNLTNILTVSTFFSGVTASTLQMSTSASDDKDDTILLANLLWFMSMIFSVGAALNSLLAMAWKATRSGSRGSKLPFWVTMWIDGSQLLFLGISILTFSAGLIVFAFASSQASYTPYLAVASTAVTFIGLVAILLWMLYEMVVSPVLRQQADIIKSSGDSVHSEFSNISLVHGGIASAITNALPFLRFQQDQPREDVEQVEDKDDESEESPTQKHNLQDQLKMKLQGGVKSVSIINSALGAFATAGRKKKRGRHERRRQLKPKLRIDNSSAAVPLTELTLSDKPVSYLELARYGIIRDVAYSDDGKWLAVTCTKEHAAQSWTATLTVLLDTWHEGRVIAECLKWSPSGKKLIVKFEHRFDVWDLDAKVLHIIERHHMVQDVAWFDEDTFLVAEHSCVFKMDLTRLVMAVYRFERNHIRSIGVEMKNNYLVLITRVAKSPEEFEPACGRSEKRIIIYDMGKQEEIYQVPVLEDISYIYPIPDELDILITHKDQATFQLWTLDAGVRGAQITAKLKKRIVTPHRDPGDYIGPTRIGGNYNQFVFNVTTSGDIDIWRRESGMPYLRFQSPKLQEEGEGVHCFSWRRSDDETATFATAGIQGHTLWVWRGEELLLPKTPASLESLNRFSPKFATNERNRARWQRATNMSVVASSGSLSPREIERIDESVTEVNPEEDLHARS

SEQ ID NO: 832 - protein, 222 aa, Agaricus bisporus
  var. bisporus
  strain H97 / ATCC MYA-4626 / FGSC 10389
MPLLNKNNSAVKRIMQEARELANDPSTDYSAAPLEDDIFEWHCTLRGSPGTEFEGGLYHFRILLPAEYPFRPPSIMMLTPNGRFELNTKICISFTNYHEELWQPAWGVRTAIIGLQGFFPLKGEAAVGVGSIEYPASERRRLAGLSREWVCPQCQRQNAELLREDGEGERKVPEKAGDDGGHGSVGGMEPAKPKSHRPPVVLDGAICIVFVLFCVLLCRRFF

SEQ ID NO: 833 - protein, 4852 aa, Gallus gallus
MAAMVPPVKLKWLEHLNSSWITEDSESIATREGVSILYAKLVSNKEVVPLPQQVLCLKGPQLPDFERESLSSDEQDHYLDALLSSQLALAKMVCSDSPFAGALRKRLLVLQRVFYALSNKYHDKGKVKQQQHSPESSSGSTDVHSVSERPRSSTDALIEMGVRTGLSLLFALLRQSWMMPASGPGLSLCNDVIHTAIEVVSSLPPLSLANESKIPPMGLDCLSQVTTFLKGVTIPNSGADTLGRRLASELLLGLAAQRGSLRYLLEWIEMALNASAVVNTMEKTKLLQSPEGMISFDCFMSILMQMRRSLGSSADRSQWREPTRTSDGLCSLYEAALCLFEEVCRMASDYSRTCASPDSIQTGDAPIVSETCEVYVWGSNSSHQLVEGTQEKILQPKLAPSFSDAQTIEAGQYCTFVISTDGSVRACGKGSYGRLGLGDSNNQSTLKKLTFEPHRSIKKVSSSKGSDGHTLAFTTEGEVFSWGDGDYGKLGHGNSSTQKYPKLIQGPLQGKVVVCVSAGYRHSAAVTEDGELYTWGEGDFGRLGHGDSNSRNIPTLVKDISNVGEVSCGSSHTIALSKDGRTVWSFGGGDNGKLGHGDTNRVYKPKVIEALQGMFIRKVCAGSQSSLALTSTGQVYAWGCGACLGCGSSEATALRPKLIEELAATRIVDISIGDSHCLALSHDNEVYAWGNNSMGQCGQGNSTGPITKPKKVSGLDGVSIQQISAGTSHSLAWTALPRDRQVVAWHRPYCVDLEESTFSHLRSFLEHYCDKINSEIPPLPFPSSREHHSFLKLCLKLLSNHLALALAGGVATSILGRQAGPLRNLLFRLMDSSVPDEIQEVVIETLSVGATMLLPPLRERMELLHSLLPQGPDRWESLSKGQRMQLDIILTSLQDHTHVASLLGYSSPSDTTETSSLCISYGNLSDQTYSVQSSHPDTHLAEILMKTLLRNLGFYTDQAFGELEKNSDKFLLGASSSENSQPAHLHELLCSLQKQLLAFCHINSVSENSSSVALLHKHLQLLLPHATDIYSRSATLLKESSWNGSVGEKLRDVIYVSAAGSMLSQIVNSLLLLPVSVARPLLSYLLDLLPPLDRLNRLLPAAALLEDQELQWPLHGGPELIDPAGVSLPQPAQSWVWLVDLERTVALLIGRCLGGMLQGPPVSPEEQDTAYWLKTPLFSDGVEMDIPHLDKCMSSLLEVALSGNEEQKPFDYKLRPEITVYVDLALGCTKEPARSLWISMQDYAVSKDWDTATLTNESLLDTVSRFVLAALLKHTSLLSQACGESRYQPGKALAEVYRCVYKVRSRLLACKNMELIQTRSSSRDRWMLDNQESADVDTQEHSFTRTIDEEAEMEEQAERDREEGHIEQEDEEEEREHEVMTAGKIFQCFLSAREVARSRDRDRMSTGTGTRLDDQPPQSQQERRISTDLTEGQDVYTAACNSVIHRSALLILGVSPVIEDFQKRREDGHLQQPPSTAPEGIGLMTRSESLTAESRSIHANSNYRLMKSRSESDLSQPESDEEGYSLSGRRNVDLDLASSHRKRGAIHSQVEPLTDSWARLKHSRDWLYTSSYSFIESDFDLSRSLGVHTLIENVVSFVSGDVGNSPGFKEPEESMSTSPQASIIAMEQQQLRAELRLEALHQILVLLSGMEEKGSVALMGSHQGPGFQSSSLLTSVRLQFLAGCFGLGTVGHAGAKGESVRLHHYQDGIRAAKRSIQIEIQVAVHKIYQQLSATLERALQANKHHIEAQQRLLLVTVFALSVHYQPVDVSLAISTGLLNVLSQLCGTDTMLGQPLQLLPKTGISQLSTALKVASTRLLQILAITTGTYADKLSPKVVQSLLDLLCSQLKNLLSQAGVMLMASFGEEEVEEHEAESKKADSNGENEKRDFRAALRKQHAAELHLGDFLVFLRRVVSSKAIQSKMASPKWTEVLLNIASQKCCSGVPLVGNLRTRLLALHVLEAVLPACESGVEDDQMAQVVERLFSLLSDCMWETPIAQAKHAIQIKEKEQEMKLQKQGESEDEDENLPIQEVSFDPEKAQCCIVENGQILTHGSGGKGYGLASTGVTSGCYQWKFYIVKENRGNEGTCVGVSRWPVHDFNHRTTSDMWLYRAYSGNLYHNGEQTLTLSSFTQGDFITCVLDMEARTISFGKNGEEPKLAFEDVDAAELYPCVMFYSSNPGEKVKICDMQMRGTPRDLLPGDPICSPVAAVLAEATIQLIRILHRTDRWTHCINKKMMERLNKIKTCLKEAGQKLKKSRSIQSREENEVREEKENKEEEKGKHNRHGLADLSELQLKMLCVEVWPVLAVIGGVDAGLRVGGRCVHKQTGRHATLLGVVKEGSTSAKVQWDEAEITISDTPLYNLEPCEPLPFDVARFRGLTATVLLDLTYLTGIHEDMGKQSTKRHEKKHRHESEDKGETDQKMEGDAGPDTRSALSADDNKAHSTASSKSENEIASFSLEPSALGMESQHQPAEGRKKNHEHSPRNHDIVQSEIRAVQLSYLYLGAMKSLSVLLSCSKYAELLLIPKVLAENGHNSDCASSPVVHEDVEMRAALQFLMRHMVKRAVMRSPIKRALGLADLERAQAMIYKLVVHGLLEDQFGGRLKQEVDQQVEEGDQSQQAQTPVTTSPSASSTTSFMSSSLEDTTTATTPVTDTETVPASESPGVMPLSLLRQMFSSYPTTTVLPARRAQTPPISSLPTSPSDEVGRRQSLTSPDSQSARPTNRTALSDPSSRLSTSPPPPAIAVPLLEMGFSLRQIAKAMEATGARGEADAQNITVLAMWMIEHPGNEDDEEPQPDVTADARHGAIVSGSGGKSGDHCYLQSPGDIPSADAAEMEEGFSESPDNMDHVDNAASASGPPSRSRSSVTRRHKFDLAARTLLARAAGLYRSVQAHRNQSRREGISLQQDPGALYDFNLDEELEIDLDDEAMEAMFGQDLASDNDILGMWIPEVLDWPTWHVCESEDREEVVVCELCESSVVSFNQHMKRNHPGCGRSANRQGYRSNGSYVDGWFGGECGSGNPYYLLCGVCREKYLALKSKSKTSTSERYKGQAPDLIGKQDSVYEEDWDMLDVDEDEKLTGEEEFELLAGPLGLNDRRIVPEPVQFPDSDPLGASVAMVTATNSMEETLMQIGCHGSIEKSSSGRITLGEQAAALVNPHDRVMALRRVTAAAQVLLARTMVMRALSLLSVSGSSCSLAAGLESLGLTDIRTLVRLMCLAAAGRAGLSTSPCTVSSSTERSRGIHSKTSKPISCLAYLSTAVGCLASNTPSAAKLLVQLCTQNLISAATGVNLTTVDDPIQRKFLPSFLRGIAEENKLVTSPNFVVTQALVALLADKGAKLRPNYDKAEFEKKGPLELANALAACCLSSRLSSQHRQWAAQQLVRTLAAHDRDNQTIPQTLADMGGDLRKCSFIKLEAHQKQVMTCVWCNKKGLLATSGNDGTIRVWNVTKKQYSLQQTCVLNKLEGDSEESLGSPSDLSLSLICWSISGKYLAGATEKMVNIWQVNGGKGLLDLQPHWVSALAWPEEGPAAAWKGELLLIGRMDGSLGLIEVVDISTMHRIELEHCYRKDVSVTCLAWFSEDKPFAVGYSDGKLLIGTKEPLEKGEIVLLDAHKDTIVSMKWDPTGKILLTCAKEEMVKLWAYMGGSWRRLHSLPHPAFVNGIAWCGLPGKGSKLQLLLATGCHNGLVCVWTVPQDIAVTLQTSSAYSEGWWDQETSGQDGYRKAVEAKCVFQLRGHITPVRTVAFSPDGLALVSGGLGGLMNIWSLRDGSVLQSVVIGSGAIQTAVWIPEVGVAACCNRSKDVLVVNCTSEWISSNHILATCRTALKQQGVLGLNMAPCMRAFLERLPIMLQEQYAYEKPHVVCGDQLVHSPYMQCLASLAVGLHLDQLLCNPPVPPHHQNCLPDPSTWSPTEWAWLECFSTTIKAAEALAKGAQFPESFTVPDLEPVPEDELTLLMDNSKWINGMDEQIMSWATSRPEDWHLGGKCDVYLWGAGRHGQLAEAGRNVMVPVAAPSFSQAQQVVCGQNCTFVIQANGTVLACGEGSYGRLGQGNSDDLHVLTVISALQGFVVTQLVTSCGSDGHSMALTESGEVFSWGDGDYGKLGHGNSDRQRRPRQIEALQGEEVVQMSCGFKHSAVVTADGKLFTFGNGDYGRLGLGNTSNKKLPERVTALEGYQIGQVACGLNHTVAVSTDGSMVWAFGDGDYGKLGLGNSTAKSSPQKVDILCGIGIKKVACGTQFSVALTKDGHVYTFGQDRLIGLPEGRARNHNRPQQVPVLSGVFIEDIAVGAEHTLALSSTGDVYAWGSNSEGQLGLGHTNHVREPTLITVLQGKNIRQISAGRCHSAAWTAPPVPPRAPGVSVPLQLGLPDAIPPQYGALKEVSIHTVRARLRLLYHFSDLMYSSWRLLNLSPNNQNSTSHYNAGTWGIVQGQLRPLLAPRVYTLPMVRSIGKTMVQGKNYGPQITVKRISTRGRKCKPIFVQIARQVVKLNASDLRLPSRAWKVKLVGEGADDAGGVFDDTITEMCQELETGVVDLLIPSPNATAEVGYNRDRFLFNPSACLDEHLMQFKFLGILMGVAIRTKKPLDLHLAPMVWKQLCCIPLILEDLEEVDLLYVQTLNSILHIEDSGITEENFHEMIPLDSFVGQSADGKMVPIIPGGNSIPLTFSNRKEYVERAIEYRLHEMDRQVAAVREGMSWIVPVPLLSLLTAKQLEQMVCGMPEISVEVLKKVVRYREVDEQHQLVQWFWHTLEEFSNEERVLFMRFVSGRSRLPANTADISQRFQIMKVDRPYDSLPTSQTCFFQLRLPPYSSQLIMAERLRYAINNCRSIDMDNYMLSRNVDNAEGSDTDY

SEQ ID NO: 834 - protein, 390 aa, Gallus gallus
MPYVDRQNRICGFLDIEENENSGKFLRRYFILDTREDSLVWYMDNPQNLPSGSPPVGVIKLTYISKVSDATKLRPKAEFCFVMNAGMRKYFLQANDQQDLVEWVNVLNKATKITVPKQSDPLCQMDNANRQAESPGGKKQVSYRTEIVGGVPIITPTQKEEVNECSEGGDRSYLKRSQSHLPYFTAKHPPDNAIIKAGYCVKQGAVMKNWKRRYFQLDENTIGYFKSELEKEPLRVIPLKEVHKVQECKQSDIMMRDNLFEIVTTSRTFYVQADSPEDMHSWIKAISGAIVAQRGPGRSAASMRQARRLSNPCIQRSIPSLLPNPAMLSVLPSQPQPPHIPQPLTTALWSQTLTPNTLPWRSEDFTNLLPRPSQGATRSRLSLQENQLPK

SEQ ID NO: 835 - protein, 542 aa, Glycine max
MAEAEHNDPTSPEREVQTKSNKKKLRKRKRPHKTEQKRDEDKNDANIDSAQTQTEDEEEEQKEEDTNNFSSGIMSTESFSSLGLSEPTSKAIADMGFHRMTQIQAKAIPPLLTRKDVLGAARTGAGKTLAFLVPAVELLYSIQFTPRNGTGVVVICPTRELAIQTHAVAKELLKYHSQTLGLVIGGSGRKGEAERIVKGVNLLVATPGRLLDHLQNTKGFIYKNLKCLMIDEADRILEANFEEEMKQIINILPKKRQTALFSATQTKKVEDLARLSFQATPIYIDVDDGRKKVTNEGLQQGYVVVPCAKRFVVLYSFLRRYQSKKVMVFFSSCNSVKFHADLLKCTGLDCLNIHGKQKQHARTTTFFNFCKAEKGILLCTDVAARGLDIPDVDWIVQYDPPDEPKEYIHRVGRTARGEGGKGNALLFLIPEELQFLHYLKAAKVPVKEYAFDHKKLANVQSQLEKLVAGIYHLNVMAKDAYRSYILAYNSHSMKDIFNVHRLDLQAVAASFCFSNPPKVNLNIDSSASKHRKKIRKVEGKRR

SEQ ID NO: 836 - protein, 3260 aa, Ovis aries
MSWALEEWKEGLPTRALQKIQELEGQLDKLKKERQQRQFQLETLEAALQKQKQKIENEKTEGANLKRENQSLMEICENLEKTKQKISHELQVKESQVNFQEGQLNSSKKQIEKLEQELKRCKSELERSQQAAQSADVSLNSCLTPQKIFATPLTPSQYYSGSKYEDLKEKYNKEVEERKRLEAEVKALQAKKASQAIPQSTMNHRDIARHQASSSVFSWQQEKTPSRLSSNTLKTPVRRDFSASHFSGEQEVTPSRSTLQIGKTDANSSFCDNSSNSHLLDQLKAQNQELRSKISELELRLQGQEKEMKGQVNKLQELQLQLEKAKVELNEKEKVLNKTRDELVRTTSQYDQASTKCTALEQKLKKLTEDLSCQRQNAESARCSLEQKIKEKEKEFQEELSRQQRSFQTLDQECTQMKARLTQELQQAKNTYNILQAELDKVTSVKHQVEKKLEEFKQNLSKTEQALQASQTKENELRRSSEEMKRENSLLKSQSEQRAREVCHLEEELKKAKQCLSQSQNFAEEMKAKNTSQETMLRDLQEKINQQENSLTLEKLKLALADLEKQRDCSQDLLKKREHHIEQLNEKLSKTERESEALLSALELKKKEYEELKEEKTLFSRWKRENEQLLNQMESEKESLQSKVNHLETCLKTQQIKSHEYNERVRTLEMERENLNVEIRNLQNVIDSKTAEAETQKRAYGELQQKAEFSDQKHEKEIENMCLKISHLTGQVEDLEHKLQLLSSEIMGKDQRYQDLHAEYESLRDLLKSRDSSAVTVEPHQRSRLAFEQQSALNNSFASIIGEQESVSSERSGCHVATDQSPESSSMLQNRVVSLEFSLESQKQMNSDLQKQCEELVQIKGEIEENLMKAEQMHQSFVAETSQRISKLQEDTSVHQNVVTETLAALESKERELQFLNEKLETEQAEIGELKKNNHLLQESLKELQFLSETLSLEKKELNSIISLNKKDIEGLTQENGTLKEINATLTREKMNLLQKTESFSNCIDERDKSISELSNQYKQERLTLLQRCEETGNAFQDLSEKYKAVQEKNSKLECLLSECTGVCEDRKNELGQLKETFAREHQAFVSQLASAEERNQNLILELETVQQALQSEITDIQNSSKREADGLKQEIMKLKEEQNKMQQEVNALLQENEHLMELMRTKHEHQCLELEPIQDSEKEGEREINTCHVQLPMDLDVKDSSLDTYKAQLVQVESEVRNMELRLQKSEKEECLQHELQARELETEDLQQDTQSQDISSLGDSEIDPEEKYISVLHELSTSQQDNAHLQCSLQTAMNKLNELEKMCEALQVEKSELISELNDSRSECITATSKMAEEVGKLVKEVETLNDENGLLQGESVEETPEGEFGVQQDEQTSVNLNPLDDCNFYEHLTMSNKEVQMHFAELQEKFSSLQSEHKILHEQHCLMSSKMSELQSYVDTLKAENSVLSMSLRSAQGDLVKEVTPAPGEEHSLSLSFSCVTDSPGNASLGESSFYKDLLEHTTETSLLHNLEGTVSANQSSVEEVSCSSLEEENLTEKETPSGPLRSTRELETLCQTYLQSLKQLEEEIESQGLTKNKEIEELKELLSSSREELDYLRKQYLSENEQWQQKLTDVTAEMESKLAAEKRHTEHLTLELEVARLQLQGLDLSSRSLLGTDIEDAIPGGNDSCDIRESEEYTSEPKERTPKHEIHQVCEKDVQQDLSLEMEKITKTGAARLTEEWSREQSSEASPEAPVGDPAQGCSECTSELYLPGPNASVPRDVLENQVTIQSLELKVKETSNENLRLLHGIEERDQKVDNLLNEIKELDSKFHLLEVQLTTKIEACVALEKIVEELKKEKLDLNEKLASFSCHNQREESSGGLTPSLEMVTSKLPHEDIEDDVAKVTDNWREKCLQVENELQRVQSEKDSMEHHTLSAEASLEAVQTEKLYLEKDNENKQTVITCLEEGLSVVTSERDQLRGELDTLSKENQELDQMSEKMKEKIRELESHQRECLHLQEQLQSLEKDSQALSLVRSELENQIEQLNKEKDSLVWESESLQTKLSESENEKLAITKALETALMEKGEVAVRLSSTQEEVHQLRKGIEKLRVRIEADEKKQLHVSEKLKASERRNDSLQDKVETLERELQMAEENQELVILDAENCKAEVETLKTQIELTTERLKDLESDLVTIRTEKENLVKQLQEKQGQASELDTLLSSLKNLLEEKEREKIQMKEESKAAVEMLQTQLRELSEEVAALCDDQETWKVKEQSLDSPAQEVQQLRNNIEKLKLHLDIDKKQQLHILEKLKESEHQADLLKDTVENLERELKLSGENQEHVTLEAEKSKAEVETLKATAKEMDQNLRGLQLDLVNIRSEKEDLTKELLKEQSRVSELQTLNSSFENLLREKEQEKVQMKEESKAAVEMLQTQLKELSEEVATLYVDQETWKVEEQSLDSPIEEVQQLRNNLGKLKVCLDADKKQQLCILEKLKESQHQADFLKDTVENLERELELSGKNQEHVTLEAEKSKAEVETLKTTMEEMDQNLRGLQLDLVNIRSEKEDLSKELQKEQSRVSELETLNSSFENMLREKEQEKVQMQEESKAAVEMLQKELEELNEKMAALGNDQETWKVKEQSLSSQVDSLEHEKAQLLQGLDDAKSNYMILQSSVNDLIQEVEDGKQKLEKKDEEISILESQTRDQEQLVSKLSQMEGEQQLWKKQKADLENLMVELEQKIQVLQSKNDALQDTLEALQNSYRNLEKELELTNLEKTSFVEKVNTMTVKETELQKEMHAMIQKTAELKEEFSGEKNRLTEELNLMLEEVKSSKGQLNELMLENSELKKSLDCVHKDHMEEQGKMRGEIAEYQLRLQEAENKHQALLLDTNKQHEMEIQTYREKLTSKEECLSSQKVEIDLLKSSKEELNNSLKATTEILEELKKTKMENLKHADKLKKENDRAQSKIKLLMKSCKQLEEEKVMLQKELSHLEAAQEKQRADTVVDANVDELITEMKELKESLEEKTKEADEYLDKYCSLLISHEKLEKAKEMLETQVARLSSQQSKLNLRSSPLVNSVAPGPSPVPSATEKKLPSGQNKSSGKRQRSSGIREDGGETTPSTPETFSKKSRKAIKSGTHPPEDAEDAEFEPEGLPEVVKKGFADIPTGKTSPYILRRTTMATRTSPRLAAQKLAASPLSLDKENLTETSKPTAGGSRSQKVKVSQQSPVDSGTTFRDPTARSLSISNLPERSPAGSPREGLRAKRGHHAPSPEASLQSKGSENCRVQ

SEQ ID NO: 837 - protein, 569 aa, Solanum lycopersicum
MAIFTKPKLLFIFFLILSLVLVSQCYDQNPRGYQDPQEKLRECQQRCERQQPGQQKQLCKQRCEQQYRKEQQQQHGGETGEDDLGNRGPDKSYKRLQECQRRCQSEQQGQRLQECQQRCQQEYQREKGQHQGETNPQWEQQEKSNNPYLFESQRFRSRFRASHGDFRILERFNQRSQLLKGIEKYRVAILELEPQSFVLPHHCDGEAIYVVVKGQGVINIAEQDNKNSFNLQKGDVIRLFAGSNVYLLNKDNNEKLFVYVLAKSVNAPGNLQEYFSAGGQNPESFYRAFSSDILESAFNNPRDKLERLFGQHKEGIIIKASEEQIRAISEHASRSTQQTRGRTQGPFNLMKERPVFESRFGQFFEARPERYEQLRDLDAAVGFMNINQGGMVLPYYNTKSTKLVMVIEGNARFEMACPHLGRQSQSPWSRGQGREQEREQEQEQEEGDVHYQKIRGNLNVGDVLVIPAGHPITFVATGNSNLRIVGFGVDAENNKKNFLAGKQNIWRNIDREAKELSFSMPGREVEEIFQRQDQSYFVAGPEHRQQRERGEEGRRGQDQYLSSILDFVF

SEQ ID NO: 838 - protein, 532 aa, Saccharomyces cerevisiae
  strain ATCC 204508 / S288c
MLLQAFLFLLAGFAAKISASMTNETSDRPLVHFTPNKGWMNDPNGLWYDEKDAKWHLYFQYNPNDTVWGTPLFWGHATSDDLTNWEDQPIAIAPKRNDSGAFSGSMVVDYNNTSGFFNDTIDPRQRCVAIWTYNTPESEEQYISYSLDGGYTFTEYQKNPVLAANSTQFRDPKVFWYEPSQKWIMTAAKSQDYKIEIYSSDDLKSWKLESAFANEGFLGYQYECPGLIEVPTEQDPSKSYWVMFISINPGAPAGGSFNQYFVGSFNGTHFEAFDNQSRVVDFGKDYYALQTFFNTDPTYGSALGIAWASNWEYSAFVPTNPWRSSMSLVRKFSLNTEYQANPETELINLKAEPILNISNAGPWSRFATNTTLTKANSYNVDLSNSTGTLEFELVYAVNTTQTISKSVFADLSLWFKGLEDPEEYLRMGFEVSASSFFLDRGNSKVKFVKENPYFTNRMSVNNQPFKSENDLSYYKVYGLLDQNILELYFNDGDVVSTNTYFMTTGNALGSVNMTTGVDNLFYIDKFQVREVK

SEQ ID NO: 839 - protein, 532 aa, Saccharomyces cerevisiae; identical to SEQ ID NO: 838
  strain ATCC 204508 / S288c

SEQ ID NO: 840 - protein, 884 aa, Agaricus bisporus
  var. bisporus
  strain H97 / ATCC MYA-4626 / FGSC 10389
MRALLLSILPVVLAQTSSSLSDVVTSTLSASSAPVSAPLSSLTSTLTASISSSVVSSATSISQPLSSSASVSSLSTSSAISSASSNATSSAASTPATAPGSTVTEPIIKPPVTPTTFTPFPTPSDEPIPGVFEVTDPRKPPAVGSPIIPDFGPAWDAAYAKARSKIASFSLEEKVNVTTGVGWMGGRCVGNIPSVGDEWPGLCLEDSPLGVRNADFVTYPINAATTFNRKLIRARGLAMGQEHVGKGVHVALGPMMNMGRVAAGGRNWEGFGADPFLAGEAAYETILGMQQAGVQACAKHLVDNEQEHKRTTSSSDVDDRTQHEIYTHPFLRSIMAGAASIMCSYNLINGTYACENDKVMNGIVKAEYGFRGYIMSDWAATESTMSAATGLDMTMPGDINFNSGDSYFGGNLTAFVRNGTIPEARVDDMATRIVAAWYFLRQDAPSFPTVNFDAFRVDDDSVNEHIDVQEDHDKVVREVGAASIVLLKNENDALPLKKPRSLVLIGSDAGPGRAGPNQFSDQGGLDGVLAMGWGSGTANMTYLVTPLDAIQRRARKDHTSVFWFLDDFDLPAAGNVARKKSAAIVFIASDSGEEYITVDGNQGDRNNLTAWHGGDALVEAVAAQNENTIVVIHSVGPLILEPWINHPNVTAVLWAGAPGQEAGNSLTDVLYGDWNPSGRLPYTIAKRIEDYSAQVIPGDGVRDILSIPYDDRLQIDYRHFDANGIEPRFEFGFGLSYTKFDYSKISIKKVHVKGREVDAAREWDQGHASPQVEGGSIASWLHRPLYEVSFNVKNTGRVLGAESPQLYINFPESAGEPPSVLRGFDSVPIRPGETTNVKMTLSRYDLSIWDVNAQGWRRPEGTFGVTVGASSRDKRLEGTIPGSR

SEQ ID NO: 841 - protein, 885 aa, Oryza sativa
  subsp. japonica
MMGSPPAPPARRLGALAVFLLALFLAAPWGVDCGYNVASVAGSKNRLRARLELAGGGGGAAPELGPDVRRLSLTASLETDSRLHVRITDADHPRWEVPQDVIPRPSPDSFLAATRPGGGRVLSTATSDLTFAIHTSPFRFTVTRRSTGDVLFDTTPNLVFKDRYLELTSSLPPPGRASLYGLGEQTKRTFRLQRNDTFTLWNSDIAAGNVDLNLYGSHPFYMDVRSGGGGGGGAAHGVLLLNSNGMDVIYGGSYVTYKVIGGVLDFYFFAGPSPLAVVDQYTQLIGRPAPMPYWSFGFHQCRYGYKNVADLEGVVAGYAKARIPLEVMWTDIDYMDAYKDFTLDPVNFPADRMRPFVDRLHRNGQKFVVIIDPGINVNTTYGTFVRGMKQDIFLKWNGSNYLGVVWPGNVYFPDFLNPRAAEFWAREIAAFRRTLPVDGLWVDMNEISNFVDPPPLNAIDDPPYRINNSGVRRPINNKTVPASAVHYGGVAEYDAHNLFGFLEARATHDALLRDTGRRPFVLSRSTFVGSGRYTAHWTGDNAATWEDLHYSINTMLSFGLFGIPMIGADICGFGGNTTEELCSRWIQLGAFYPFSRDHSAIGTVRRELYLWESVARSARKALGLRYRLLPYLYTLMYEAHTTGAPIARPLFFSYPGDVETYGIDRQFLLGRGVLVSPVLEPGATTVTAYFPAGRWFSLYDFSLAVATKTGKRVTLPAPADTVNVHVAGGNILTLQQPALTSSRVRQSVVHLLVALADDGTATGDLFLDDGESPEMAGPRSRWSQIKFSGATESGGGVVRVRSHVVHDSYAPSRTMAIGKVVLMGLRSAAPPKGFAVYANGVQVNASTAVGGAAGSPEKGALGVAHVSGLTLVVGQEFDLKVVMTY

SEQ ID NO: 842 - protein, 419 aa, Agaricus bisporus
  var. bisporus
  strain H97 / ATCC MYA-4626 / FGSC 10389
MLSSRALLFAVVGLVLSPLSLCITPSFPYGQRKVRGVNLGGWLVLEPWITPSIFDNTGDSRVIDEWTFGQFVDRSTATNVLRNHWNTWITEEDFARIAAAGLNHVRLPIGYWAFEVAAGEPYIQGQLPFLEKAVTWAQNHNLKLIIDLHGAPGSQNGFDNSGQKKSFPEWHTRADYVDRTNAIIKTIASTYKNMADVVAVIAPLNEPAGFDGAQVLSVTKQYWFDSYGNIRFPFGTSQQSNTMVMIHDAFQSLSFWNGFMQPPDFDGVLLDTHRYQMFSDAENHKSEQQHIQSACSSGPGLASAPLWAIVGEWTPAANDCAKYLNGRGVGSRYDGSFPGSSRVGSCTGLTGKASTFSSSYKRFLRQFWEAQATAYEQGQGWLQWTWKTEITDEWSYKAGLDNGWIPQNPTERQFPGICG

SEQ ID NO: 843 - protein, 448 aa, Saccharomyces cerevisiae
  strain ATCC 204508 / S288c
MLSLKTLLCTLLTVSSVLATPVPARDPSSIQFVHEENKKRYYDYDHGSLGEPIRGVNIGGWLLLEPYITPSLFEAFRTNDDNDEGIPVDEYHFCQYLGKDLAKSRLQSHWSTFYQEQDFANIASQGFNLVRIPIGYWAFQTLDDDPYVSGLQESYLDQAIGWARNNSLKVWVDLHGAAGSQNGFDNSGLRDSYKFLEDSNLAVTTNVLNYILKKYSAEEYLDTVIGIELINEPLGPVLDMDKMKNDYLAPAYEYLRNNIKSDQVIIIHDAFQPYNYWDDFMTENDGYWGVTIDHHHYQVFASDQLERSIDEHIKVACEWGTGVLNESHWTVCGEFAAALTDCTKWLNSVGFGARYDGSWVNGDQTSSYIGSCANNDDIAYWSDERKENTRRYVEAQLDAFEMRGGWIIWCYKTESSLEWDAQRLMFNGLFPQPLTDRKYPNQCGTISN

SEQ ID NO: 844 - protein, 567 aa, Bos taurus
  MOD_RES (86)..(86): Any amino acid
MGWCGRGSGPPPSRLLMLLSLLLAVRGAGAAPRSALYSSSDPLTLLRADTVRSTVLGSSSAWAVEFFASWCGHCIAFAPTWKALAXVISDWRPALNLAALDCAEETNSAVCRDFNIPGFPTVRFFKAFSKTGSGTTLSVAGADVQTLRERLIDALESHSDTWPPACPPLEPARLEEITGFFARNNEEYLALIFEKEGSYLGREVTLDLSQHQGIAVRRVLNTERDVVNRFGVTNFPSCYLLSRNGSFSRVPALTESRSFYTTYLRKFSGSTRGAVQTTAAPATTSAVAPTVWKVADRSKIYMADLESALHYILRIEVGKFSVLEGQRLVALKKFMAVLAKYFRGRPLVQNFLHSMNDWLKKQQRKKIPYGFFKNALDSRKEGTVIAEKVNWVGCQGSEPHFRGFPCSLWILFHFLTVQAAQEGVDHPQERAKAQEVLQAIRGYVRFFFGCRECAGHFEQMASGSMHRVGSLNSAVLWFWSSHNKVNARLAGAPSEDPQFPKVQWPPRELCSACHNELRGTPVWDLDNILKFLKTHFSPSNIVLDFPSAGPGPWRGAERMAVIPKQLI

SEQ ID NO: 845 - protein, 712 aa, Bos taurus
MWVCLQLPVFLASVTLFEVAASDTIAQAASTTTISDAVSKVKIQVNKAFLDSRTRLKTTLSSEAPTTQQLSEYFKHAKGRTRTAIRNGQVWEESLKRLRRDTTLTNVTDPSLDLTALSWEVGCGAPVPLVKCDENSPYRTITGDCNNRRSPALGAANRALARWLPAEYEDGLALPFGWTQRKTRNGFRVPLAREVSNKIVGYLDEEGVLDQNRSLLFMQWGQIVDHDLDFAPETELGSNEHSKTQCEEYCIQGDNCFPIMFPKNDPKLKTQGKCMPFFRAGFVCPTPPYQSLAREQINAVTSFLDASLVYGSEPSLASRLRNLSSPLGLMAVNQEAWDHGLAYLPFNNKKPSPCEFINTTARVPCFLAGDFRASEQILLATAHTLLLREHNRLARELKKLNPHWNGEKLYQEARKILGAFIQIITFRDYLPIVLGSEMQKWIPPYQGYNNSVDPRISNVFTFAFRFGHMEVPSTVSRLDENYQPWGPEAELPLHTLFFNTWRIIKDGGIDPLVRGLLAKKSKLMNQDKMVTSELRNKLFQPTHKIHGFDLAAINLQRCRDHGMPGYNSWRGFCGLSQPKTLKGLQTVLKNKILAKKLMDLYKTPDNIDIWIGGNAEPMVERGRVGPLLACLLGRQFQQIRDGDRFWWENPGVFTEKQRDSLQKVSFSRLICDNTHITKVPLHAFQANNYPHDFVDCSTVDKLDLSPWASREN

SEQ ID NO: 846 - protein, 441 aa, Oryza sativa
  subsp. japonica
MRPAVAAALLLVAAAVAASPVSALYSAGSPVLQFNPNNFKSKVLNSNGVVLVEFFAPWCGHCQQLTPIWEKAAGVLKGVATVAALDADAHKELAQEYGIRGFPTIKVFVPGKPPVDYQGARDVKPIVEFALSQVKALLRDRLNGKTSAGSGGKKSGGSSEKTEPSASIELNSQNFDKLVTKSKDLWIVEFFAPWCGHCKKLAPEWKKAAKNLKGQVKLGHVDCDAEKSLMSKYKVEGFPTILVFGADKESPFPYQGARVASAIESFALEQLEANAAPPEVSELTGPDAMEEKCASAAICFVSFLPDILDSKAEGRNKYLELLLSVAEKFKKSPYSFVWTAAGKQADLEKQVGVGGYGYPAMVALNVKKGAYAPLRSAFQLDEITEFVKEAGRGGKGNLPLDGTPTIVQSEPWDGKDGEVIEEDEFSLEELMADNSPVNDEL

SEQ ID NO: 847 - protein, 427 aa, Bos taurus
MPCPRLLAALFCSSGLFAASGDFCDSSLCLHGGTCLLNEDRTPPFYCLCPEGFTGLLCNETEHGPCFPNPCHNDAECQVTDDSHRGDVFIQYICKCPLGYVGIHCETTCTSPLGMQTGAIADSQISASSMHLGFMGLQRWAPELARLHQTGIVNAWTSGNYDKNPWIQVNLMRKMWVTGVVTQGASRAGSAEYLKTFKVAYSTDGRQFQFIQVAGRSGDKIFIGNVNNSGLKINLFDTPLETQYVRLVPIICHRGCTLRFELLGCELNGCTEPLGLKDNTIPNKQITASSYYKTWGLSAFSWFPYYARLDNQGKFNAWTAQTNSASEWLQIDLGSQKRVTGIITQGARDFGHIQYVAAYRVAYGDDGVTWTEYKDPGASESKIFPGNMDNNSHKKNIFETPFQARFVRIQPVAWHNRITLRVELLGC

SEQ ID NO: 848 - protein, 443 aa, Bos taurus
MSWSSHPPSVIFYILSLLSSACLAYVATRDNCCILDERFGSYCPTTCGIADFLNNYQTSVDKDLRTLEGILYQVENKTSEARELVKAIQISYNPDQPSKPNNIESATKNSKSMMEEIMKYETLISTHESTIRFLQEIYNSNSQKIVNLRDKVVQLEANCQEPCQDTVKIHDVTGRDCQDVANKGAKESGLYFIRPLKAKQQFLVYCEIDGSGNGWTVFQKRLDGSLDFKKNWIQYKEGFGHLSPTGNTEFWLGNEKIHLISTQSTIPYVLRIQLEDWNGRTSTADYASFKVTGENDKYRLTYAYFIGGDAGDAFDGYDFGDDSSDKFFTSHNGMQFSTWDSDNDKYDGNCAEQDGSGWWMNKCHAGHLNGVYYQGGTYSKTSTPNGYDNGIIWATWKSRWYSMKKTTMKIIPLNRLAIGEGQQHQLGGAKQVGVEHHVEIEYD

SEQ ID NO: 849 - protein, 313 aa, Saccharomyces cerevisiae
  strain ATCC 204508 / S288c
MRFSTTLATAATALFFTASQVSAIGELAFNLGVKNNDGTCKSTSDYETELQALKSYTSTVKVYAASDCNTLQNLGPAAEAEGFTIFVGVWPTDDSHYAAEKAALQTYLPKIKESTVAGFLVGSEALYRNDLTASQLSDKINDVRSVVADISDSDGKSYSGKQVGTVDSWNVLVAGYNSAVIEASDFVMANAFSYWQGQTMQNASYSFFDDIMQALQVIQSTKGSTDITFWVGETGWPTDGTNFESSYPSVDNAKQFWKEGICSMRAWGVNVIVFEAFDEDWKPNTSGTSDVEKHWGVFTSSDNLKYSLDCDFS

SEQ ID NO: 850 - protein, 386 aa, Saccharomyces cerevisiae
  strain ATCC 204508 / S288c
MRLSNLIASASLLSAATLAAPANHEHKDKRAVVTTTVQKQTTIIVNGAASTPVAALEENAVVNSAPAAATSTTSSAASVATAAASSSENNSQVSAAASPASSSAATSTQSSSSSQASSSSSSGEDVSSFASGVRGITYTPYESSGACKSASEVASDLAQLTDFPVIRLYGTDCNQVENVFKAKASNQKVFLGIYYVDQIQDGVNTIKSAVESYGSWDDVTTVSIGNELVNGNQATPSQVGQYIDSGRSALKAAGYTGPVVSVDTFIAVINNPELCDYSDYMAVNAHAYFDKNTVAQDSGKWLLEQIQRVWTACDGKKNVVITESGWPSKGETYGVAVPSKENQKDAVSAITSSCGADTFLFTAFNDYWKADGAYGVEKYWGILSNE

SEQ ID NO: 851 - protein, 229 aa, Zea mays
MAAARRLSLPLVLLVVLAVAGRAAAQDYDFFYLVLQWPGAYCDTKQSCCYPKSGKPAADFGIHGLWPNRDDGTYPQNCSPDNAFNPSKVSDLLSSLRAKWPTLACPSNDGLRFWGHEWEKHGTCAADVFDEHGYFQAALRLRDQLGVLGALTSAGVKPDGGYYTLSQIKGAIRQGTGFEPYVECNRDEAGNSQLYQLYFCVDAAGDSFVDCPVLPSGRPCGNRIEFPAF

SEQ ID NO: 852 - protein, 256 aa, Vitis vinifera
MAKNLLHALAMVRVICYFFSNVNAFTASGWTKAHATFYGGSDASGTMGGACGYGNLYSTGYGTRTAALSTALFNDGASCGQCYKIICDYQSDSQWCKKGASVTITATNFCPPNYALPSNNGGWCNPPLQHFDMAQPAWEKIGIYRGGIVPVLFQRVPCKKHGGVRFSVNGRDYFELVLISNVAGAGSIQSVSIKGSRTSWMAMSRNWGANWQSNAYLNGQSLSFKVTTTDGVTQEFDNVVPSDWGFGQTFSSSVQF

SEQ ID NO: 853 - protein, 118 aa, Bos taurus
MARFVALVLLGLLSLSGLDAIQRPPKIQVYSRHPPEDGKPNYLNCYVYGFHPPQIEIDLLKNGEKIKSEQSDLSFSKDWSFYLLSHAEFTPNSKDQYSCRVKHVTLEQPRIVKWDRDL

SEQ ID NO: 854 - protein, 147 aa, Sus scrofa
MAASSAQPTVLVMTALALLLLLCLGPGGTNGNKLKLMLQKRKAPAPSETPVAVRESKAKEFLSSLRRQKRQLWDRTRPEVQQWYQHFLYLGFDEAKFEDDITYWLNRDRNGDDDYDHYQRHYDEDAAIGPRSPHSFRYGASVNYDDY

SEQ ID NO: 855 - protein, 202 aa, Bos taurus
MALLWALAVLSHLPLLDAQSPECANLMTVAPITNATMDLLSGKWFYIGSAFRNPEYNKSARAIQAAFFYLEPRHAEDKLITREYQTIEDKCVYNCSFIKIYRQNGTLSKVESDREHFVDLLLSKHFRTFMLAASWNGTKNVGVSFYADKPEVTQEQKKEFLDVIKCIGIQESEIIYTDEKKDACGPLEKQHEEERKKETEAS

SEQ ID NO: 856 - protein, 234 aa, Bos taurus
MRTHGLTLLSLLLLAVPMLLVEAKKEGRNRRGSKASADESLALGKPGKEPRSQPTNYPIKGKFVTPDHADCRWAVTKQEEGIVLKVECTQRDNTFSCFFTGNPTSCLELHKNNAYWKQIGRNLRSQKVICGDAKSVLKTRVCRKKFPESNLKLVNSTLIRIKKPSQELMEPSPMDTVEVTTSSSPEKTQTMATKDPQCEEEDLKNQRKAALEYCGETWGSLCNFFLSMVQGSSC

SEQ ID NO: 857 - protein, 299 aa, Bos taurus
MVPVLLALLLLLGPAVSEETQAGNYSLSFLYTGLSKPREGFPSFQAVAYLNDQPFFHYNSEGRRAEPLAPWSQVEGMEDWEKESALQRAREDIFMETLSDIMDYYKDREGSHTFQGAFGCELRNNESSGAFWGYAYDGQDFIKFDKEIPAWVPLDPAAQNTKRKWEAEAVYVQRAKAYLEEECPGMLRRYLPYSRTHLDRQESPSVSVTGHAAPGHKRTLKCLAYDFYPRSIGLHWTRAGDAQEAESGGDVLPSGNGTYQSWVVVGVPPEDQAPYSCHVEHRSLTRPLTVPWDPRQQAE

SEQ ID NO: 858 - protein, 295 aa, Meleagris gallopavo
MKTLQAAFFLVAFVPLVKPAPTIQQDSSELNKYDTDIAMGSLIQQDYEMLSKDIIKTKDGTNVSLDTGLRLQGDDSELSARPTKDTNLPTCLLCVCLSGSVYCEEIDIEAVPPLPKETAYLYARFNKIKRIAVSDFADITTLRRIDFSGNMIEEIEDGAFSKLLLLEELSLAENRLVKLPVLPPKLTTFNANQNRIKSRGIKNNAFKKLTNLAYLYLGHNALESVPLNLPESLRILHLQHNNITTINDDTFCKSNNTRYIRTRMDEIRMEGNPILLAKHVNAFSCLRTLPVGTYY

SEQ ID NO: 859 - protein, 153 aa, Bos taurus
MKFLCVLLLASLAATSLAILNKPEDETHLEAQPTDASAQFIRNLQISNEDLSKEPSISREDLISKEQIVIRSSRQPQSQNPKLPLSILKEKHLRNATLGSEETTEHTPSDASTTEGKLMELGHKIMRNLENTVKETIKYLKSLFSHAFEVVKT

SEQ ID NO: 860 - protein, 339 aa, Bos taurus; identical to SEQ ID NO: 727

SEQ ID NO: 861 - protein, 375 aa, Bos taurus; identical to SEQ ID NO: 763

SEQ ID NO: 862 - protein, 375 aa, Bos taurus
MEEEIAALVIDNGSGMCKAGFAGDDAPRAVFPSIVGRPRHQGVMVGMGQKDSYVGDEAQSKRGILTLKYPIEHGIVTNWDDMEKIWHHTFYNELRVAPEEHPVLLTEAPLNPKANREKMTQIMFETFNTPAMYVAIQAVLSLYASGRTTGIVMDSGDGVTHTVPIYEGYALPHAILRLDLAGRDLTDYLMKILTERGYSFTTTAEREIVRDIKEKLCYVALDFEQEMATAASSSSLEKSYELPDGQVITIGNERFRCPEALFQPSFLGMESCGIHETTFNSIMKCDVDIRKDLYANTVLSGGTTMYPGIADRMQKEITALAPSTMKIKIIAPPERKYSVWIGGSILASLSTFQQMWISKQEYDESGPSIVHRKCF

SEQ ID NO: 863 - protein, 533 aa, Glycine max
MQIFVKTLTGKTITLEVESSDTIDNVKSKIQDKEGIPPDQQRLIFAGKQLEDGRTLADYNIQKESTLHLVLRLRGGMQIFVKTLTGKTITLEVESSDTIDNVKAKIQDKEGIPPDQQRLIFAGKQLEDGRTLADYNIQKESTLHLVLRLRGGMQIFVKTLTGKTITLEVESSDTIDNVKAKIQDKEGIPPDQQRLIFAGKQLEDGRTLADYNIQKESTLHLVLRLRGGMQIFVKTLTGKTITLEVESSDTIDNVKAKIQDKEGIPPDQQRLIFAGKQLEDGRTLADYNIQKESTLHLVLRLRGGMQIFVKTLTGKTITLEVESSDTIDNVKAKIQDKEGIPPDQQRLIFAGKQLEDGRTLADYNIQKESTLHLVLRLRGGMQIFVKTLTGKTITLEVESSDTIDNVKAKIQDKEGIPPDQQRLIFAGKQLEDGRTLADYNIQKESTLHLVLRLRGGMQIFVKTLTGKTITLEVESSDTIDNVKAKIQDKEGIPPDQQRLIFAGKQLEDGRTLADYNIQKESTLHLVLRLRGGF

SEQ ID NO: 864 - protein, 149 aa, Solanum lycopersicum
MAEQLTEEQIAEFKEAFSLFDKDGDGCITTKELGTVMRSLGQNPTEAELQDMISEVDADQNGTIDFPEFLNLMARKMKDTDSEEELKEAFKVFDKDQNGFISAAELRHVMTNLGEKLTDEEVDEMIREADIDGDGQVNYEEFVRMMLAK

SEQ ID NO: 865 - protein, 154 aa, Oryza sativa; identical to SEQ ID NO: 103
  subsp. japonica

SEQ ID NO: 866 - protein, 166 aa, Oryza sativa
  subsp. japonica
MAEVEVRVRQEQVAEFRETFAFFDKDGDGCITLEELDTVVRSLGQTPTREELAEMIRDVDVDGNGTIEFAEFLALMARKASRGGENGGGGDDSGDAADEELREAFKVFDKDQDGLISAAELRHVMISLGEKLTDEEVEQMIREADLDGDGQVNFDEFVRMMMLSDQ

SEQ ID NO: 867 - protein, 151 aa, Arabidopsis thaliana
MEETALTKDQITEFKEAFCLFDKDGDGCITVEELATVIRSLDQNPTEQELHDIITEIDSDSNGTIEFAEFLNLMAKKLQESDAEEELKEAFKVFDKDQNGYISASELSHVMINLGEKLTDEEVEQMIKEADLDGDGQVNYDEFVKMMINID

SEQ ID NO: 868 - protein, 151 aa, Arabidopsis thaliana
MADAFTDEQIQEFYEAFCLIDKDSDGFITKEKLTKVMKSMGKNPKAEQLQQMMSDVDIFGNGGITFDDFLYIMAQNTSQESASDELIEVFRVFDRDGDGLISQLELGEGMKDMGMKITAEEAEHMVREADLDGDGFLSFHEFSKMMIAASY

SEQ ID NO: 869 - protein, 124 aa, Solanum tuberosum
GCITTKELGTVMRSLGQNPTEAELQDMINEVDADGNGTIDFPEFLNLMARKIKDTDFEEELKEAFRVFDKDRNGFISAAELPHVMTNLGEKLTDEEVDEIIREADVDCDGQINYDEFVKVMMAK

SEQ ID NO: 870 - protein, 170 aa, Oryza sativa
  subsp. japonica
MESHLNEQQISDFRDAFSLFDKNNDGCISREELATVLTRLGMAPSQEDLQDMIVAVDEDGNGTIEFDEFLAIMKKKLYENDKGDDEEELRKAFRIFDKDDNGFISRNELSMVMASLGEEMTEDEIDDMMKAADSNNDGQVDYEEFKRVMMSTWNITEIFKPHVTIWRYKP

SEQ ID NO: 871 - protein, 217 aa, Lactobacillus gasseri
  strain ATCC 33323 / DSM 20243
MINLILLGLPGAGKGTASESIVDKYHLAHISTGDMFREAMANETPVGLEAKSYIDKGDLVPDEVTAKLVEERLKQPDTKNGFILDGFPRTTVQAELLEGITKRLEKPLTNVIAIDVDEDVLIKRLSARYICKNCGATYNKISNPTKVEGTCDRCGGHEFFQREDDKPEVVKNRLEVNKKMNTPLRDFYEEKGILSTVNGEQTPEKVFEDIDKILSKD

SEQ ID NO: 872 - protein, 194 aa, Sus scrofa
MEEKLKKSKIIFVVGGPGSGKGTQCEKIVQKYGYTHLSTGDLLRAEVSSGSARGKMLSEIMEKGQLVPLETVLDMLRDAMVAKVDTSKGFLIDGYPREVKQGEEFERKIGQPTLLLYVDAGPETMTKRLLKRGETSGRVDDNEETIKKRLETYYKATEPVIAFYEKRGIVRKVNAEGSVDDVFSQVCTHLDTLK

SEQ ID NO: 873 - protein, 194 aa, Gallus gallus
MSTEKLKHHKIIFVVGGPGSGKGTQCEKIVHKYGYTHLSTGDLLRAEVSSGSERGKKLQAIMEKGELVPLDTVLDMLRDAMLAKADTSKGFLIDGYPREVKQGEEFEKKIAPPTLLLYVDAGKETMVKRLLKRGETSGRVDDNEETIKKRLETYYKATEPVIAFYKGRGIVRQLNAEGTVDEVFQQVCSYLDKL

SEQ ID NO: 874 - protein, 172 aa, Bos taurus
MLLPNILLTGTPGVGKTTLGKELASRSGLKYINVGDLAREGQLYDGYDEEYDCPILDEDRVVDELENQMSEGGVIVDYHGCDFFPERWFHIVFVLKTDNSILYKRLENRGYNEKKLKDNIQCEIFQVLHEEALASYKEEIVHQLPSNKPEDLEDNINQILKWIEHWVKDHSS

SEQ ID NO: 875 - protein, 172 aa, Oryctolagus cuniculus
MRLPNILLTGTPGVGKTTLGKELASRSGLKYVNVGDLAREGELYDGFDEEYNCPILDEDRVIDELDTQMRDGGVIVDYHGCDFFPERWFHIVFVLRTETSVLYKRLETRGYSEKKLNDNIQCEIFQVLYEEAMESYKEEIVHQLPSNKPEELEENISQILKWIEQWIKDHNS

SEQ ID NO: 876 - protein, 175 aa, Schizosaccharomyces pombe
  strain 972 / ATCC 24843
MGNEERELPNIIICGTPGTGKTTLAEQVAETTELENICIGDVVKENHLHFGFDEKWKTYDVDEDKVLDYLEPKLLKGGCIIDWHTCGLFSEELIDLVVVLRTDHSKLWERLESRGYSLEKIQENNEAEIMQICLEEARESFDPKIVVELPSESIEEMESNLSRITQWVTNWKKNH

SEQ ID NO: 877 - protein, 197 aa, Saccharomyces cerevisiae
  strain ATCC 204508 / S288c
MEARRYGPNIIVTGTPGCGKSSTCEFLKNKLKDYKYYNISDFAKDNDCFEGYDEGRKSHIVDEDKLLDMLEPLLRQGNSIVDWHVNDVFPERLIDLVVVLRCDNSNLYSRLHARGYHDSKIEENLDAEIMGVVKQDAVESYEPHIVVELQSDTKEDMVSNVSRIVAWEKMWLEQHPDGVTNEYQGPRSDDEDDEDSE

SEQ ID NO: 878 - protein, 196 aa, Bos taurus
MKPQVVFVLGGPGAGKGTQCARIVEKYGYTHLSAGELLRDERKNPDSQYGELIEKYIKDGKIVPVEITISLLRREMDQTMAANAQKNKFLIDGFPRNQDNLQGWNKTMDGKADVSFVLFFDCNNEICIERCLERGKSSGRSDDNRESLEKRIQTYLQSTKPIIDLYEEMGKVRKIDASKSVDEVFDEVVKIFDKEG

SEQ ID NO: 879 - protein, 196 aa, Gallus gallus
MKPVVVFVLGGPGAGKGTQCARIVEKYGYTHLSAGDLLRDERKRPGSQYGELIENYIKEGEIVPVEITISLLKRAMDQTMAANSQKNKFLIDGFPRNEDNLQGWNKTMDGKADVSFVLFFDCDNEICIGRCLERGKSSGRSDDNRESLEKRIHTYLQSTRPIIDLYERMGKVRRVDASKSVDEVFEKVVQIFDKEG

SEQ ID NO: 880 - protein, 78 aa, Capra hircus
MDCCTESACSKPDDDILDIPLDDPGANAAAAKIQASFRGHMARKKIKSGERGRKGPGPGGPGGAGGARGGAGGGPSGD

SEQ ID NO: 881 - protein, 87 aa, Oryza sativa
  subsp. japonica
MGCDDKCGCAVPCPGGTGCRCASSARSGGGDHTTCSCGDHCGCNPCRCGRESQPTGRENRRAGCSCGDSCTCASCGSTTTTAPAATT

SEQ ID NO: 882 - protein, 93 aa, Triticum aestivum
MASGQQERSQLDRKAREGETVVPGGTGGKSLEAHENLAEGRSRGGQTRREQMGEEGYSEMGRKGGLSTNDESGGERAAREGIDIDESKFKTKS

SEQ ID NO: 883 - protein, 188 aa, Oryza sativa
  subsp. japonica
MARRGTEAFPDLGAQCDREDCNQLDFLPFDCDGCGKTFCAEHRTYRDHGCARAADQGRTVVVCEACGDAIERRAGDGGGDDAAVLEAHARSRRCDPARKRKPRCPVPRCKETLTFSNTSGCKGCGQKVCLKHRFPADHACAGAGAGAASKAAGAAAAARSAGQCGRDAQKKEGGGWKLPQSVRNMKIF

SEQ ID NO: 884 - protein, 216 aa, Oryza sativa
  subsp. japonica
MDRKDKARKNFSSSSSSSAASMAALAAAAAAGDGGAALPSPMEEDKKPRLVASSLAPVAGGGGGGSSSSAAVAAGASSSSSSSSVAAAARRGAGRAGGGAPSGGGGGPRCQVERCGVDLSEAGRYNRRHKVCQTHSKEPVVLVAGLRQRFCQQCSRFHELTEFDDAKRSCRRRLAGHNERRRKSAADTAHGENCRHADQDAGRSHQGTGNPPFQIR

SEQ ID NO: 885 - protein, 257 aa, Bos taurus
MADKMDMSLDDIIKLNRSQRGGRGGGRGRGRAGSQGGRGGGAQAAARVNRGGGPIRNRPAIARGAAGGGGRNRPAPYSRPKQLPDKWQHDLFDSGFGGGAGVETGGKLLVSNLDFGVSDADIQELFAEFGTLKKAAVHYDRSGRSLGTADVHFERKADALKAMKQYNGVPLDGRPMNIQLVTSQIDTQRRPAQSVNRGGMTRNRGSGGFGGGGGTRRGTRGGSRGRGRGTGRSSKQQLSAEELDAQLDAYNARMDTS

SEQ ID NO: 886 - protein, 116 aa, Sus scrofa
TRTNAIDVLERDLRNLRVWDKHQALQHLVEMLHELEKKKQLKHKDIFFIDRNKKMNQMFLKEIDRVYKVDIQMIDFKDKEKTKKAINQFVADKIDKKAKNLITHLDPQTLLCLVNY

SEQ ID NO: 887 - protein, 76 aa, Saccharomyces cerevisiae
  strain ATCC 204508 / S288c
FENDQNITDPTAWEKVVKDQVDLRKRKHLEENERRHEDAIKRRKEAVNMNVEKPTVYHCKVFQFKNLQNPKIRFKL

SEQ ID NO: 888 - protein, 76 aa, Saccharomyces cerevisiae
  strain ATCC 204508 / S288c
AETDYVDPKRLAMVIIKEFVDDLKKDHIAIDWEDEEKYEDEDEEKILDNTENYDDTELRQLFQENDDDDDDDDEVD

SEQ ID NO: 889 - protein, 96 aa, Bos taurus
LARMRPVDPIEYLALWIYKYKKNVTMEKQRQEEMAQLEHEREVALMEQEMMERLRAEELLFQQQQLEFQLELEEQEKERQRIEELERAQEQFEKEL

SEQ ID NO: 890 - protein, 146 aa, Bos taurus
VFNQYPKFIVDYQTQERERIRNDELDYLRERQAVEEMQAEVDQQRVEDEAWYQKQELLRRAEETRREILLQEEEKMIQQRQRLAAVRRELKVKEMHLQDAARRRLLQLQQDQREMELRRLDDEIERKVHMRDREIAATAKDLEMRH

SEQ ID NO: 891 - protein, 126 aa, Bos taurus
LNKEEQFQEDALKERIAQAEADIWAKADERQRQAVKKALEEANDMYKMQIQFLKEEHEKELKEMATRTKMQLHKNLEEELQREHLAAEQRMVHRIQRIMMECHREKVQAVQEAREQERLMAQEEIQ

SEQ ID NO: 892 - protein, 81 aa, Saccharomyces cerevisiae
  strain ATCC 204508 / S288c
RIAYNTNLHMMLPPNHRKTWYALDDFRKDNLKTDEKRINKLFDLDPFKTMVEDRKLKAQREKEQVAQNNQAQKEQVARTIL

SEQ ID NO: 893 - protein, 71 aa, Saccharomyces cerevisiae
  strain ATCC 204508 / S288c
KVPEHDQQLNTFEKRYDELFDAQFNKLEFFKIRMKKLKKNKPIEKKNYKIWCLEKEDLKDLVWDPLKRICN

SEQ ID NO: 894 - protein, 1938 aa, Bos taurus
MSSDQEMAVFGEAAPYLRKSEKERIEAQNKPFDAKTSVFVADPKESFVKATVQSREGGKVTAKTEAGATVTVKEDQVFPMNPPKFDKIEDMAMMTHLHEPAVLYNLKERYAAWMIYTYSGLFCVTVNPYKWLPVYNAEVVTAYRGKKRQEAPPHIFSISDNAYQFMLTDRENQSILITGESGAGKTVNTKRVIQYFATIAVTGEKKKEEPTSGKMQGTLEDQIISANPLLEAFGNAKTVRNDNSSRFGKFIRIHFGTTGKLASADIETYLLEKSRVTFQLKAERSYHIFYQIMSNKKPELIEMLLITTNPYDYAYVSQGEITVPSIDDQEELMATDSAIEILGFTSDERVSIYKLTGAVMHYGNLKFKQKQREEQAEPDGTEVADKAAYLQGLNSADLLKALCYPRVKVGNEFVTKGQTVEQVYNAVGALAKAVYDKMFLWMVARINQQLDTKQPRQYFIGVLDIAGFEIFDFNSLEQLCINFTNEKLQQFFNHHMFVLEQEEYKKEGIEWEFIDFGMDLAACIELIEKPMGIFSILEEECMFPKATDMSFKNKLYEQHLGKSNNFQKPKPAKGKAEAHFSLIHYAGTVDYNITGWLDKNKDPLNETVVGLYQKSSVKTLALLFSGPASGEAEGGPKKGGKKKGSSFQTVSALFRENLNKLMTNLRSTHPHFVRCIIPNETKTPGAMEHELVLHQLRCNGVLEGIRICRKGFPSRILYADFKQRYKVLNASAIPEGQFIDSKKASEKLLASIDVDHTQYKFGHTKVFFKAGLLGLLEEMRDEKLAQLITRTQARCRGFLARVEYQKMVERRESIFCIQYNVRAFMNVKHWPWMKLYFKIKPLLKSAETEKEMANMKEEFEKTKEELAKSEAKRKELEEKMVTLTQEKNDLQLQVQSEADALADAEERCDQLIKTKIQLEAKIKEVTERAEDEEEINAELTAKKRKLEDECSELKKDIDDLELTLAKVEKEKHATENKVKNLTEEMAGLDETIAKLTKEKKALQEAHQQTLDDLQAEEDKVNTLTKAKTKLEQQVDDLEGSLEQEKKLRMDLERAKRKLEGDLKLAQESTMDIENDKQQLDEKLKKKEFEMSNLQSKIEDEQALAMQLQKKIKELQARIEELEEEIEAERASRAKAEKQRSDLSRELEEISERLEEAGGATSAQIEMNKKREAEFQKMRRDLEEATLQHEATAAALRKKHADSVAELGEQIDNLQRVKQKLEKEKSEMKMEIDDLASNMETVSKAKGNLEKMCRALEDQLSELKTKEDEQQRLINDLTTQRARLQTESGEFSRQLDEKDALVSQLSRGKQAFTQQIEELKRQLEEEIKAKSALAHALQSARHDCDLLREQYEEEQEGKAELQRAMSKANSEVAQWRTKYETDAIQRTEELEEAKKKLAQRLQDAEEHVEAVNAKCASLEKTKQRLQNEVEDLMIDVERTNAACAALDKKQRNFDKILSEWKQKYEETHAELEASQKESRSLSTELFKIKNAYEESLDQLETLKRENKNLQQEISDLTEQIAEGGKRIHELEKVKKQVEQEKSEIQAALEEAEASLEHEEGKILRIQLELNQVKSEIDRKIAEKDEEIDQLKRNHIRIVESMQSTLDAEIRSRNDAIRLKKKMEGDLNEMEIQLNHANRMAAEALKNYRSTQAILKDTQIHLDDALRGQEDLKEQLAMVERRANLLQAEIEELRATLEQTERSRKIAEQELLDASERVQLLHTQNTSLINTKKKLETDITQIQGEMEDIIQEARNAEEKAKKAITDAAMMAEELKKEQDTSAHLERMKKNLEQTVKDLQHRLDEAEQLALKGGKKQIQKLEARVRELEGEVESEQKRNVEAVKGLRKHERRVKELTYQTEEDRKNILRLQDLVDKLQAKVKSYKRQAEEAEEQSNVNLSKFRKLQHELEEAEERADIAESQVNKLRVKSREVHTKIISEE

SEQ ID NO: 895 - protein, 1940 aa, Bos taurus
MSSDQEMAIFGEAAPYLRKSEKERIEAQNKPFDAKTSVFVAEPKESFVKGTIQSREGGKVTVKTEGGATLTVKEDQVFPMNPPKFDKIEDMAMMTHLHEPAVLYNLKERYAAWMIYTYSGLFCVTVNPYKWLPVYNPEVVTAYRGKKRQEAPPHIFSISDNAYQFMLTDRENQSILITGESGAGKTVNTKRVIQYFATIAVTGEKKKEEITSGKIQGTLEDQIISANPLLEAFGNAKTVRNDNSSRFGKFIRIHFGTTGKLASADIETYLLEKSRVTFQLKAERSYHIFYQITSNRKPELIEMLLITTNPYDYPFISQGEISVASIDDQEELIATDSAIDILGFTNEEKVSIYKLTGAVMHYGNLKFKQKQREEQAEPDGTEVADKAAYLQSLNSADLLKALCYPRVKVGNEYVTKGQTVEQVTNAVGALAKAVYEKMFLWMVARINQQLDTKQPRQYFIGVLDIAGFEIFDFNSLEQLCINFTNEKLQQFFNHHMFVLEQEEYKREGIEWTFIDFGMDLAACIELIEKPMGIFSILEEECMFPKATDMSFKNKLYDQHLGKSANFQKPKVVKGKPEAHFALIHYAGVVDYNITGWLEKNKDPLNDTVVGLYQKSALKTLAFLFSGTPTGDSEASGGTKKGGKKKGSSFQTVSALFRENLNKLMTNLRSTHPHFVRCIIPNETKTPGAMEHELVLHQLRCNGVLEGIRICRKGFPSRILYADFKQRYKVLNASAIPEGQYIDSKKASEKLLASIDIDHTQYKFGHTKVFFKAGLLGLLEEMRDEKLAQLMTRTQARCRGFLARVEYQKMVERRESIFCIQYNIRAFMNVKHWPWMKLFFRIKPLLKSAETEKEMATMKEEFQKTKDELAKSEAKRKELEEKMVTLLKEKNDLQLQVQSEAEGLADAEERCDQLIKTKIQLEAKIKEVTERAEDEEEINAELTAKKRKLEDECSELKKDIDDLELTLAKVEKEKHATENKVKNLTEEMAGLDETIAKLTKEKKALQEAHQQTLDDLQAEEDKVNTLTKAKTKLEQQVDDLEGSLEQEKKLRMDLERAKRKLEGDLKLAQESIMDIENEKQQLDEKLKKKEFEISNLQSKIEDEQALGIQLQKKIKELQARIEELEEEIEAERASRAKAEKQRSDLSRELEEISERLEEAGGATSAQIEMNKKREAEFQKMRRDLEEATLQHEATAAALRKKHADSVAELGEQIDNLQRVKQKLEKEKSEMKMEIDDLASNVETISKAKGNLEKMCRTLEDQVNELKSKEEEQQRLINDLTTQRGRLQTESGEFSRQLDEKEALVSQLSRGKQAFTQQIEELKRQLEEEIKAKNALAHGLQSARHDCDLLREQYEEEQESKAELQRALSKANTEVAQWRTKYETDAIQRTEELEEAKKKLAQRLQAAEEHVEAVNAKCASLEKTKQRLQNEVEDLMLDVERTNAACAALDKKQRNFDKILAEWKQKYEETHAELEAAQKEARSLGTELFKMKNAYEESLDQLETLKRENKNLQQEISDLTEQIAEGGKRMHELEKIKKQVEQEKSEIQAALEEAEASLEHEEGKILRIQLELNQVKSEIDRKIAEKDEEIDQLKRNHIRVVESMQTMLDAEIRSRNDAIRLKKKMEGDLNEMEIQLNHANRMAAEALKNYRNTQAILKDTQIHLDDALRGQEDLKEQLAMVERRANLLQAEIEELRATLEQTERSRKIAEQELLDASERVQLLHTQNTSLINTKKKLETDITQIQGEMEDILQEARNAEEKAKKAITDAAMMAEELKKEQDTSAHLERMKKNMEQTVKDLQNRLDEAEQLALKGGKKQIQKLEARVRELEGEVESEQKRNVEAVKGLRKHERRVKELTYQTEEDRKNILRLQDLVDKLQAKVKSYKRQAEEAEEQSNTNLSKFRKLQHELEEAEERADIAESQVNKLRVKSREVHTKIISEE

SEQ ID NO: 896 - protein, 7000 aa, Bos taurus
MATQAPTFTQPLQSVVVLEGSTATFEAHISGFPVPEVSWFRDGQVISTSTLPGVQISFSDGRAKLTIPAVTKANSGRYSLRATNGSGQATSTAELLVTAETAPPNFTQRLQSMTVRQGSQVRLQVRVTGIPTPVVKFYRDGAEIQSSLDFQISQEGELYSLLIAEAYPEDSGTYSVNATNSVGRATSTAELLVQGEEVVPAKRTKTIVSTAQISETRQTRIEKKIEAHFDARSIAAVEMVIDGAAGQQLPHKTPPRIPPKPKSRSPTPPSIAAKAQLARQQSPSPIRHSPSPVRHVRAPTPSPVRSVSPAGRISTSPIRSVKSPLLVRKAQTPTMPPGPEVPPPWKQEGYVASSEAEMRETTVTSATQIRTEERWEGRYGIQEQVTISGAAGAAASTTFAAGAVAAGAAEVKQEADKSAAVATVVAAVDMARVREPVISAVEQTAQRTTTTAVHIQPAHEQIRKEAEKTAVTKVVVAADKAKEQEVKARTREVITTKQEQVHVTHEQIRKETEKAFVPKVVISAAKAKEKETKITGEITTKQEQKQITQETIIQKAETAAVSMVVVETAKPTTLETILGAQEEIVTQQDQMHITHEKILKETRKTVVPKVIVATPKVKEQDVVSRTREGITTKREQVQVTHEKMRKEAEKTALSTIAVATAKAKEQETILRTREEMATRQEQIQVTHGKVGVGKKAEAVATVVAAVDQARVREPREPRHVEESYAQQTTLEYGYKEHISATKVAEQPPRPASEPQVVPKAVKPGVIHAPSETHIATTDQMGMHISSQIKKTTDLTSERLVHVDKRPRTASPHFTVSKISVPKTEHGYEASIAGSAIATLQKELSATPSAQKVTKSVKAPTVKPAEARVRAEPTPSPQFPFAETPETFKSQAGIEVKKEVGVSITGVAVREERFEALRERETKVTETARVPAPVEIPVTPPTLVSGLKNVTVIEGESVTLECHISGYPSPKVTWYREDYQIESSIDFQITFQSGIARLLIREAFAEDSGRFTCTAVNEAGTVSTSCYLAVQVSEEFEKETTAVAEKITTEEKRFVESRDVVMTDTSITEEHAGPGEPAAPFFITKPVVQKLVEGGSIVFECQVGGNPKPHVYWKKSGVPLTSGYRYKVSYNKQTGECRLVISMTFADDAGEYTIVIRNKHGETSASASLLEEADYESLMKSQQEMLYQTQVTAFVQEPKVGEIAPGYVYSEYEKEYEKEQALIRKKMAKDTVMVRTFVEDQEFHISSFEERLIKEIEYRIIKTTLEELLEEDGEEKMAVDISESEAIEAGFDLRVKNYRILEGMGVTFHCKMSGYPLPKIAWYKDGKRIKHGERYHMDFLQDGRASLRIPVVLPEDEGIYTAFASNMKGNAICSGKLYVEPAAPLSAPTYIPTPEPVSRIRSISPRSVSRSPIRMSPARMSPARMSPGRRLEETDESQLERLYKPVFVLKPTSFKCVEGQTARFDLKVVGRPMPETFWFHDGQQIVNDYTHKVVVKEDGTQSLLIVPATPSDSGEWTVVAQNRAGKSSISVILTVEAVEHQVKPVFVEKLRNLNIKEGSRLEMKVRATGNPNPDIVWLKNSEIIVPHKYPKIRIEGTKGEAALKIDSTVSQDSAWYTATAINKAGRDTTRCKVNVEVEFAEPEPERRLIIPRGTYRAKEIAAPELEPLHLRYGQEQWEEGDLYDKEKQQKPFFKKKLTSLRLKRFGPAHFECRLTPIGDPTMVVEWLHDGKPLEAANRLRMINEFGYCSLDYAVAYSRDSGVITCRATNKYGTDHTSATLIVKDEKSLVEESQLPEGRKGLQRIEELERMAHEGALTGVTTDQKEKQKPDIVLFPEPVRVLEGETARFRCRVTGYPQPKVNWYLNGQLIRKSKRFRVRYDGIHYLDIVDCKSYDTGEVKVTAENPEGVIDHKVKLEIQQREDFRSVLRRAPEPKPEFHVHEPGKLQFEVQKVDRPVDTTETKEIVRLKRAERITHEKVSEESEELRSKFKRRTEEGYYEAITAVELKSRKKDESYEELLRKTKEELLHWTKELTEEEKKALAEEGKITIPTFKPDKIELSPSMEAPKIFERIQSQTVGQGSDAHFRVRVVGKPDPECEWYKNGVKIERSDRIYWYWPEDNVCELVIRDVTAEDSASIMVKAINIAGETSSHAFLLVQAKQLITFTQELQDVVAKEKDTMATFECETSEPFVKVKWYKDGVEIHTGDKYRMHSDRKVHFLSVLMIDTSDAEDYSCVLVEDENVKTTAKLIVEGAVVEFVKELQDIEVPESFSGELECIITPENIEGKWYHKGVELKSNGKYTITSRRGRQNLTVKDVTKEDQGEYSFVVDGKKTTCKLKMKPRPIAILQGLSDQKVCEGDIVQLEVKVSLENVEGVWMKDGEEVQPGDRVHIVIDKQSHMLLIEDMTKEDAGHYSFTIPSLGLSTHGRVSVYSVDVITPLKDVNVLEGTKAVLECKVSVPDVTSVKWYLNDEQIKPDDRVHAIVKGTKQRLVINRTHASDEGPYKLVVGRVETSCDLSVEKIKIIRGLRDLTCTETQNVVLEVELSHSGIDVLWNFKDKEIKPSSKYKIEAHGKIYKLTVLNMMKDDEGEYTFYAGENRTSGKLTVAGGAISKPLTDQTVAESQEAVFECEVANPDSEGEWLKDGKHLPLSKTIRSESDGRKRRLIIAATKLDDIGEYTYKVATSKTSAKLKVEAVKIKKTLKNLTVTETQDAVFTVELTHPNVKGVQWIRNGVVLESSDKYTVSVKGTVYSLRIKNCAVADESVYGFKLGKLGASARLHVETVKIIKKPKDVTALENATVSFEVSVSHDTVPVKWFHKNVEIKPSDKHRLVSERKVHKLMLQHISPSDAGEYTAVVGQLECKAKLFVETLHITKTMKNIEVPETKTASFECEVSHFNVPSMWLKNGVEIEMSEKFKIVVQGKLHQLIIMNTSTEDSAEYTFVCGNDQVSATLKVTPIMITSMLKDINAEEKDTITFEVTVNYEGISYKWLKNGVEIKSTDRCQMRTKKLTHSLNIRNVHFGDAAEYTFVAGKATSTATLYVEARHIEFRKHIKDIKVLEKKRAMFECEVSEPDITVQWMKDGQELQLVDRIKIQKEKYVHRLLIPSTRMSDAGKYTVVAGGNMSSANLFVEGRDVRIRSIKREVQVIEKQRAVVEFEVNEDDVDAHWYKDGIEINFQVQERHQYVVERRIHRMFISETRHSDAGEYTFVAGRNRSSVTLYVNAPEPPQILQELQPITVQSGKPARFCAVISGRPQPKISWYKEEQLLSTGFKCKFLHDGQEYTLLLIEAFPEDAAVYTCEARNDYGVATTSASLSVEVPEVVSPDQEMPVYPPAIVSPLQDAVTSEGRPAHFQCRVSGTDLKVSWYSKDKKIKPSRFFKMTQFEDTYQLEVAEAFPEDEGIYTFVASNAVGQVSSTATLRLEAPEAMLHEQIEMEMKEFSISLLSGKEERPQTSSWDLQLFDINETLEPLSEPSVYSPKFDSKKEGNAPVFIKEVSNAEISIGDVAKLFVTVTGIPTPQIQWFFNGAMLTPSADYKFVFDGNDHSLIILFTKLEDEGEYTCIASNEYGQAMCSAYLKINSEAEGHEEPESAEKSLEKLQGPCPPYFLKELKPVHCVQGLPAIFEYVVLGEPAPTVLWFKENKQLCTNVYYTIIHNPDGSGTFIVNDPQKEDGGLYVCKAENVWGGSTCAAELFVLLEDTDMTDATCKAAPTPEAPEGFPHTSVKDPAVETFDSEQEVVTFVKDAILKASLIAEEKQQFSYEHVVKTNELSSQVTLKAEQLQSTVILEHDMPTPESTRELLSISGTIHVQPIKELPPSLQLQIAQSQDTLPREDTLMCQEPESQVVLSDTEKIFPSFMSIEEISLSTVESLQTLLAEPEESYPQPLIKETPAHSYPTSVAEEVLLSKDKTVSAVDRGQRETSQKQESQNALFLNQNLAEGHAQSLQGPDVTVSRVSSEHTCTESEILMESVDQLDSAGQDFAARIEEGQSLRFPLACEEKQVLLKEEHSDTLALPLNQTTEYKKEPMAVNGVQEVQGSDFLSKESLLPGIPEEQRLNLKTQIRSALQAAVASEQLSLFSEWLRNIEQVEVKAIDFTQEPNCIMCTYLITSVKSLTEEVTVTIKGIDPQMADLKTELKEALCSICEEMNILTAEEPGIEKGATVVLQEDVSFSSSQKLEAITEPEAESKYLVSKEEISYFKVESQVKAVGTTTASAAVSDEKQDELPKPSEEKEKVSEGGTEEVGTVEIQEAEDEEDRKLGEDGPDVQTPLVDTIAEEGDIISLTSCITNAKEVNWYFESKLVPSDEKFKCLQDQNTYTLVIDKVNREEHQGEYTCEALNDNGKATTSAKLTVVKRAAPVIRRRIEPLEVALGHLAKFTCEIHSAPNVRFQWFKAGREIYESDKCSIRSANYVTTLEILRTQVVDCGEYTCKASNEYGSVSCTATLTVTEAYPPTFFSRPKSVTTFVGKAAKFLCTVTGTPVIETIWQKDGMALSPSPTCKISDVDNKHILELSNLTVHDKGVYSCKASNKFGADTCQAELDIIDKPHFIKELEPVQSAINKKIHLEGQVDEDRKVTITWSKNGQKLPPGKDYKIYFEDKIASLEIPLAKLKDSGTYVCTASNEAGSSSTSATVTIREPPSFVKKVDPSYLMLPGESARLHCRLKGSPVIQVTWFKNNKELTESNTIRMSFVNSEAVLDITDVKVEDSGTYSCEAVNDVGSDSCSAEIVVKEPPSFIKTLEPADIVRGTNALLQCEIAGTGPFEISWFKDKKQIRSSKKYRLFSQKSTVSLEIFSFNSADVGDYECVVANEVGKCGCVATHLLKVEPPTFVKKVDDFTALAGQTVTLQAAVRGSEPISVTWMKGQEIIKEDGKIKMSFANGVAVLIIPDVQISFGDKYTCLAENEAGSQTSVGELIVKEPAKIIERAELIQVTAGDPATLEYTVAGTPELKPKWYKDGRPLVASKKYRISFKNNVAQLKFYSAELHDSGQYTFEISNEVGSSSCETTFTVLDRDIAPFFTKPLRNVDSVVSGTCRLDCKIAGSLPMRVSWFKDGKEVTSSDRYRIAFVEGTASLEISRVDMSDAGNFTCRATNSVGSKDCSGALIVQEPPSFVTKPASKDILPGSAVFLKSTFQGSTPFTIRWFKGDKELVSGGNCYINKEALESSLELYSVKTTDSGTYTCKVSNVAGAVECSANLFVKEPATFVERLELSQLLKKGDTTQLACKVTGTPPIKITWFANDREIKESSKHKMSFVESTAVLRLTDIAVEDSGEYMCEAQNEAGSDHCSSILIVKESPYFTKEFKPIEVLKEYDVMLLAEVAGTPPFEITWFKDNTTLRSGRKYKTFIQDRLVSLQILKFVAADVGKYQCRVTNEVGSSTCSARVTLREPPTFVKKIESTSSLRGGTAAFQATLKGSLPITVTWLKDNEEITEDDNIRMTFENNVASLYLSGIEVKHDGKYVCQAKNDAGIQRCFAVLSVKEPATIIEEAVSIDVTQGDPATLQVKFSGTKEITAKWFKDGQELTLGQKYKISVTDTVSILKIISTEKRDSGEYTFEVQNDVGRSSCKASINVLDLIIPPSFTKKLKKMDSIKGSSIDLECIVAGSHPISIQWFKDDQEITASEKYKFSFHDNTAFLEISQLEGSDSGTYTCSATNKAGHNQCSGHLTVKEPPYFLEKPQSQDVNPNTRVQLKALVGGTAPMTIKWFKDNKELHSGAARSVWKDDTSTILELFSAKAADSGTYICQLSNDVGTATTKASLFVKEPPQFIKKPSPVLVLRNGQSTTFECQITGTPEIRVSWYLDGNEITAVEKHGISFIDGLATFQISGARVENSGTYVCEAQNDAGTASCSIELKVKEPPTFIRELKPVEVVKDSDVELECEVMGTSPFQVTWLRNNKEIRSSKKYTLTDRVSVFNLNINRCDPSDTGDYQCIVSNEGGSCSCSARVSLKEPPSFIKKIENITTVLKSSATFQSTVAGSPPISITWLKDDQILDEDDNVHISFVNNVATLQIRSVDNGHSGRYTCQAKNESGVERCYAFLLVQEPAQIIEKAKSVDVTERDPVTLECVVAGTPELKVKWLKDGKQIVPSRYFSMSFENNVASFRIQSVMKQDSGEYTFKVENDFGSSSCDAYLRVLDQNIPPSFTKKLTKMDKVLGSSIHMECKVSGSLPISAQWFKDGKEISTSAKYRLVCHENTVSLDVNNLELEDTANYTCRVSNVAGDAACSGILTVKEPPSFLVKPERQQAIPDSTVEFKAVLKGTPPFKIKWFKDDVELASGPKCFIGLEGSTSFLNLYSVDASKTGQYTCQVTNDVGSDSCTTTLLVTEPPKFVKKLEATKIVKAGDSARLECKITGSPDIRVVWYRNEHELPASDKYRMAFIDSVAVLQMNYLGTEDTGDFICEAQNPAGSTSCSTKVIVKEPPVFSSFPPVVETLKNAEVSIECELSGTPPFEVVWYKDKRQLRSSKKYKIASKNFHASIHILNVDTLDIGEYHCKAQNEVGSDTCICIVKLKEPPRFVSKLNSLTVVAGEPAELQASIEGTQPISVQWLKEKEEVVRESENIRITFVENVATLQFSKAEPANAGKYICQIKNDGGMRENMATLSFISEPAVIVEKAGSMTVTVGETCTLECKVAGTPELSVEWYKDGKLLTSSQKHKFSFYNKISSLKILSVEKQDAGTYTFQVQNNVGKSSCTAVVDVSDRMVPPSFTRRLKDTIGVLGTSCILECKVAGSSPISVAWFHGKTKIVSGAKYQTTFSDNVCTLQLNSLDSSDMGSYTCVAANVAGSDECRAVLAVQEPPSFVKEPEPLEVLPGKNITFTSVIRGTPPFKVGWFRGARELVKGDRCNIYFEDTVAELELFNVDISQSGEYTCVVSNNAGQTSCTTRLFVKEPAVFVKKLSDHSVEPGKSIILESTYKGTLPISVTWKKDGFNITPSEKCSIVTTEKTCILEILNSTKRDAGRYSCEIENEAGRDVCEALVSTLEPPYFVTELEPLEASVGDSVSL

SEQ ID NO: 897 - protein, 1935 aa, Bos taurus
MVDAEMAAFGEAAPYLRKSEKERLEAQTRPFDLKKDVFVPDDKEEFVKATILSREGGKVTAETEHGKTVTVKEDQVLQQNPPKFDKIEDMAMLTFLHEPAVLYNLKERYASWMIYTYSGLFCVTINPYKWLPVYNAEVVAAYRGKKRSEAPPHIFSISDNAYQYMLTDRENQSILITGESGAGKTVNTKRVIQYFAVIAAIGDRSKKEQATGKGTLEDQIIQANPALEAFGNAKTVRNDNSSRFGKFIRIHFGATGKLASADIETYLLEKSRVIFQLKAERDYHIFYQILSNKKPELLDMLLITNNPYDYAFISQGETTVASIDDAEELMATDNAFDVLGFTTEEKNSMYKLTGAIMHFGNMKFKLKQREEQAEPDGTEEADKSAYLMGLNSADLLKGLCHPRVKVGNEYVTKGQNVQQVVYAKGALAKAVYERMFNWMVTRINATLETKQPRQYFIGVLDIAGFEIFDFNSFEQLCINFTNEKLQQFFNHHMFVLEQEEYKKEGIEWEFIDFGMDLQACIDLIEKPMGIMSILEEECMFPKATDMTFKAKLFDNHLGKSSNFQKPRNIKGKPEAHFSLIHYAGTVDYNIIGWLQKNKDPLNETVVDLYKKSSLKMLSSLFANYAGFDTPIEKGKGKAKKGSSFQTVSALHRENLNKLMTNLRSTHPHFVRCIIPNETKSPGVIDNPLVMHQLRCNGVLEGIRICRKGFPNRILYGDFRQRYRILNPAAIPEGQFIDSRKGAEKLLGSLDIDHNQYKFGHTKVFFKAGLLGLLEEMRDERLSRIITRIQAQSRGVLSRMEFKKLLERRDSLLIIQWNIRAFMGVKNWPWMKLYFKIKPLLKSAETEKEIALMKEEFGRLKEALEKSEARRKELEEKMVSLLQEKNDLQLQVQAEQDNLADAEERCDQLIKNKIQLEAKVKEMTERLEDEEEMNAELTAKKRKLEDECSELKRDIDDLELTLAKVEKEKHATENKVKNLTEEMAGLDEIIAKLTKEKKALQEAHQQALDDLQAEEDKVNTLTKAKVKLEQHVDDLEGSLEQEKKVRMDLERAKRKLEGDLKLTQESIMDLENDKQQLDERLKKKDFELNALNARIEDEQALGSQLQKKLKELQARIEELEEELEAERTARAKVEKLRSDLSRELEEISERLEEAGGATSVQIEMNKKREAEFQKMRRDLEEATLQHEATAAALRKKHADSVAELSEQIDNLQRVKQKLEKEKSEFKLELDDVTSNMEQIIKAKANLEKMCRTLEDQMNEHRSKAEETQRSVNDLTSQRAKLQTENGELSRQLDEKEALISQLTRGKLTYTQQLEDLKRQLEEEVKAKNALAHALQSARHDCDLLREQYEEETEAKAELQRVLSKANSEVAQWRTKYETDAIQRTEELEEAKKKLAQRLQDAEEAVEAVNAKCSSLEKTKHRLQNEIEDLMVDVERSNAAAAALDKKQRNFDKILAEWKQKYEESQSELESSQKEARSLSTELFKLKNAYEESLEHLETFKRENKNLQEEISDLTEQLGSSGKTIHELEKVRKQLEAEKLELQSALEEAEASLEQEEGKILRAQLEFNQIKAEMERKLAEKDEEMEQAKRNHLRVVDSLQTSLDAETRSRNEALRVKKKMEGDLNEMEIQLSHANRLAAEAQKQVKSLQSLLKDTQIQLDDAVRANDDLKENIAIVERRNNLLQAELEELRAVVEQTERSRKLAEQELIETSERVQLLHSQNTSLINQKKKMEADLSQLQTEVEEAVQECRNAEEKAKKAITDAAMMAEELKKEQDTSAHLERMKKNMEQTIKDLQHRLDEAEQIALKGGKKQLQKLEARVRELENELEAEQKRNAESVKGMRKSERRIKELTYQTEEDRKNLLRLQDLVDKLQLKVKAYKRQAEEAEEQANTNLSKFRKVQHELDEAEERADIAESQVNKLRAKSRDIGTKGLNEE

SEQ ID NO: 898 - protein, 377 aa, Bos taurus
MCDEDETTALVCDNGSGLVKAGFAGDDAPRAVFPSIVGRPRHQGVMVGMGQKDSYVGDEAQSKRGILTLKYPIEHGIITNWDDMEKIWHHTFYNELRVAPEEHPTLLTEAPLNPKANREKMTQIMFETFNVPAMYVAIQAVLSLYASGRTTGIVLDSGDGVTHNVPIYEGYALPHAIMRLDLAGRDLTDYLMKILTERGYSFVTTAEREIVRDIKEKLCYVALDFENEMATAASSSSLEKSYELPDGQVITIGNERFRCPETLFQPSFIGMESAGIHETTYNSIMKCDIDIRKDLYANNVMSGGTTMYPGIADRMQKEITALAPSTMKIKIIAPPERKYSVWIGGSILASLSTFQQMWITKQEYDEAGPSIVHRKCF

SEQ ID NO: 899 - protein, 375 aa, Bos taurus; identical to SEQ ID NO: 862

SEQ ID NO: 900 - protein, 1934 aa, Bos taurus
MSSDAEMAIFGEAAPYLRKSEKERIEAQNRPFDSKKACFAVDDKELYVKGMIQGRENDKVTVKTLDDRTLTLNSEQVFPMNPPKFDKIEDMAMMTHLHEPAVLYNLKERYAAWMIYTYSGLFCVTVNPYKWLPVYNPEVVAAYRGKKRQEAPPHIFSISDNAYQFMLTDRDNQSILITGESGAGKTVNTKRVIQYFATIAVTGDKKKEQQPGKMQGTLEDQIIQANPLLEAFGNAKTVRNDNSSRFGKFIRIHFGATGKLASADIETYLLEKSRVTFQLSSERSYHIFYQIMSNKKPELIDLLLISTNPFDFPFVSQGEVTVASIDDSEELLATDNAIDILGFSSEEKVGIYKLTGAVMHYGNMKFKQKQREEQAEPDGTEVADKAGYLMGLNSAEMLKGLCCPRVKVGNEYVTKGQNVQQVTNSVGALAKAVYEKMFLWMVTRINQQLDTKQPRQYFIGVLDIAGFEIFDFNSLEQLCINFTNEKLQQFFNHHMFVLEQEEYKKEGIEWEFIDFGMDLAACIELIEKPMGIFSILEEECMFPKATDTSFKNKLYDQHLGKSNNFQKPKPAKGKAEAHFSLVHYAGTVDYNIAGWLDKNKDPLNETVVGLYQKSSLKLLSFLFSNYAGAEAGDSGASKKGGKKKGSSFQTVSAVFRENLNKLMTNLRSTHPHFVRCLIPNETKTPGVMDHHLVLHQLRCNGVLEGIRICRKGFPSRILYGDFKQRYRILNASAIPEGQFIDSKNASEKLLNSIDVDREQYRFGHTKVFFKAGLLGLLEEMRDEKLVTLMTRTQALCRGYLMRVEFKKMMERRDSIFCIQYNIRSFMNVKHWPWMNLFFKIKPLLKSAEAEKEIATMKEDFERAKEELARSEARRKELEEKMVSLLQEKNDLQLQVQTETENLMDAEERCEGLIKSKIQLEAKVKELNERLEEEEEMNSELVAKKRNLEDKCSSLKRDIDDLELTLTKVEKEKHATENKVKNLSEEMTALEENISKLTREKKSLQETHQQTLDDLQVEEDNVNGLIKINAKLEQQTDDLEGCLEQEKKLRADLERAKRKLEGDLKLCQESIMDLENDKQQMEEKLQKKDFEISQLQTKIEDKQVHSLQLQKKIKELQARTEELEEEVEAEHTLRGKIEKQRADLSRELEEISERLEEASGATSVQIEMNKKREAEFQKLLRDLEEATLQHEATTTTLRKKHADSVAELGEQIDNLQRVKQKLEKEKSELKMEIDDMASNIETVSKSKSNVERMCRTVEDQFNEIKAKDDQQTQLIHDLNMQKARLQTQNGELSHQVEEKAALISQLTKGKQVLTQQLEDLKRQLEEETKAKSALAHALKSARHDCDLLREQYEEEQEGKAELQRAMSKANSEVAQWRTKYETDAIQRTEELEEAKKKLAQRLQEAEENTEAASSKCASLEKTKQRLQGEVDDLMLDLERANTACACLDKKQRNFDKVISEWKQKLDESQAELEAAQKESRSHSTEVFKMRNAYEEVVDQLETLRRENKNLQEEISDLTMQIAETNKNLQEVEKTKKQAEQEKSDLQAALEEVEGSLEHEESKILRVQLELNQVKSELDRRLTEKDEEIEQLKRSSQRAAEAMQSILDAEIRSRNDALRLKKKMEGDLNEMEIQLGHSNRQMAETQKHLRSVQGQLKDSQLHLDDALRSNEDLKEQLAMVERRNGLLQEELEEMKVALEQTERTRKLSEQELLDASDRMQLLHSQNTSLINTKKKLEADIAQCQAEVENSIQESKNAEEKAKKAITDAAMMAEELKKEQDTSAHLERMMKNLEQTVKDLQHRLDEAEQLALKGGKKQIHKLENRVRELESELDAEQKRGAEALKGAHRYERKVKEMTYQAEEDRKNILRLQDLVDKLQAKVKAYKRQAEEAEEQANTQLSRCRRVQHELEEAEERADIAESQVNKLRAKSRDVGAQ

SEQ ID NO: 901 - protein, 381 aa, Bos taurus
MPFGNTHNKHKLNFKAEEEYPDLSKHNNHMAKALTLEIYKKLRDKETPSGFTLDDVIQTGVDNPGHPFIMTVGCVAGDEESYTVFKDLFDPIIQDRHGGFKPTDKHKTDLNHENLKGGDDLDPNYVLSSRVRTGRSIKGYALPPHCSRGERRAVEKLSVEALNSLTGEFKGKYYPLKSMTEQEQQQLIDDHFLFDKPVSPLLLASGMARDWPDARGIWHNDNKSFLVWVNEEDHLRVISMEKGGNMKEVFRRFCVGLQKIEEIFKKAGHPFMWNEHLGYVLTCPSNLGTGLRGGVHVKLAHLSKHPKFEEILTRLRLQKRGTGGVDTAAVGSVFDVSNADRLGSSEVEQVQLVVDGVKLMVEMEKKLEKGQSIDDMIPAQK

SEQ ID NO: 902 - protein, 842 aa, Bos taurus
MSRPLTDQEKRKQISVRGLAGVENVTELKKNFNRHLHFTLVKDRNVATPRDYYFALAYTVRDHLVGRWIRTQQHYYEKDPKRIYYLSLEFYIGRTLQNTMVNLALENACDEATYQLGLDMEELEEIEEDAGLGNGGLGRLAACFLDSMATLGLAAYGYGIRYEFGIFNQKISGGWQMEEADDWLRYGNPWEKARPEFTLPVHFYGRVEHTSQGAKWVDTQVVLAMPYDTPVPGYRNNVVNTMRLWSAKAPNDFNLKDFNVGGYIQAVLDRNLAENISRVLYPNDNFFEGKELRLKQEYFVVAATLQDIIRRFKSSKFGCLDPVRTNFDAFPDKVAIQLNDTHPSLAIPELMRILVDQERLEWEKAWEVTVKTCAYTNHTVLPEALERWPVHLIETLLPRHLQIIYEINQRFLNRVAAAFPGDVDRLRRMSLVEEGAVKRINMAHLCIAGSHAVNGVARIHSEILKKTIFKDFYELEPHKFQNKTNGITPRRWLVMCNPGLAEIIAERIGEEYIADLDQLRKLLSYVDDESFIRDVAKVKQENKLKFSAYLEKEYKVHINPNSLFDIQVKRIHEYKRQLLNCLHVITLYNRIKKEPNKFFVPRTVMIGGKAAPGYHMAKMIIKLITAIGDVVNHDPVVGDRLRVIFLENYRVSLAEKVIPAADLSEQISTAGTEASGTGNMKFMLNGALTIGTMDGANVEMAEEAGEENFFIFGMRVEDVERLDQKGYNAQEYYDRIPELRHVIDQLSSGFFSPKQPDLFKDIVNMLMHHDRFKVFADYEEYVKCQERVSALYKNPREWTRMVIRNIATSGKFSSDRTIAQYAREIWGVEPTRQRMPAPDEKI

SEQ ID NO: 903 - protein, 894 aa, Bos taurus
MNQIEPGVQYNYVYEDDEYMIQEEEWDRDLLLDPAWEKQQRKTFTAWCNSHLRKAGTQIENIEEDFRNGLKLMLLLEVISGERLPKPDRGKMRFHKIANVNKALDYIASKGVKLVSIGAEEIVDGNVKMTLGMIWTIILRFAIQDISVEETSAKEGLLLWCQRKTAPYRNVNIQNFHTSWKDGLGLCALIHRHRPDLIDYSKLNKDDPIGNINLAMEIAEKHLDIPKMLDAEDIVNTPKPDERAIMTYVSCFYHAFAGAEQAETAANRICKVLAVNQENERLMEEYERLASELLEWIRRTIPWLENRTPEKTMQAMQKKLEDFRDYRRKHKPPKVQEKCQLEINFNTLQTKLRISNRPAFMPSEGKMVSDIAGAWQRLEQAEKGYEEWLLNEIRRLERVEHLAEKFRQKASTHETWAYGKEQILLQKDYESSTLTEVRALLRKHEAFESDLAAHQDRVEQIAAIAQELNELDYHDAVNVNDRCQKICDQWDRLGTLTQKRREALERTEKLLETIDQLHLEFAKRAAPFNNWMEGAMEDLQDMFIVHSIEEIQSLITAHEQFKATLPEADGERQSILAIQNEVEKVIQSYSIRISSSNPYSTVTVDEIRSKWDKVKQLVPIRDQSLQEELARQHANERLRRQFAAQANAIGPWIQNKMEEIARSSIQITGALEDQMNQLKQYEHNIINYKNNIDKLEGDHQLIQEALVFDNKHTNYTMEHIRVGWELLLTTIARTINEVETQILTRDAKGITQEQMNEFRASFNHFDRRKNGLMDHEDFRACLISMGYDLGEAEFARIMTLVDPNGQGTVTFQSFIDFMTRETADTDTAEQVIASFRILASDKPYILAEELRRELPPDQAQYCIKRMPAYSGPGSVPGALDYTAFSSALYGESDL

SEQ ID NO: 904 - protein, 901 aa, Bos taurus
MMMVLQPEGLGTGEGPFAGGRGGGEYMEQEEDWDRDLLLDPAWEKQQRKTFTAWCNSHLRKAGTQIENIEEDFRNGLKLMLLLEVISGERLPRPDKGKMRFHKIANVNKALDFIASKGVKLVSIGAEEIVDGNLKMTLGMIWTIILRFAIQDISVEETSAKEGLLLWCQRKTAPYRNVNVQNFHTSWKDGLALCALIHRHRPDLIDYAKLRKDDPIGNLNTAFEVAEKYLDIPKMLDAEDIVNTPKPDEKAIMTYVSCFYHAFAGAEQAETAANRICKVLAVNQENEKLMEEYEKLASELLEWIRRTVPWLENRVGEPSMSAMQRKLEDFRDYRRLHKPPRVQEKCQLEINFNTLQTKLRLSHRPAFMPSEGKLVSDIANAWRGLEQAEKGYEDWLLSEIRRLQRLQHLAEKFQQKASLHEAWTRGKEDMLSQRDYETASLQEVRALLRRHEAFESDLAAHQDRVEHIAALAQELNELDYHEAASVNSRCQAICDQWDNLGTLTQKRRDALERMEKLLETIDQLQLEFARRAAPFNNWLDGAVEDLQDVWLVHSVEETQSLVTAHDQFKATLPEADRERGAILGIQGEIQKICQTYGLRPSSTNPYITLTPQDINTKWDTVRKLVPSRDQMLQEELTRQQVNERLRRQFAAQANAIGPWIQGKVEEVGRLAAGMAGSLEEQMAGLRQQEQNIINYKSNIDRLEGDHQLLQESLVFDNKHTVYSMEHIRVGWEQLLTSIARTINEVENQVLTRDAKGLSQEQLNEFRASFNHFDRKRNGMMEPDDFRACLISMGYDLGEVEFARIMTMVDPNAAGVVTFQAFIDFMTRETAETDTAEQVVASFKILAGDKNYITAEELRRELPAEQAEYCIRRMAPYKGAGAPAGALDYVAFSSALYGESDL

SEQ ID NO: 905 - protein, 284 aa, Bos taurus
MDAIKKKMQMLKLDKENALDRAEQAEADKKAAEDRSKQLEDELVSLQKKLKATEDELDKYSEALKDAQEKLELAEKKATDAEADVASLNRRIQLVEEELDRAQERLATALQKLEEAEKAADESERGMKVIESRAQKDEEKMEIQEIQLKEAKHIAEDADRKYEEVARKLVIIESDLERAEERAELSEGKCAELEEELKTVTNNLKSLEAQAEKYSQKEDKYEEEIKVLSDKLKEAETRAEFAERSVTKLEKSIDDLEDELYAQKLKYKAISEELDHALNDMTSI

SEQ ID NO: 906 - protein, 434 aa, Bos taurus
MAMQKIFAREILDSRGNPTVEVDLHTAKGRFRAAVPSGASTGIYEALELRDGDKSRYLGKGVLKAVEHINKTLGPALLEKKLSVVDQEKVDKFMIELDGTENKSKFGANAILGVSLAVCKAGAAEKGVPLYRHIADLAGNPELILPVPAFNVINGGSHAGNKLAMQEFMILPVGASSFREAMRIGAEVYHHLKGVIKAKYGKDATNVGDEGGFAPNILENNEALELLKTAIQAAGYPDKVVIGMDVAASEFYRNGKYDLDFKSPDDPARHISGEKLGELYKNFIKNYPVVSIEDPFDQDDWATWTSFLSGVNIQIVGDDLTVTNPKRIAQAVEKKACNCLLLKVNQIGSVTESIQACKLAQSNGWGVMVSHRSGETEDTFIADLVVGLCTGQIKTGAPCRSERLAKYNQLMRIEEALGDKAVFAGRKFRNPKAK

SEQ ID NO: 907 - protein, 1198 aa, Bos taurus
MPEPTKKEENEVLAPAPAPPPEEPNKEKEAGTAPVKEPNKEKEAGTAPAKEPNKEKEAGTAPAKEPNKEKEAGTSPGKDEEDASPPGGLPPEWSIGESPAGEEQDKQNANSQLSILFVEKPQGGTVKVGENITFIAKVKAEDLLRKPTVKWFKGKWMDLASKAGKHLQLKETFERHSRVYTFEMQIIKAKENYAGNYRCEVTYKDKFDSCSFDLEVLESTGTTPNIDIRSAFKRSGEGQDDAGELDFSGLLKRREVKPQEEQPEVDVWELLKNAKPSEYEKIAFQYGITDLRGMLRRLKRMRRVEKKSAAFARILDPAYQVDKGGRVRFVVELADPKLEVKWYKNGQEIRPSTKYIFEHKGCERIMFINNCVLTDDSEYYVTAGDEKCSTELFVREPPVMVTKQLEDTKAYCGERVELECEVSEDDANVKWFKNGEEIIPGPKSRYHIRVEGKKHILIIDGATKADSAEYSVMTTGGQSSAKLSVDLKPLKILTPLTDQTVNLGKEICLKCEVSENITGKWTKNGLPVQETDHLKIVHKGRIHKLVIANALVEDEGDYVFTPDDYSVTLPAKVHVVDPPKINLDGLDADNTVTVIAGNKLRLEIPISGEPPPKALWSRADKAIMEGSGRIRSENYPDSTTLVIDIAEKDDSGVYHINLKNEAGEAHASIKIKVVDIPDPPVAPNVTDVGDDWCIMTWDPPLYDGGSPILGYFIERKKKQSSRWMRLNFDLCKETIFEPKKMIEGVAYEVRIFAVNAVGISKPSMPSKPFVPLAVTSPPTLLTVDSVTDTTVTMKWRPPDQIGAAGLDGYVLEYCFEGSTSAKQSDENGEAAYDLPADDWIAANTELIEKTKFTITGLPTDSRIYVRVKAVNAAGASEPKYYSQPILVKEIIEAPKIRIPRHLKQTYIRRVGEAINLVIPFQGKPRPELIWTKDGAPIDKNQINIRNSETDTIVFIRKAERSHSGKYDLQVKVEKFVETASIDIRVIDRPGPPQLVKIEDVWGENVALSWTPPRDDGNTAITGYTIQKADKKSMEWFTVIEHYHRTSATITELVIGNEYYFRVFAENMCGLSEDATMTKESAVIAKDGKIYKNPVYEDFDFTEAPMFTQPLVNTYAVAGYNATLNCSVRGNPKPKITWMKNKVVIKDDPRYRMFSNQGVCTLEIRKPSPYDGGTYCCKAVNDLGTVEIECKLEVKVVAQ

SEQ ID NO: 908 - protein, 284 aa, Bos taurus
MDAIKKKMQMLKLDKENAIDRAEQAEADKKQAEDRCKQLEEEQQALQKKLKGTEDEVEKYSESVKDAQEKLEQAEKKATDAEADVASLNRRIQLVEEELDRAQERLATALQKLEEAEKAADESERGMKVIENRAMKDEEKMELQEMQLKEAKHIAEDSDRKYEEVARKLVILEGELERSEERAEVAESKCGDLEEELKIVTNNLKSLEAQADKYSTKEDKYEEEIKLLEEKLKEAETRAEFAERSVAKLEKTIDDLEDEVYAQKMKYKAISEELDNALNDITSL

SEQ ID NO: 909 - protein, 333 aa, Bos taurus
MVKVGVNGFGRIGRLVTRAAFNSGKVDIVAINDPFIDLHYMVYMFQYDSTHGKFNGTVKAENGKLVINGKAITIFQERDPANIKWGDAGAEYVVESTGVFTTMEKAGAHLKGGAKRVIISAPSADAPMFVMGVNHEKYNNTLKIVSNASCTTNCLAPLAKVIHDHFGIVEGLMTTVHAITATQKTVDGPSGKLWRDGRGAAQNIIPASTGAAKAVGKVIPELNGKLTGMAFRVPTPNVSVVDLTCRLEKPAKYDEIKKVVKQASEGPLKGILGYTEDQVVSCDFNSDTHSSTFDAGAGIALNDHFVKLISWYDNEFGYSNRVVDLMVHMASKE

SEQ ID NO: 910 - protein, 332 aa, Bos taurus
MATLKDQLIQNLLKEEHVPQNKITIVGVGAVGMACAISILMKDLADEVALVDVMEDKLKGEMMDLQHGSLFLRTPKIVSGKDYNVTANSRLVIITAGARQQEGESRLNLVQRNVNIFKFIIPNIVKYSPNCKLLVVSNPVDILTYVAWKISGFPKNRVIGSGCNLDSARFRYLMGERLGVHPLSCHGWILGEHGDSSVPVWSGVNVAGVSLKNLHPELGTDADKEQWKAVHKQVVDSAYEVIKLKGYTSWAIGLSVADLAESIMKNLRRVHPISTMIKGLYGIKEDVFLSVPCILGQNGISDVVKVTLTHEEEACLKKSADTLWGIQKELQF

SEQ ID NO: 911 - protein, 1467 aa, Bos taurus
MSLVAVPFYQKRHKHFDQSYRNIQTRYLLDEYSAKKKRASAQSSLQRSVTRKSSSQRESSRAALGRTTCRLCAKRMSSALEEEAQERKRRYQSMVAAYGEAKRERYLSELAQLEEDVHVARTHARDQLDRLALQHAVDDRLAWERHSFEERISRAPEILVRLRSHTVWERMSVKLCFTVQGFPTPVVQWYKDGSLICQAGEPGKYRIDSKYGVHTLEINRADFDDTATYSAVATNVHGQVSTNAAVVVRRFRGDEEPFHSVGLPIGLPLSSVIPYTHFDVQFIEKFGVTFRREGETLTLKCTLLVTPDLKRVQPRAEWYRDDVLLKESKWTKMFFGEGQASLSFSHLNKDDEGLYTLRIVSRGGITDHSAFLFVRDADPLVTGAPGAPMDVHCHDVNRDYVIVTWKPPNATKESPVIGYFIDRCEVGTDNWIQCNDAPVKICKYPVTGLFEGRSYIFRVRAVNSAGISRPSRVSEAVAALDPVDLRRLQAVHLEGEKDIVVYQEELEGEVQIPGPPTNVHASETSRTYVVLSWDPPEPRGKEPLMYFIEKSMVGSGSWQRVNAQTAVRSPRYAVFDLAEGKPYVFRVLSANKHGLSDPSEITAPIQAQDTIVVPSAPGRVLASRNTRTSVVVQWDRPKHEEDLLGYYVDCSVAGSNVWEPCNHKPIGYNRFVVHGLTTGEQYIFRVKAVNAVGTSENSQESDVIKVQAALTVPSHPYGITLLNCDGHSMILGWKVPKFSGGSPILGYYVDKREAHHKNWHEVNSSPLKERILTVEGLTEGSLYEFKIAAANMAGIGQPSDPSELFKCEAWTMPEPGPAYDLTFCEVRDTSLVLLWKPPVYSGSSPVSGYFVDYKEEDSGEWLTVHETATPHRYLKVCDLHQGKTYVFRVRAVNASGVGRPSDTSEPVLVEARPGTKEVSAGVDEEGNVYLSFDCPEVTDASHFTWCKSYEDIADDDRFKVETAGDHSKLYFKNLDKEDLGTYSVSVSDTDGVSSSFVLDEEELERLKALSNEIKNPTIPLKSELAYEIFDKGQVRFWLQAEHLSPDSSYRFIINDREVADSETHRIKCDKSTGIIEMVMDRFTIDNEGTYTVQIQDGKAKSQSSLVLIGDAFKAVLKEAEFQRKEFLRKQGPHFAEYLHWDVTEECEVRLVCKVANTKKETVFKWLKDDVLYETEKMPDLEKGVCELLIPKLSKKDHGEYKATLKDDRGQDVSTLEIAGKVYEDMILAMSRVCGASASPLKILCTPEGIRLQCFMKYFTEEMKVNWYHKDAKITSSEHMRIGGNEQMAWLQICEPTEKDKGKYTFEILDGKKNHQRSLDLSGQAFDEAFAEFQQLKAAAFAEKNRGKVIGGLPDVVTIMEGKTLNLTCTVFGNPDPEVVWFKNDKDIELSDHFSVKVEQGKYVSMTIKGVTSEDSGKYSIHVKNKYGGEKIDVTVSVYKHGEEIPDVVLPQQAKPKLLPAAAPSPAH

SEQ ID NO: 912 - protein, 192 aa, Bos taurus
MAPKKDVKKPAAAAAPAPAPAPAPAPAPAPPKEEKIDLSAIKIEFSKQQQDEFKEAFLLFDRTGECKITLSQVGDVLRALGTNPTNAEVKKVLGNPSNEEMNAKKIEFEQFLPMLQAISNNKDQGTYEDFVEGLRVFDKEGNGTVMGAELRHVLATLGEKMKEEEVEALMAGQEDSNGCINYEAFVKHIMSN

SEQ ID NO: 913 - protein, 607 aa, Bos taurus
MKWVTFISLLLLFSSAYSRGVFRRDTHKSEIAHRFKDLGEEHFKGLVLIAFSQYLQQCPFDEHVKLVNELTEFAKTCVADESHAGCEKSLHTLFGDELCKVASLRETYGDMADCCEKQEPERNECFLSHKDDSPDLPKLKPDPNTLCDEFKADEKKFWGKYLYEIARRHPYFYAPELLYYANKYNGVFQECCQAEDKGACLLPKIETMREKVLASSARQRLRCASIQKFGERALKAWSVARLSQKFPKAEFVEVTKLVTDLTKVHKECCHGDLLECADDRADLAKYICDNQDTISSKLKECCDKPLLEKSHCIAEVEKDAIPENLPPLTADFAEDKDVCKNYQEAKDAFLGSFLYEYSRRHPEYAVSVLLRLAKEYEATLEECCAKDDPHACYSTVFDKLKHLVDEPQNLIKQNCDQFEKLGEYGFQNALIVRYTRKVPQVSTPTLVEVSRSLGKVGTRCCTKPESERMPCTEDYLSLILNRLCVLHEKTPVSEKVTKCCTESLVNRRPCFSALTPDETYVPKAFDEKLFTFHADICTLPDTEKQIKKQTALVELLKHKPKATEEQLKTVMENFVAFVDKCCAADDKEACFAVEGPKLVVSTQTALA

SEQ ID NO: 914 - protein, 993 aa, Bos taurus
MEAAHSKTTEECLAYFGVSETTGLTPDQVKRHLEKYGHNELPAEEGKSLWELVLEQFEDLLVRILLLAACISFVLAWFEEGEETVTAFVEPFVILLILIANAIVGVWQERNAENAIEALKEYEPEMGKVYRADRKSVQRIKARDIVPGDIVEVAVGDKVPADIRILTIKSTTLRVDQSILTGESVSVIKHTEPVPDPRAVNQDKKNMLFSGTNIAAGKAIGIVATTGVGTEIGKIRDQMAATEQDKTPLQQKLDEFGEQLSKVISLICVAVWLINIGHFNDPVHGGSWIRGAIYYFKIAVALAVAAIPEGLPAVITTCLALGTRRMAKKNAIVRSLPSVETLGCTSVICSDKTGTLTTNQMSVCKMFIIDRIDGDLCLLNEFSVTGSTYAPEGEVLKNDKPVRSGQYDGLVELATICALCNDSSLDFNETKGIYEKVGEATETALTTLVEKMNVFNTEVRNLSKVERANACNSVIRQLMKKEFTLEFSRDRKSMSVYCSPAKSRAAVGNKMFVKGAPEGVIDRCNYVRVGTTRVPMTGPVKEKILSVIKEWGTGRDTLRCLALATRDTPPKREEMVLDDSTKFMEYETDLTFVGVVGMLDPPRKEVMGSIQLCRDAGIRVIMITGDNKGTAIAICRRIGIFGENEDVADRAYTGREFDDLPLAEQREACRRACCFARVEPTHKSKIVEYLQSFDEITAMTGDGVNDAPALKKAEIGIAMGSGTAVAKTASEMVLADDNFSTIVAAVEEGRAIYNNMKQFIRYLISSNVGEVVCIFLTAALGLPEALIPVQLLWVNLVTDGLPATALGFNPPDLDIMDRPPRTPKEPLISGWLFFRYMAIGGYVGAATVGAAAWWFLYAEDGPHVTYSQLTHFMKCSEHSPDFEGVDCEVFEAPQPMTMALSVLVTIEMCNALNSLSENQSLVRMPPWVNIWLVGSIGLSMSLHFLILYVDPLPMIFKLQALDLYHWLMVLKISLPVIGLDEILKFVARNYLEG

SEQ ID NO: 915 - protein, 531 aa, Bos taurus; identical to SEQ ID NO: 739

SEQ ID NO: 916 - protein, 562 aa, Bos taurus
MVKIVTVKTKAYQDQKPGTSGLRKRVKVFQSSSNYAENFIQSIISTVEPAQRQEATLVVGGDGRFYMKEAIQLIVRIAAANGIGRLVIGQNGILSTPAVSCIIRKIKAIGGIILTASHNPGGPNGDFGIKFNISNGGPAPEAITDKIFQISKTIEEYAICPDLHVDLGVLGKQQFDLENKFKPFTVEIVDSVEAYATMLRNIFDFNALKELLSGPNRLKIRIDAMHGVVGPYVKKILCEELGAPANSAVNCVPLEDFGGHHPDPNLTYAADLVETMKTGEHDFGAAFDGDGDRNMILGKHGFFVNPSDSVAVIAANIFSIPYFQQTGVRGFARSMPTSGALDRVANATKIALYETPTGWKFFGNLMDASKLSLCGEESFGTGSDHIREKDGLWAVLAWLSILATRKQSVEDILKDHWQKYGRNFFTRYDYEEVEAEGANKMMKELEALISDRSFVGKQFPVGDKVYTVEKIDNFEYSDPVDGSISRNQGLRLLFADGSRIIFRLSGTGSAGATIRLYIDSYEKDLAKIYQDPQVMLAPLISIALKVSQLQEKTGRTAPTVIT

SEQ ID NO: 917 - protein, 296 aa, Bos taurus
MASHRHSGPSSYKVGTMAEKFDCHYCRDNLQGKKYVQKDGHHCCLKCFDKFCANTCVQCRKPIGADSKEVHYKNRYWHDTCFRCSKCLQPLASETFVAKDNKILCNKCTTREDNPKCKGCLKPIVAGDQNVEYKGTVWHKDCFTCSNCKQVIGTGSFFPKGEDFYCVTCHEAKFAKHCVKCNKAITSGGITYQDQPWHAECFVCVTCSKKLAGQRFTAVEDQYYCVDCYKNFVAKKCAGCKNPITGFGKGSSVVAYEGQSWHDYCFHCKKCSVNLANKRFVFHQEQVYCPDCAKKL

SEQ ID NO: 918 - protein, 260 aa, Bos taurus
MAKEWGYADHNGPDHWHELFPNAKGENQSPIELNTKEISHDPSLKPWTASYDPGSAKTILNNGKTCRVVFDDTYDRSMLRGGPLAAPYRLRQFHLHWGSSDDHGSEHSVDGVKYAAELHLVHWNSKYNSYATALKHADGIAVVGVFLKIGREKGEFQLLLDALDKIKTKGKEAPFNNFNPSCLFPACRDYWTYHGSFTTPPCEECIVWLLLKEPITVSSDQIAKLRTLYSSAENEPPVPLVRNWRPPQPIKGRIVKASFK

SEQ ID NO: 919 - protein, 779 aa, Bos taurus
MTHEHHAAKTLGIGKAIAVLTSGGDAQGMNAAVRAVVRVGIYTGARVFFVHEGYQGLVDGGDNIREATWESVSMMLQLGGTVIGSARCKDFREREGRLRAAHNLVKRGITNLCVIGGDGSLTGADTFRSEWSDLLSDLQKSGKITAEEATKSSYLNIVGLVGSIDNDFCGTDMTIGTDSALHRIIEIVDAITTTAQSHQRTFVLEVMGRHCGYLALVTSLSCGADWVFIPECPPDDDWEEHLCRRLSETRNRGSRLNIIIVAEGAIDKNGKPITSEDIKNLVVKRLGYDTRVTVLGHVQRGGTPSAFDRILGSRMGVEAVMALLEGTPDTPACVVSLSGNQAVRLPLMECVQVTKDVTRAMDERRFDEALKLRGRSFMNNWEVYKLLAHVRPPKSKSGSHTVAVMNVGAPAAGMNAAVRSTVRIGLIQGNRMLVVHDGFEGLAKGQIEEAGWSYVGGWTGQGGSKLGTKRTLPKKSFEQISANITKFNIQGLVIIGGFEAYTGGLELMEGRKQYDELCIPFVVIPATVSNNVPGSDFSVGADTALNTICMTCDRIKQSAAGTKRRVFIIETMGGYCGYLATMAGLAAGADAAYIFEDPFTIRDLQVNVEHLVQKMKTTVKRGLVLRNEKCNENYTTDFIFNLYSEEGKGIFDSRKNVLGHMQQGGSPTPFDRNFATKMGAKAMNWMSGKIKESYRNGRIFANSPDSGCVLGMRKRALVFQPVTELKEQTDFEHRIPKEQWWLKLRPILKILAKYEIDLDTSEHAHLEHISRKRSGEANV

SEQ ID NO: 920 - protein, 6909 aa, Bos taurus
MADDEEYEEVVEYYTEETVYEEVPGETRTRFYETTTTRTSDYEQSETSRPALAQPVPEKPVERKRVIRKKVDPSKFMTPYIAHSQKMQNLFSTNKYKENYEKAKGKPYAITTDTPELRRIKKVQDQLSEVKYRVDGDVAKTICHVDEKAKDIEHAKKVSQQVSKVLYKQNWEDTKDKYLLPPDAPELVQAIKNTAMFSKKLYTEDWEADKTMFYPYNDSPELRRVAQAQKALSDIAYKKGLAEQQTQFTSLPDPPDIEFAKKVTNQVSKQKYKEDYENKVKGKWSETPCFEIATARMNSNNISTKKYQEDFEHMKDQIYFMQTETPEYKVNKQAGVAASKVKYKQDYEKNKGKADYNVLPASENPLLRQLKAAGDALSDKLYKENYEKTKAKSINYCETPKFKLDTVLHNFSSDTKYKDSYLKDILGHYVGSYEDPYHTHCMRVSAQNSDKNYKAEYEEDRGKGFFPQTITQEYEAIKKLDQCKDHTYKVHPDKTKFTQVTDSPVLMQAQVNSKQLSDLNYKAKHENEKFKCHIPPDTPAFIQHKLNAYNLSDNIYKHDWEKTKAKKFDIKVDAIPLLAAKANTKIASDVMYKKDYEKSKGKMIGALSINDDPKMLHSLKTAKNQSDRLYKENYEKTKAKSMNYCETPKYQLDTLLKNFSEAKYKDSYVQNVLGHYIGSFEDPYQVHCLKISAQNSDKNYKAEYEEDKGKCYFPQTITQEYEAIKKLDQCKDHTYKVHPDKTKFTAVTDTPVLLQAQLNTKQLSDLNYKAKHEGEKFKCHIPADAPQFIQHRVNAYNLSDNIYKHDWEKTKAKKFDIKVDAIPLLAAKANTKIASDVMYKKDYEKSKGKMIGALSINDDPKMLHSLKTAKNQSDHEYRKDYEKSKTIYTAPLDMLPLTHAKKSQAIASDVDYKHLLHNYSYPPDSVNVDLAKKAYALQSDVEYKADYNSWMKGCGWMPFGSLEMEKAKRASDILNEKKYRQHPDTLKFTSIEDAPIIVQSKINQAQRSDVAYKAKGEEVIHKYSLPADLPQFIQAKVNAYNISENLYKADLKDLSKKGYDLRIDAIPIKAAKAARQAASDVQYKKDYEKAKGKMVGFQSLQDDPKLVHYMNVAKIQSDREYKKAYEKTKTRHNTPHDMVNIVAAKKAQDVASNVNYKHSLHHYTYLPDAMDLELSKNMMHIQSDNVYKEDYNNWMKGIGWIPIGSLEVEKVKKAGDALNEKKYRQHPDTLKFTSIVDSPVMVQAKQNTQQVSDILYKAKGEDVKHKYTMSPDLPQFLQAKCNAYNLSDVCYKRDWHDLIAKGTNVLGDAIPITAAKASRNIASDYKYKEAYEKAKGKQVGFRSLQDDPKLVHYMNVAKLQSDREYKKNYENTKTSYHTPGDMVSITAAKMAQDVATNVNYKQPIHHYTYLPDALSLEHIRNVNQIQSDNVYKDEYNHFFKGMGWIPIGSLEVEKVKKAGDALNEKKYRQHPDTIKFTSVPDSMGMVLAQHNTKQLSDLNYKVEGEKVKHKYTMDPDVPQFIQAKVNAYNMSDSHYKADWKKTLAKGYDLRPDAIPIVAAKSSRNIASDFKYKEAYEKTKGKQIGFRSLQDDPKLVHFMNVAKMQSDREYKKGYEASKTKYHTPLDMLSVTAAKKSQEVATNTNYKQPFHHYTLLPDALNVEHSRNAMQIQSDNLYKSDFTNWMKGIGWLPLESLEVEKAKKAGEILSEKKYRQHPEKLKFTYAMDTMEQALNKSNKLIMDKRLYTEKWNKDKTTIHVMPDTPDILLSRVNQITMSDKLYKAGWEEEKKKGYDLRPDAISIKAARASRDIASDYKYKQAYEQAKGKQIGFRSLEDDPKLVHFMQVAKMQSDREYKKAYEKSKTSFQTPVDMLSVVAAKKSQEVATNANYRNVIHTYNMLPDAMSLELAKNMMQIQSDNQYKADYADFMKGIGWLPLGSLEAEKNKKAMEIISEKKYRQHPDTLKYSTLMDSMNMVLAKNNAKIMNEHLYKQAWEADKTKVHIMPDIPQIILAKANAINISDKLYKLSLEEAKKKGYDLRTDAIPIKAAKASRDIASDYKYKHSYEKERGKMVGFRSLEDDPKLVHSMQVAKMQSDREYKKNYEKTKTSYHTPADMLSVTAAKDAQANITNTNYKHLIHKYILLPDAMNIQLSKNMNRIQSDNEYKQDYNEWYKGLGWSPAGSLEVEKAKKATEYASDQKYRQHPSNFQFTKLNDSMDMVLAKQNAHTMNKYLYTVDWNKDKTKIHVMPDTPDILQAKQNQTMYSQVKYKMGWPSGLERVVNLPSVLIKIFKSKQNKDLIWRFKYKQGYRKQIGHHIGFRSLQDDPKLVLSMNVAKMQSEREYKKDFEKWKTKFSSPVDMLGVVLAKKCQALVSDVDYKNYLHGWTCLPDQNDVIHAKKAYDLQSENLYKSDLEWLKGIGWSPLGSLEAEKNKRASEIISEKKYRQPPDRNKFTSIPDAMDIVLAKTNAKNRSDILYREAWDKDKTQIHIMPDTPDIILAKANLINTSDKFYRMGYEELRKKGYDLPVDAIPIKAAKASREIASEYKYKEGFRMQLGHHIGARNIKDDPKMMWSMHVAKIQSDREYKKDFEKWKTKFSSPVDMLGVVLAKKCQTLVSDIDYKNYLHQWTCLPDQSDVIHARRAYDLQSDNLYKSDLQWLRGIGWLPSGSLEDEKNKRASQILSDHVYRQHPDQFKFSSLMDSIPMVLAKNNAITMNHRLYTEAWDKDKTTVHIMPDTPEVLLAKQNQINYSEKLYKLGLDEAKRKGYDMRIDAIPIRAAKASRDIASEFKYKEGYRRQLGHHIGARAIHDDPKMMWSMHVAKIQSDREYKKDFEKWKTKFSSPVDMLGVVLAKKCQTLVSDIDYKNYLHQWTCLPDQSDVIHARQAYDLQSDNVYKSDLQWLRGIGWVPIGSLDVEKSKRASEILSDKLYRQPPDKFKFTSVTDSLEQVLAKNNAINMNKRLYTEAWDKDKTQVHIMPDTPEITLARTNKVNYSENLYKLAHEEAKKKGYDLRSDAIPIIAAGLEKDHISDYKYKDGYRKQLGHHIGARDIKDDPKMMWSMHVAKIQSDREYKKDFEKWKTKFSSPVDMLGVVLAKKCQTLVSDIDYKNYLHQWTCLPDQSDVIHARQAYDLQSDNVYKSDLQWLRGIGWVPIGSVDVVKCKRAAEILSDNLYRQPPDTLKFTSVPDSLEQVLAKNNAINMNKRLYTEAWDKDKTQIHIMPDTPEIMLARQNKLNYSETLYKLANEEAKKKGYDLRSDAIPIVAAKASRDIISDYKYKDGYRKQLGHHIGARDIKDDPKMMWSMHVAKIQSDREYKKDFEKWKTKFSSPVDMLGVVLAKKCQTLVSDIDYKNYLHQWTCLPDQSDVIHARRAYDLQSDNIYKSDLQWLRGIGWVPIGSVDVVKCKRAAEILSDNLYRQRPDTLKFTSVPDSLEQVLAKNNAINMNKRLYTEAWDKDKTQIHMMPDTPEITLARQNKINYSENLYRQAMEEAKKEGYDLRSDAIPIVAAKASREIASDYKYKEAYRKQLGHHIGARAIHDDPKMMWSVHVAKMQSDREYKKDFEKYKTRFSSPVDMLGIVLAKKCQTLVSDVDYKHPLHEWTCLPDQNDIIHARKAYDLQSDNLYKSDLEWLKGIGWVPIGSVEVLKAKRAGEILSDNIYRQRPDTLKFTSVTDSPEQVLAKNNAINMNKRLYTEAWDNDKKTIHVMPDTPEIMLAKLNRINYSDKLYKLALEESRKEGYDLRLDAIPIQAAKASREIASDYKYKEGYRKQLGHHIGARNIKDDPKMMWSIHAGKLQSDLEYKKDFEKWKTKFSSPVDMMGLVQAKKCQILVSDIDYKNLLHEWTCLPDQNDIIQARKAYDLQSDAIYKADLEWLRGIGWVPIDSVGVEHAKRAGEILSERKYRQPAVQLKFTSITDTPEIVLAKNNALNVSKHLYTEAWDADKTSIHVMPDTPEILLAKSNSANISHKLYTKGWDESKMKDYDLRADAISIKSAKASRDIASDYKYKEAYEKHKGHHIGARSVEDDPRIMCAMNAGRIQSEREYKKEFQKWKTKFSSPVDMLGILLAKKCQTLVSDIDYRNYLHHWTCLPDQNDIIQARKAYDLQSDAIYKADLEWLRGIGWMPEGSPEVLRVKNAQHIFRDSVYRTPVVKLKYTSIVDTPEVVLAKSNAENISIPKYREVWDKDKTSIHIMPDTPEINLARTNALNVSNKLYREGWDEMKMSCDVRLDAIPIQAAKASREIASDYKYKLDHEKQKGHYVGTRTARDDNKIRWALIAGKIQNEREYRLHWAKWKSKFQSPPDMLSIEHSKNSQTLVSDIDYRHYLHQWTCMPDQNDVIQARKAYDLQSDAIYKADLEWLRGIGWMPADSVSVNHAKHMADIFNEKKYRTKIETLSFTPVDDRVDYVTAKHSGEILNDIKYRKDWNDTKSKYTLTETPQLHTAQEAARILDQYLYKESWEKQKATGYILPPDAVPFVHAHHSGDVQSELKYKAEHVKQKGHYVGVPTMRDDPKLVWFEHAGQIQNDRLYKENYHKTKAKIHIPPDMVSVLAAKEGQALASDIDYRNYLHQWICHPDQNDVIQARKAYDLQSDNIYKADLEWLRGIGWIPLDSVDHVRVTRNQEMMNQIKYKKDALANYPNFTSVVDPPEIVLAKINSVNQSDVKYKETFNKLIKGKYIFSPDTPYITHSKDMEKLYSTILYKRAWDGTKAYGYTLDERYIPIVGAKHADFVNSELKYKETYEKLKGHYLAGKEISEFPNVVHCLDFQKMRSLLNYRRHYEDTKANVHIPQDMMNHVLAKRCQYILSDLEYRHYFHQWTSLPEEPNVVRVRHAQEILSDNVYKDDLNWLKGIGCYVWDTPQILHAKKSYDLQSQILYTAAGKENLKNYNLVTDTPLYVTALQSGINASEVKYKENYHQTKDKYTTVLETVDYDRIKNLKDLFSSNLYKEAWDKVKATSYILPPNTVSLTHAKNQKYMASHIKYREEYEKFKALYTLPRSVEDDPNTARCLRVGKFNIDRLYRSVYEKNKMKIHIVPDMVEMVTAKDSQKKVSEIDYRLHLHEWICHPDLQVNSHVRKVTDQISDIVYKDDLTWLKGIGCYVWDTPEILHAKHAYDLRNDIKYKAHVLKTRNNYKLVTDTPVYVQAVKSGKQLSDAVYHYDYVHSIRGRVAPTTKTVDLDRALHAYKLQSENLYRKAGLHALPTGYRLPVDTPHFKHTKDTRYMSSYFKYKEVYEHMKAYGYTLGPNDVPFVNVRRVNNITSERLYRQLYHKLKDKIHTTPDTPEIRQVKKTQEAVSELIYKSDFFKMQGHMISLPYTPQVLHCRYVGDITSDIKYKEDLQVLRGMGCFLYDTPDMVRSRHLRKLWSHYLYTDKARKMRDKYKVVLDTPEYRKVQELKTHLSELVYRAAGRKQKSIFTSVPDTPDLTRAKRGQKLQSQYLYVELATKERPHHHAGNQTTALKHARHVKDMVSENKYKIQYEKMKDKYTPVPDTPILIRAKRAYWNASDLRYKETFQKTKGKYHTVKDALDIVYHRTVTDHISKIKYKENYMSQLGIWRSIPDRPEHFHHRAVTDAVSDVKYKQDLTWLKGIGCYAYDTPDFTLAEKNKTLYSKYKYKEVFERTKSNFKYVADCPINRHFKFATQLMNEKKYRADYEQRKDKYHLVVDEPRHLLAKIAGDQISQIKYRKNYEETKDKFTSIVDTPEHLRTTKVNKQISDILYKLEYNKAKPRGYTTIHDTPMLLHVRKVKDEVSDLKYKEVYQRTKSNCTIEPDAVHIKAAKDAYKVNTNLDYKKKYEATKAYWKWTPDRPDFIQAAKSTLQQSDFEYKLDREYLKGCKLSVTDDKDMVLALKNSIIESDLKYKEKHVKERGSCHAVPDTPQILLAKTVSSLVSENKYKSYVKKHLAQGSYTTLPETRDTIHVKEVTKNVSDTNYKKKFVKEKGKSNYSIMLEPPDVKHAMDVAKKQSNVAYKKDAKENLHYTTVADRPDIKKATQAAKQASEVEYRAKHRKEGSHGLSMLGRPDIEMAKKAAKLSSQVQYRENFNKEKGKTPKYNPKDSQLYKVMKDANTLASEVKYKADLKKLHKPVTDMKESLIMNHVLNTSHLASSYQYKKNYEKSKGHYHTIPDNLEQLHLKEATELQSIVKYKEKYEKERGKPMLDFETPTYITAKESQQMQSGKEYRKDYEESIKGRNLTGLEVTPALLHVKYATKIASEKEYRKDLEESIRGKGLSEMEDTPDMLRAKNATQILNEKEYKRDLELEVKGRGLNAMANETPDFLRARNATDIASQIKYKQSAEMEKANFTSVVDTPEIIHAQQVKNLSSQKKYKEDAEKCMSYYETVLDTPEMQRVRENQKNFSLLQYQYDLKNSKGKITVVQDTPEILRVKENQKNFSSVLYKEDVSPGTAIGKTPEMMRVKQTQDHISSVKYKEVIGQGTPIPDLPEVKRVKQTQKHISSVMYKENLGTGIPTPVTPEIERVKRNQENFSSVLYKENLGKGTPTPITPEMERVKRNQENFSSILYKENLSKGTPLPVTPEMERVKRNQENFSSVLYKENVGKGTPTPVTPEMQRVKRNQENISSVLYKENLGKATPTPFTPEMERVKRNQENFSSVLYKENMRKATPTPVTPEMERAKRNQENISSVLYSDSFRKQIQGKAAYVLDTPEMRRVRETQRHISTVKYHEDFEKHKGCFTPVVTDPITERVKKNTQDFSDICYRGIQRKVVEMEQKRNDQDQETITGLRVWRTNPGSVFDYDPAEDNIQSRSLHMINAQAQRRSREQSRSASGLSISGGEEKSEHSEAAHLSTYSDGGVFFSAASTGYKHARTTELPQQRSSSVATQQTTVSSIPSHPSTAGKIFRAMYDYMAADADEVSFKDGDAIVNVQAIDEGWMYGTVQRTGRTGMLPANYVEAI

SEQ ID NO: 921 - protein, 557 aa, Bos taurus
MAALTQNPQFKKLKTWYEQHGSDLNLRRLFEGDRDRFNRFSLNLNTNHGHILVDYSKNLVTETVMQMLVDVAKSRGVEAARERMFTGEKINFTEDRAVLHVALRNRSNAPILVDGKDVMPEVNRVLEKMKSFCQRVRSGEWKGYSGKAITDVINIGIGGSDLGPLMVTEALKPYSSEGPRVWFVSNIDGTHIAKTLATLNPESSLFIIASKTFTTQETITNAETAKEWFLLSAKDPSAVAKHFVALSTNTAKVKEFGIDPQNMFEFWDWVGGRYSLWSAIGLSIALHVGFDNFEQLLSGAHWMDQHFRTTPLEKNAPVLLALLGIWYINCFGCETHAMLPYDQYLHRFAAYFQQGDMESNGKYITKSGTRVNYQTGPIVWGEPGTNGQHAFYQLIHQGTKMIPCDFLIPVQSQHPIRNGLHHKILLANFLAQTEALMRGKSTEEARKELQAAGRSPEDFEKLLPHKVFEGNRPTNSIVFTKLTPFILGALIAMYEHKIFVQGIIWDINSFDQWGVELGKQLAKKIEPELDGSSPVTSHDSSTNGLINFIKQEREARS

SEQ ID NO: 922 - protein, 183 aa, Bos taurus
QRKPKITASRKLLLKSLMLAKAKECWEQEHEEREAEKKRYLAERIPALQTRGLSLSALQDLCRDLHAKVEVVDEERYDIEAKCLHNTREIKDLKLKVLDLRGKFKRPPLRRVRVSADAMLRALLGSKHKVSMDLRANLKSVKKEDTEKERPVEVGDWRKNVEAMSGMEGRKKMFDAAKSPTTQ

SEQ ID NO: 923 - protein, 1135 aa, Bos taurus
MPEAKPAAKKAPAGKDAAAKPAPKEATPQEAPAAPPTEAPPEDQSPTAEEPTGVFLKKPDSVSVETGKDTVIVAKLNGKELPAKPAVKWFKGKWLELGSKSGARFSFKESHDAASNVYTIELHITKVVLGDRGDYRIEVKAKDFCDSCAFNIDVEAPRQDSAGQSLESFKRSGEAKSDTAGELDFSGLLKKRQVVEEEKKKKKDDDDLGIPPEIWELLKGAKKSEYERIAFQYGITDLRGMLKRLKKAKVEVKKSAAFTKKLDPAYQVDRGNKIKLVVEISDPDLPLKWFKNGQEIKPSSKYVFENVGKKRILTINKCTLADDAAYEVVVKDEKCFTELFVKVEPPVLIVTPLEDQQVFVGDRVEMAVEVSEEGAQVMWLKDGVELTREDSFKARYRLKKDGKRHILIYSEVTMEDKGHYQVMTNGGQCEAELIVEEKQLEVLQDIADLTVKASEQAVFKCEVSDEKVTGKWYKNGVEVRPSKRITISHTGRFHKLVIDDVRPEDEGDYTFVPDGYALSLSAKLKFLEIKVEYVPKQEPPKIHLDCSGQTSENAIVVVAGNKLRMDVSITGEPRPVATWMKEDEVFTGTEGRVRIEQRGDISSFVIESAERGDEGRYTIKVTNPVGEDVASILLKVVDVPDPPEAVRVTSVGEDWAVLVWEPPKYDGGRPVTGYLLERKKKGSQRWMKLNFEVFTETTYESTNMIEGILYEMRVFAAPLIQQLKTLTPQPHAPFSPTSEPQHLTVEDVTDTTTTLKWRPPDKIGAGGIDGYLIEYCVEGSDEWIPANTEPVERCGFTVKNLPTGAKITFRVVGVNIAGRSQPATLAQPVTIREIVEQPKIRLPRHLRQTYVRKVGEHLNLVIPFQVRRAKGGAPIDTSHVHVRTSDFDTVFFVRQAARSDSGEYELTVQIENMKDTATVCIRVVEKAGPPQNVMVKEVWGTNALVEWQPPKDDGNSEITGYFVQKADKKTMEWFTVYERNRHTSCTVSDLIMGNEYYFRVYSENVCGLSDLPGVSKNTARIVKTGMTLKLPEYKEHDFRTPPKFLTPLPDRVVVAGYAAALNCAVRGHPKPKVVWMKNKMEIREDPKFLMTNQQGVLTLNIRRPSPFDSGTYSCRAVNELGEALAECKLEVRAPR

SEQ ID NO: 924 - protein, 2723 aa, Bos taurus
MMNNSGYSEAPGFGLGDEVDDMPSTEKDLAEDAPWKKIQQNTFTRWCNEHLKCVGKRLTDLQRDLSDGLRLIALLEVLSQKRMYRKFHPRPNFRQMKLENVSVALEFLEREHIKLVSIDSKAIVDGNLKLILGLIWTLILHYSISMPMWEDEDDEDARKQTPKQRLLGWIQNKVPQLPITNFNRDWQDGKALGALVDNCAPGLCPDWEAWDPNQPVENAREAMQQADDWLGVPQVIAPEEIVDPNVDEHSVMTYLSQFPKAKLKPGAPVRSKQLNPKKAIAYGPGIEPQGNTVLQPAHFTVQTVDAGIGEVLVYIEDPEGHTEEAKVVPNNDKNRTYAVSYVPKVAGLHKVTVLFAGQNIERSPFEVNVGMALGDANKVSARGPGLEPVGNVANKPTYFDIYTAGAGTGDVAVVIVDPQGRRDTVEVALEDKGDSTFRCTYRPVMEGPHTVHVAFAGAPITRSPFPVHVAEACNPNACRASGRGLQPKGVRVKEVADFKVFTKGAGSGELKVTVKGPRGTEEPVKVREAGDGVFECEYYPVVPGKYVVTITWGGYAIPRSPFEVQVSPEAGIQKVRAWGPGLETGQVGKSADFVVEAIGTEVGTLGFSIEGPSQAKIECDDKGDGSCDVRYWPTEPGEYAVHVICDDEDIRDSPFIAHIQPAPPDCFPDKVKAFGPGLEPTGCIVDKPAEFTIDARAAGKGDLKLYAQDADGCPIDIKVIPNGDGTFRCSYVPTKPIKHTIIVSWGGVNVPKSPFRVNVGEGSHPERVKVYGPGVEKTGLKANEPTYFTVDCSEAGQGDVSIGIKCAPGVVGPAEADIDFDIIKNDNDTFTVKYTPPGAGRYTIMVLFANQEIPASPFHIKVDPSHDASKVKAEGPGLNRTGVEVGKPTHFTVLTKGAGKAKLDVHFAGAAKGEAVRDFEIIDNHDYSYTVKYTAVQQGNMAVTVTYGGDPVPKSPFVVNVAPPLDLSKVKVQGLNSKVAVGQEQAFSVNTRGAGGQGQLDVRMTSPSRRPIPCKLEPGGGAETQAVRYMPPEEGPYKVDITYDGHPVPGSPFAVEGVLPPDPSKVCAYGPGLKGGLVGTPAPFSIDTKGAGTGGLGLTVEGPCEAKIECQDNGDGSCAVSYLPTEPGEYTINILFAEAHIPGSPFKATIRPVFDPSKVRASGPGLERGKAGEAATFTVDCSEAGEAELTIEILSDAGVKAEVLIHNNADGTYHITYSPAFPGTYTITIKYGGHPVPKFPTRVHVQPAVDTSGVKVSGPGVEPHGVLREVTTEFTVDARSLTATGGNHVTARVLNPSGAKTDTYVTDNGDGTYRVQYTAYEEGAHLVEVLYDDVAVPKSPFRVGVTEGCDPTRVRAFGPGLEGGLVNKANRFTVETRGAGTGGLGLAIEGPSEAKMSCKDNKDGSCTVEYIPFTPGDYDVNITFGGRPIPGSPFRVPVKDVVDPGKVKCSGPGLGAGVRARVPQTFTVDCSQAGRAPLQVAVLGPTGVAEPVEVRDNGDGTHTVHYTPATDGPYTVAVKYADQEVPRSLSSPFKIKVLPAHDASKVRASGPGLNASGIPASLPVEFTIDARDAGEGLLTVQILDPEGKPKKANIRDNGDGTYTVSYLPDMSGRYTITIKYGGDEIPYSPFRIHALPTGDASKCLVTVSIGGHGLGACLGPRIQIGEETVITVDAKAAGKGKVTCTVSTPDGAELDVDVVENHDGTFDIYYTAPEPGKYVITIRFGGEHIPNSPFHVLACEAMPRVEEPPDVPQLHRPSAYPTHWATEEPVVPAEPMESMLRPFNLVIPFTVQKGELTGEVRMPSGKTARPNITDNKDGTITVRYAPTEKGLHQMGIKYDGNHIPGSPLQFYVDAINSRHVSAYGPGLSHGMVNKPATFTIVTKDAGEGGLSLAVEGPSKAEITCKDNKDGTCTVSYLPTAPGDYSIIVRFDDKHIPGSPFTAKITGDDSMRTSQLNVGTSTDVSLKITESDLSQLTASIRAPSGNEEPCLLKRLPNRHIGISFTPKEVGEHVVSVRKSGKHVTNSPFKILVGPSEIGDASKVRVWGKGLSEGHTFQVAEFIVDTRNAGYGGLGLSIEGPSKVDINCEDMEDGTCKVTYCPTEPGTYIINIKFADKHVPGSPFTVKVTGEGRMKESITRRRQAPSIATIGSTCDLNLKIPGNWFQMVSAQERLTRTFTRSSHTYTRTERTEISKTRGGETKREVRVEESTQVGGDPFPAVFGDFLGRERLGSFGSITRQQEGEASSQDMTAQVTSPSGKTEAAEIVEGEDSAYSVRFVPQEMGPHTVTVKYRGQHVPGSPFQFTVGPLGEGGAHKVRAGGTGLERGVAGVPAEFSIWTREAGAGGLSIAVEGPSKAEIAFEDRKDGSCGVSYVVQEPGDYEVSIKFNDEHIPDSPFVVPVASLSDDARRLTVTSLQETGLKVNQPASFAVQLNGARGVIDARVHTPSGAVEECYVSELDSDKHTIRFIPHENGVHSIDVKFNGAHIPGSPFKIRVGEQSQAGDPGLVSAYGPGLEGGTTGVSSEFIVNTLNAGSGALSVTIDGPSKVQLDCRECPEGHVVTYTPMAPGNYLIAIKYGGPQHIVGSPFKAKVTGPRLSGGHSLHETSTVLVETVTKSSSSRGSSYSSIPKFSSDASKVVTRGPGLSQAFVGQKNSFTVDCSKAGTNMMMVGVHGPKTPCEEVYVKHMGNRVYNVTYTVKEKGDYILIVKWGDESVPGSPFKVNVP

SEQ ID NO: 925 - protein, 248 aa, Bos taurus
MAAIAVTEAMKCKIQVLQQQADDAEERAKRLQQKVDGERWAREQAEAEVVSLNRRIQLVEEELNRAQERLATALQKLEEAEKAADESERVMKVIENQALKDEEKMELQEIQLKEAKHIAEEAHRKYEEVARKLVIIEGDLERTEERAELAQSRCRKMGEQIRLMDQHLKCLSAAEEKYSQKEDKYEEEIKILTEKLKEAETRAEFAERSVAKLEKTIDDLEDKLKCTKEEDLCTQRMLNQTLLDLNKM

SEQ ID NO: 926 - protein, 417 aa, Bos taurus
MSLSNKLTLDKLDVKGKRVVMRVDFNVPMKNNQITNNQRIKAAVPSIKYCLDSGAKSVVLMSHLGRPDGVPMPDKYSLQPVAVELKSLLGKDVLFLKDCVGPEVEKACADPAAGSVILLENLRFHVEEEGKGKDASGNKVKAEPTKIEAFRASLSKLGDVYVNDAFGTAHRAHSSMVGVNLPKKAGGFLMKKELNYFAKALESPERPFLAILGGAKVADKIQLISNMLDKVNEMIIGGGMAFTFLKVLNNMEIGTSLFDEEGSKIVKDLMSKADKNGVKITLPVDFVTADKFDENAKTGQATVASGIPAGWMGLDCGPESSKKYAEAVARAKQIVWNGPVGVFEWEAFARGTKALMDEVVKATSRGCITIIGGGDTATCCAKWNTEDKVSHVSTGGGASLELLEGKVLPGVDALSSV

SEQ ID NO: 927 - protein, 170 aa, Bos taurus
MAPKKAKRRAAAEGGSSSVFSMFDQTQIQEFKEAFTVIDQNRDGIIDKEDLRDTFAAMGRLNVKNEELDAMMKEASGPINFTVFLNMFGEKLKGADPEDVITGAFKVLDPEGKGTIKKKFLEELLTTQCDRFSQEEIKNMWAAFPPDVGGNVDYKNICYVITHGDAKDQE

SEQ ID NO: 928 - protein, 200 aa, Bos taurus
PRSQHRCPDARLSAQERTMGDEEKRHRAITARRQHLKSVMLQIAATELEKEEGRREAEKQNYLSEHCPPLHLPGSMSEVQELCRQLHAKIDAAEEEKYDMEIRVQKSTKELEDMNQKLFDLRGKFKRPPLRRVRMSADAMLKALLGSKHKVCMDLRANLKQVKKEDTEKERDLRDVGDWRKNIEEKSGMEGRKKMFETES

SEQ ID NO: 929 - protein, 249 aa, Bos taurus
MAPSRKFFVGGNWKMNGRKNNLGELINTLNAAKVPADTEVVCAPPTAYIDFARQKLDPKIAVAAQNCYKVANGAFTGEISPGMIKDLGATWVVLGHSERRHVFGESDELIGQKVAHALAEGLGVIACIGEKLDEREAGITEKVVFEQTKVIADNVKDWSKVVLAYEPVWAIGTGKTATPQQAQEVHEKLRGWLKSNVSDAVAQSARIIYGGSVTGATCKELASQPDVDGFLVGGASLKPEFVDIINAKQ

SEQ ID NO: 930 - protein, 175 aa, Bos taurus
MDIAIHHPWIRRPFFPFHSPSRLFDQFFGEHLLESDLFPASTSLSPFYLRPPSFLRAPSWIDTGLSEMRLEKDRFSVNLDVKHFSPEELKVKVLGDVIEVHGKHEERQDEHGFISREFHRKYRIPADVDPLAITSSLSSDGVLTVNGPRKQASGPERTIPITREEKPAVTAAPKK

SEQ ID NO: 931 - protein, 271 aa, Bos taurus
MSDEEVEHVEEEYEEEEEAQEEAPPPPAEVPEVHEEVHEVHEPEEVQEEEKPRPRLTAPKIPEGEKVDFDDIQKKRQNKDLMELQALIDSHFEARKKEEEELVALKERIEKRRAERAEQQRIRAEKERERQNRLAEEKARREEEDAKRRAEDDLKKKKALSSMGANYSSYLAKADQKRGKKQTAREMKKKVLAERRKPLNIDHLSEDKLRDKAKELWDTLYQLETDKFEYGEKLKRQKYDITNLRSRIDQAQKHSKKAGTAPKGKVGGRWK

SEQ ID NO: 932 - protein, 419 aa, Bos taurus
MASTFSKLLTGRNASLLFATLGTGALTTGYLLNKQNVCAAAREQHKLFPPSADYPDLRKHNNCMAECLTPAIYAKLRNKVTPSGYTLDQCIQTGVDNPGHPFIKTVGMVAGDEESYEVFADLFDPVIKLRHNGYDPRVMKHPTDLDASKITQGQFDERYVLSSRVRTGRSIRGLSLPPACSRAELREVENVAITALEGLKGDLAGRYYKLSEMTEQDQQRLIDDHFLFDKPVSPLLTCAGMARDWPDARGIWHNYDKTFLIWINEEDHTRVISMEKGGNMKRVFERFCRGLKEVERLIQERGWEFMWNERLGYILTCPSNLGTGLRAGVHVRIPKLSKDPRFSKILENLRLQKRGTGGVDTAAVADVYDISNIDRIGRSEVELVQIVIDGVNYLVDCEKKLERGQDIKVPPPLPQFGKK

SEQ ID NO: 933 - protein, 470 aa, Bos taurus
MSQAYSSSQRVSSYRRTFGGAPSFPLGSPLSSPVFPRAGFGTKGSSSSVTSRVYQVSRTSGGAGGLGALRASRLGSTRVPSSYGAGELLDFSLADAVNQEFLTTRTNEKVELQELNDRFANYIEKVRFLEQQNAALAAEVNRLKGREPTRVAEIYEEELRELRRQVEVLTNQRARVDVERDNLLDDLQRLKAKLQEEIQLKEEAENNLAAFRADVDAATLARIDLERRIESLNEEIAFLKKVHEEEIRELQAQLQEQQVQVEMDMSKPDLTAALRDIRAQYETIAAKNISEAEEWYKSKVSDLTQAANKNNDALRQAKQEMMEYRHQIQSYTCEIDALKGTNDSLMRQMRELEDRFASEASGYQDNIARLEEEIRHLKDEMARHLREYQDLLNVKMALDVEIATYRKLLEGEESRINLPIQTFSALNFRETSPEQRGSEVHTKKTVMIKTIETRDGEVVSEATQQQHEVL

SEQ ID NO: 934 - protein, 1015 aa, Bos taurus
MENAHTKTVEEVLGHFGVNESTGLSLEQVKKLKERWGSNELPAEEGKTLLELVIEQFEDLLVRILLLAACISFVLAWFEEGEETITAFVEPFVILLILIANAIVGVWQERNAENAIEALKEYEPEMGKVYRQDRKSVQRIKAKDIVPGDIVEIAGESVSVIKHTDPVPDPRAVNQDKKNMLFSGTNIAAGKAMGVVVATGVNTEIGKIRDEMVATEQERTPLQQKLDEFGEQLSKVISLICIAVWIINIGHFNDPVHGGSWIRGAIYYFKIAVALAVAAIPEGLPAVITTCLALGTRRMAKKNAIVRSLPSVETLGCTSVICSDKTGTLTTNQMSVCRMFILDKVEGDTCSLNEFTITGSTYAPIGEIHKDDKPVKCHQYDGLVELATICALCNDSALDYNEAKGVYEKVGEATETALTCLVEKMNVFDTELKGLSKIERANACNSVIKQLMKKEFTLEFSRDRKSMSVYCTPNKPSRTSMSKMFVKGAPEGVIDRCTHIRVGSTKVPMTPGVKQKIMSVIREWGSGSDTLRCLALATHDNPLRREEMNLEDSANFIKYETNLTFVGCVGMLDPPRIEVASSVKLCRQAGIRVIMITGDNKGTAVAICRRIGIFRQDEDVTAKAFTGREFDELSPSAQREACLNARCFARVEPSHKSKIVEFLQSFDEITAMTGDGVNDAPALKKSEIGIAMGSGTAVAKTASEMVLADDNFSTIVAAVEEGRAIYNNMKQFIRYLISSNVGEVVCIFLTAALGFPEALIPVQLLWVNLVTDGLPATALGFNPPDLDIMNKPPRNPKEPLISGWLFFRYLAIGCYVGAATVGAAAWWFIAAEGGPRVSFYQLSHFLQCKEDNPDFEGVDCAVFESPYPMTMALSVLVTIEMCNALNSLSENQSLLRMPPWENIWLVGSICLSMSLHFLILYVEPLPLIFQITPLNVTQWLMVLKISLPVILMDETLKFVARNYLEPGKECVQPATKPCSFSACTDGISWPFVLLIMPLVVWVYSTDTNFSDMFWS

SEQ ID NO: 935 - protein, 528 aa, Bos taurus; identical to SEQ ID NO: 788

SEQ ID NO: 936 - protein, 253 aa, Bos taurus
MSTHRLVMVRHGESTWNQENRFCGWFDAELSEKGAEEAKKAAQAIKDAKMEFDICYTSVLKRAIRTLWTILDGTDQMWLPVVRTWRLNERHYGGLTGLNKAETAAKHGEEQVKIWRRSFDIPPPPMDEKHPYYKSISKERRYAGLKAGELPTCESLKDTIARALPFWNDEIAPQIKAGKRVLIAAHGNSLRGIVKHLEGMSDQAIMELNLPTGIPIVYELDQALKPTKPMRFLGDEETVRKAMEAVAAQGKAK

SEQ ID NO: 937 - protein, 1532 aa, Bos taurus
MGHSKQIRILLLNEMEKLERTLFRLEQGFELQFRLGPTLQGKAVTVYTNYPLPGEAFNREKFRSLEWENPTEREDDSDKYCKLNLQQAGSFQYYFLQGNEKSGGGYIVVDPILRVGADNHVLPLDCVTLQTFLAKCMGPFDEWESRLMVAKESGYNMIHFTPLQTLGLSRSCYSLADQLELNPDFSRPNKKYTWTDVGQLVQKLKKEWNMLCITDVVYNHTAANSRWLQEHPESAYNLVNSPHLKPAWVLDRALWHLSCDVAEGKYKDRGVPALIENDHQMNCIRKVIWEDIFPKTQLWEFFQVDVHKAVEQFRGLLTQENRKTTRPDPDHHLKIIQDPEYRRLGCTVDMNVALATFIPHDNGPAAINECCNWFRKRIEELNSEKHQLINYHQEQAVNCLLGNVFYERLADHGPKLGPVTRKHPLVTRYFTFPFEDISLSVEESMIHVPNKACFLMAHNGWVMGDDPLRNFAEPGSDVYLRRELICWGDSVKLRYGKKPEDCPYLWAHMKKYTEITATYFQGVRLDNCHSTPLHVAEYMLDAARKLQPNLYVVAELFTGSEDLDNVFVTRLGISSLIREAMSAYDSHEEGRLVYRYGGEPVGSFVQPCLRPLVPAIAHALFMDITHDNECPIVHRSAYDALPSTTIVSMACCASGSTKGYDELVPHQISVVSEERFYTKWNPAASPSSAGEVNSQSGIIAARCAINKLHQELGAKGFIQVYVDQVDADIVAVTRHSPSIHQSVVSVSRTAFRNPKTSFYSKEVPQMCIPGKIEEVVLEARTVERNTAPYRKDANSINGIPNITVEIREHIQLNESKIVKQAGVTTKGPNEYIQEIEFENLSPGSVIIFRVSLDPHAQVAVGILRNHLTQFSPHFKSGSLAVDNADPILKIPFASIASRLTLAELNQVLYRCESEEKEDGGGCYNIPNWLPLKYAGLQGLMSVLAEIRPKNDLGHPFCDNLRSGDWMIDYVSNRLISRSGTIAEVGKWLQAMFFYLKQIPRYLIPCYFDAILIGAYTTLLDVAWKQMSSFVQNGSTFVKHLSLGSVQMCGVGRFSSLPLLSPSLTDVPCRLNEITREKEQCCVSLAAGLPHFSAGIFRCWGRDTFIALRGLLLITGRYLEARNIILAFASTLRHGLIPNLLGEGTHARYNCRDAVWWWLQCIQDYCKMVPNGLDILNCPVSRMYPADDSVPLSAGTVDQPLFEVIQEAMQRHMQGIQFRERNAGPQIDRNMKDEGFNITAGVDEETGFVYGGNRFNCGTWMDKMGESDRARNKGIPATPRDGSAVEIVGLSKSAVRWLLELSQKNIFPYHYVTVKRHGKLVRVSYDEWNRKIQENFEKLFYVSEDPSDVSEKHPNLVHKRGIYKDSYGASSPWCDYQLRPNFTIAMVVAPELFTTQKAWKALEIAEKKLLGPLGMKTLDPDDMVYCGTYDNALDNDNYNLAKGFNYHQGPEWLWPVGYFLRAKLYFSRLMGPETTAKTIFLVKNVLSRHYVHLERSPWKGLPELTNENGQYCPFSCETQAWSIAAVLETLYDL

SEQ ID NO: 938 - protein, 452 aa, Bos taurus
MAGYLRVVRSLCRASGSGSAWAPAALTAPNLQEQPRRHYADKRIKVAKPVVEMDGDEMTRIIWQFIKEKLILPHVDVQLKYFDLGLPNRDQTNDQVTIDSALATQKYSVAVKCATITPDEARVEEFKLKKMWKSPNGTIRNILGGTVFREPIICKNIPRLVPGWTKPITIGRHAHGDQYKATDFVVDRAGTFKVVFTPKDGSGPKEWEVYNFPAGGVGMGMYNTDESISGFAHSCFQYAIQKKWPLYMSTKNTILKAYDGRFKDIFQAIFEKHYKTEFDKHKIWYEHRLIDDMVAQVLKSSGGFVWACKNYDGDVQSDILAQGFGSLGLMTSVLVCPDGKTIEAEAAHGTVTRHYREHQKGRPTSTNPIASIFAWTRGLEHRGKLDGNQDLIRFAQTLEKVCVETVESGAMTKDLAGCIHGLSNVKLNEHFLNTSDFLDTIKSNLDRALGQQ

SEQ ID NO: 939 - protein, 553 aa, Bos taurus
MLSVRVAAAVARALPRRAGLVSKNALGSSFIAARNLHASNSRLQKTGTAEVSSILEERILGADTSVDLEETGRVLSIGDGIARVHGLRNVQAEEMVEFSSGLKGMSLNLEPDNVGVVVFGNDKLIKEGDIVKRTGAIVDVPVGEELLGRVVDALGNAIDGKGPIGSKARRRVGLKAPGIIPRISVREPMQTGIKAVDSLVPIGRGQRELIIGDRQTGKTSIAIDTIINQKRFNDGTDEKKKLYCIYVAIGQKRSTVAQLVKRLTDADAMKYTIVVSATASDAAPLQYLAPYSGCSMGEYFRDNGKHALIIYDDLSKQAVAYRQMSLLLRRPPGREAYPGDVFYLHSRLLERAAKMNDAFGGGSLTALPVIETQAGDVSAYIPTNVISITDGQIFLETELFYKGIRPAINVGLSVSRVGSAAQTRAMKQVAGTMKLELAQYREVAAFAQFGSDLDAATQQLLSRGVRLTELLKQGQYSPMAIEEQVAVIYAGVRGYLDKLEPSKITKFENAFLSHVISQHQALLSKIRTDGKISEESDAKLKEIVTNFLAGFEA

SEQ ID NO: 940 - protein, 3170 aa, Bos taurus
MRKHRHLPLVAILCLFFSGFSFTRGQQQPGRDVKNGAAADIIFLVDSSWSIGKEHFQLVREFLYDVIESLAVGDNDFRFALVQFNGNPHTEFLFNTYRSKQEVLSHVSNMSYIGGSNQTGKGLAYVMQNHLTEAAGSRASDGVPQVIVVLTHGHSEDGLALPSAELKSADVNVFAIGVEDADEAALKEIASEPLNMHVFNLENYTSLHDIVGNLVACVRSSMAPERAGGTEIPKDITAQDSADIIFLIDGSNNTGSVNFAVILDFLVNLLERLSIGTQQIRVGVVQYSDEPRTMFSLNSYSTKAQVLDAVKALGFIGGELANVGLALDFVVENHFTRAGGSRAEEGVPQVLVLISAGPSSDEIRDGVIALKQASVFSFGLGAQAASKAELQHIATNDNLVFTVPEFRSLGDVQEQLLPYIVGVAQRHIVLQPPTIVTQVIEVNKRDIVFLVDGSSKLGLTNFNAIRDFIAKVIQRLEIRQDLIQVAVAQYADTVRPEFYFNTYPSKREVINAVRKMKALDGSALYTGSALDFVRNNLFTEAAGYRAAEGVPKLLVLVTGGKSLDAVSQPAQELKRSGILAFAVGNKVADQAELEEIAFDSSLVFTATEFRPAPLQGVLPGLLGPLRTLTGTTEVRVNKRDIIFLLDGSSNVGETNFPYVRDFVMNLVNSLDVGSDHIRVGLVQFSDTPVTEFSLNTYPTKSELLAHLRQMQLQGGSVLNTGAALSYVHANHFTEAGGSRIQDHVPQLLLLLTAGQSEDSYLQAANALARAGILTFCVGTSQADRAELEEIAFNPGLVYLMDDFSSLPALPQQLIQPLTTYVSGGVEEVPLAQPESKRDILFLFDGSANLMGQFTAARDFLYKVIDELDVKPEGTRVAVAQFSDDVKVESRFDQHQNKPEILNLVKRMKLKTGKALNLGYALDYAQRYIFVKSAGSRIEDGVLQFLVLLVAGKSSDRVDTPALNLKQSGVVPFILQAKNADPAELELIVPSPAFILVAESLPKIGDLQPQIVNLLKSVQNGAPAPVSVEKDVVFLIDGSEGVRSGFPLLKEFVQRVVESLDVGPDRVRVAVVQYSDRTRPEFYLNSYMDQQSVVGAIRGLTLLGGPAPNTGAALEFVLRNILVGSAGSRIAEGVPQLLIVLTADRSGDDVRGPSVVLRRGGAVPIGIGIGNADITEMQTLSFVPDFAVVIPTFRQLGTIQQVISERVTQLSREELSRLQASVTPLTTPVVSSKRDVVFLIDGSQSAGPEFQYIRTLIERLVDYLDVGFDTTRVAVIQFSDDPRVEFLLNVHSSKDEVQNAVRRLRPKGGRQVNVGGALEYVARNIFKRPLGSRIEEGVPQFLVLISSGKSDDEVEDSAIELKQFGVAPLTIARNVDQEELVKISLSPEYVFSVNTFRELPSLEQKLLTPLTTLTAGQIQQLLASTRYPPPAVESDAADIVFLIDSSDGVKPDGIAHIRDFVIRIVRRLNVGPNKVRIGVLQFSNDVFPEFQLKTYKSQASVLDAIRRLRFKGGSPLNTGKALEFVARNYFVKSAGSRIEDGVPQHLVLFLGGKSQDDISRYSQVIKSAGIASLGVGDRNIDRTELQTITSDPRLVFTVREFRDLPSIEERMVNSFGSSGVTPAPPGVDTPSPSRPEKKKADIVFLLDGSINFRRDSFQEVLRFVSEIVDTVYEGGDSIQVGLVQYNSDPTDEFFLKDFPTKQQIIDAINKVVYKGGRHANTKVGLEHLRRNHFVPEAGSRLDQRVPQIAFVITGGKSVEDAQEASMALTQRGVKVFAVGVRNIDSEEVGKIASNSATAFRVGNVQELSELSEQVLETLHDAMHETLCPGVTDVSKACNLDVILGFDGSGDQNVFVAQKGLEPKVDTILRRISQMQKISCSGSQLPTVRVSVVALTPSGPVEAFDFAEYQPELFEKFQNMRAQHPYVLTADTLKLYQNKFRQASMDNVKVVIHFTDGVDGDLADLQRASEELRQEGVRALILVGLERVANLEQLMQLEFGRGFTYNRPLRLNLLDLDYELAEQLDNIAEKACCGIPCKCSGQRGDRGPIGSIGPKGIPGEDGYRGYPGDEGGPGERGPPGVNGTQGFQGCPGQRGVKGSRGFPGEKGELGEIGLDGLDGEDGDKGLPGTSGEKGSPGRRGDKGPKGDKGERGDVGIRGDPGNSGQDSQQRGAKGETGDIGPVGLPGRDGVSGGPGEPGKSGGFGRRGPAGAKGNQGGPGQQGPVGEQGTRGAQGPPGPTGPPGLIGEQGIPGPRGGGGTAGAPGERGRTGPLGRKGEPGDPGPKGSIGNRGPRGETGDDGRDGVGSEGRIGKKGERGFPGYPGPKGNPGEPGTDGPPGPKGIRGRRGNSGPPGIAGQKGDPGYPGPSGYKGSRGDSMDQCALVQSIKDKCPCCYGPLECPVFPTELAFALDTSEGVTQDRFSQMREVVLKILDDLTIAESNCPRGARVAVVTYNNEVTTEIRFADSKKKSVLLDKIKNLQVSLTSKQQSLETAMSFVARNTFKRVRSGFLMRKVAVFFSNKPTRATPQLREAVLKLSDAGITPLFLTSQEDRQLINALQINNTAVGHALVLPAGGDLTDFLKNVLTCHVCLDICNIDPSCGFGSWRPSFRDRRAAGSDVDIDMAFILDSSESTTPFQFNEMRKYIEYLVRQLDVSPDPKASQHFARVAVVQHAPYEAVDNASVPPVKVEFSLTDYGSKEKLLAFLGSRMTQLQGTRALGRAIDYTIENIFESAPNPRDLKIVVLMLTGEVQKQQLEEAQRAILQAKCKGYFFVILGIGRKVNVKELYSSASEPNDVFFKLVDKSTELNEEPLMRFGRLLPSFVSSKDAFYLSPDIRKQCDWFQADQPAKNLVQFGYKQINVPNNVTSSPTSKLVTTTKPVITTTKPITVVNLPASKPAATRPVDERPAAGRSVATKMDSARPVPEAAKTATARPAAAAKPAAAKPAPARPPTAARSMATRSEAPRPQAVKLAASRPGAAKPVVKAPREIHVSEVTENSAKLHWERPEPPSPYLYNLTVTSAHDQAVVLKQNLTVTDRVIGGLLPGQTYHVTVTCSLRSQVRAIYQGSFSTKKIQPPPPQTERSASSATINLVVSADRLAGSKADICKLPKDGGTCREFVLKWYYDSVTENCARFWYGGCGGNENRFNSQDECEKVCPPVPIKQPGVIAAMGT

SEQ ID NO: 941 - protein, 199 aa, Bos taurus
MAPKKPDPKKDEAKAGAKAAAAPAPAPAPPPAPEPSKEPEFDPSKIKIEFTPEQIEEFKEAFTLFDRTPKCEMKITYGQCGDVLRALGQNPTQAEVLRVLGKPKQEELNSKMMDFDTFLPMLQHISKNKDTGTYEDFVEGLRVFDKEGNGTVMGAELRHVLATLGEKLTEDEVEKLMAGQEDSNGCINYEAFVKHIMAG

SEQ ID NO: 942 - protein, 211 aa, Bos taurus
MPPKKDVPVKKPVGPPAAPKPAAKPAVGPPPSRVELPSLIPVILEKPAKIQEPPIDLSKVVIEFNKDQLEEFKEAFELYDRVGDGKIQFSQCGDVMRALGQNPTNAEVLRVLGYPKSDELKSRRVDFETFLPMLQAVAKLPDRGSYQDYLEGLRVFDKEQNGKVMGAELRHVLTTLGERMTEEEVESVLAGHEDSSGCINYEAFLKHILSV

SEQ ID NO: 943 - protein, 1561 aa, Bos taurus
MSLPFYQKLHQHYDRSYRNRDLSTTMSQYQQEKKSSAIYTHGSTAYSSRSSAAHRQESAAFSQASAASYQHQASRASEFALSSAASHKAASAYDYGYSHRLTDSSLMLDYSSKLSPQTKRAKKSLLSGEEKENLPSDYMVPIFSGRQVHVSGITDTEEQRIKEAAAYIAQRNLLASEEGVTASKQSSVSKQSSVSKQSMSTLHQEEAFEKKSRKVAIREKADQLSLKKTLEETEAFHKKLNEDNLLHAPEFVIKPRSHTVWEKENVKLHCSVAGWPEPRLTWYKNQVPINVQAHPGKYIIESRYGMHTLEINACDFEDTAQYRASAMNAKGELSAYASVVVKRYKGELDDTRFHSGASTLPPSFAVTPYGYASRFEIHFDDKFEVSFGREGETMSLGCSVVITPEIKHFQPEIQWYRNGVPVSPSKWVQTHWSGDRATLTFSHLNKEDEGLYTVRARMGEYYEQYSAYVFVRDADAEIEGAPASPLDVVCLDANKDYIIITWKQPAVDGGSPILGYFIDKCEVGTDTWSQCNDIPVKFARFPVTGLIEGRSYIFRVRAVNKVGIGLPSRVSEPVAALDPAEKARLKSRPSAPWTGQIIVTEEEPTEGVVPGPPTDLSVIEATQSYVVLSWKPPRQRGHEGILYFVEKCEAGTENWQRVNTELPVKSPRFALFDLAEGKSYRFRVRCSNSAGVGEPSEATEVTVVGDKLDIPKPPSNIIPSRNTDTSVVVTWEEPKDAKELVGYYIESSIVGSGKWEPCNNNPVKGTRFTCHGLKTGQSYIFRVRAVNAAGLSEYSQNSEAIEVKAAIAPPSPPCDITCLESFRDSMVLGWKQPDKTGGAEITGYYVNYREVIDGVPGRWREANIKAISDEAYKISNLKENMVYQFQVAAINIAGLGAPSAVSPSFKCEEWTIAVPGPPHSLKYSQVRKTSLVLQWKPPIHSGRTPVTGYFVDIKEASAREDRWRGLNQAALKHTYLKVQGLKEGESYVFRVRAINQAGVGKPSDLAGPVVAETRPGTKEVVVSVDDNGIISLNFECDQMAPSSEFTWSKDYVPTEDSPRLEVESKGNKTKMTFKDLGTEDLGIYSCDVTDTDGIASSYLIDEEELKRLLALSQEHKFPTVPVKSELAVEILEKGQVRFWMQAEKLSTNAKVNYIFNEKEIFEGPKYKMHIDRNTGIIEMFMEKLQDEDEGTYTFQVQDGRATGHSTLVLIGDVYKKLQKEAEFQRQEWIRKQGPHFAEYLSWEVTGECNVLLKCKVANIKKETSIVWYKDDREISVDEKHDFKDGICTLLITEFSKKDAGIYEVVLKDDRGKDKSRLKLVDEAFKELMTEVCKTIALSATDLKIQSTAEGIRLYSFVTYYVDDLKVNWSHNGTAIKYSDRVKSGVTGEQIWLQINEPTPNDKGKYVMELFDGKTGHQKMVDLSGQAYDEAFAEFQRLKQAAIAEKNRARVVGGLPDVVTIQEGKALNLTCIVWGDPTPEVSWLKNEKLLASDEHCNLKFEAGKTAYFTISGVRTSDSGRYGLVVKNKYGSEISDFTVSVFIPEEEARSVAEEPQKGNKKAK

SEQ ID NO: 944 - protein, 166 aa, Bos taurus
MSPKKAKKRAEGANYNVFSMFEQTQIQEFKEAFTIMDQNRDGFIDKNDLRDTFAALGRVNVKNEEIDEMLKEAPGPINFTVFLQMFGEKLKGADPEETILNAFKVFDPEGKGVLKADYIKEMLTTQAERFSKEEIDQMFAAFPPDVTGNLDYKNLVHIITHGEEKD

SEQ ID NO: 945 - protein, 194 aa, Bos taurus
MEEKLKKTKIIFVVGGPGSGKGTQCEKIVQKYGYTHLSTGDLLRAEVSSGSARGKMLSEIMEKGQLVPLETVLDMLRDAMVAKVDTSKGFLIDGYPREVQQGEEFERRIAQPTLLLYVDAGPETMTKRLLKRGETSGRVDDNEETIKKRLETYYKATEPVIAFYEKRGIVRKVNAEGSVDNVFSQVCTHLDALK

SEQ ID NO: 946 - protein, 201 aa, Bos taurus
MAERRVPFSLLRGPSWDPFRDWYPAHSRLFDQAFGLPRLPEEWSQWLSHSGWPGYVRALPAAAIEGPAYNRALSRQLSSGVSEIQQTADRWRVSLDVNHFAPEELTVKTKDGVVEITGKHEERQDEHGYISRCFTRKYTLPPGVDPTLVSSSLSPEGTLTVEAPLPKSATQSAEITIPVTFQARAQLGGPEAGKSEQPENK

SEQ ID NO: 947 - protein, 349 aa, Bos taurus
MTGKKVCIVGSGNWGSAIAKIVGGNAAQLAHFDPRVTMWVFEEDIGGRKLTEIINTQHENVKYLPGHKLPPNVVAVPDVVQAAADADILIFVVPHQFIGKICDQLKGHLKADTIGVSLIKGVDEGPKGLKLISEVIGERLGIPMSVLMGANIANEVADEKFCETTIGSKNQAHGQLLKELMQTPNFRITVVQEVDTVEICGALKNIVAVGAGFCDGLGFGDNTKAAVIRLGLMEMIAFAKLFCSGSVSSATFLESCGVADLITTCYGGRNRKVAEAFARTGKSIEQLEKEMLNGQKLQGPQTARELHSILQHKGMVDKFPLFTAVYKVCYENQPVGEFIHCLQNHPEHV

SEQ ID NO: 948 - protein, 338 aa, Bos taurus
MLSALARPAGAALRRSFSTSAQNNAKVAVLGASGGIGQPLSLLLKNSPLVSRLTLYDIAHTPGVAADLSHIETRATVKGYLGPEQLPDCLKGCDVVVIPAGVPRKPGMTRDDLFNTNATIVATLTAACAQHCPEAMICIISNPVNSTIPITAEVFKKHGVYNPNKIFGVTTLDIVRANAFVAELKDLDPARVNVPVIGGHAGKTIIPLISQCTPKVEFPQDQLTTLTGRIQEAGTEVVKAKAGAGSATLSMAYAGARFVFSLVDAMNGKEGVVECSFVKSQETDCPYFSTPLLLGKKGIEKNLGIGKVSPFEEKMIAEAIPELKASIKKGEEFVKNMK

SEQ ID NO: 949 - protein, 641 aa, Bos taurus
MAKNTAIGIDLGTTYSCVGVFQHGKVEIIANDQGNRTTPSYVAFTDTERLIGDAAKNQVALNPQNTVFDAKRLIGRKFGDPVVQSDMKHWPFRVINDGDKPKVQVSYKGETKAFYPEEISSMVLTKMKEIAEAYLGHPVTNAVITVPAYFNDSQRQATKDAGVIAGLNVLRIINEPTAAAIAYGLDRTGKGERNVLIFDLGGGTFDVSILTIDDGIFEVKATAGDTHLGGEDFDNRLVNHFVEEFKRKHKKDISQNKRAVRRLRTACERAKRTLSSSTQASLEIDSLFEGIDFYTSITRARFEELCSDLFRSTLEPVEKALRDAKLDKAQIHDLVLVGGSTRIPKVQKLLQDFFNGRDLNKSINPDEAVAYGAAVQAAILMGDKSENVQDLLLLDVAPLSLGLETAGGVMTALIKRNSTIPTKQTQIFTTYSDNQPGVLIQVYEGERAMTRDNNLLGRFELSGIPPAPRGVPQIEVTFDIDANGILNVTATDKSTGKANKITITNDKGRLSKEEIERMVQEAEKYKAEDEVQRERVSAKNALESYAFNMKSAVEDEGLKGKISEADKKKVLDKCQEVISWLDANTLAEKDEFEHKRKELEQVCNPIISRLYQGAGGPGAGGFGAQGPKGGSGSGPTIEEVD

SEQ ID NO: 950 - protein, 145 aa, Bos taurus
MLTAEEKAAVTAFWGKVKVDEVGGEALGRLLVVYPWTQRFFESFGDLSTADAVMNNPKVKAHGKKVLDSFSNGMKHLDDLKGTFAALSELHCDKLHVDPENFKLLGNVLVVVLARNFGKEFTPVLQADFQKVVAGVANALAHRYH

SEQ ID NO: 951 - protein, 430 aa, Bos taurus
MALLHSGRFLSGVAAAFHPGLAAAASARASSWWAHVEMGPPDPILGVTEAFKRDTNSKKMNLGVGAYRDDNGKPYVLPSVRKAEAQIAAKNLDKEYLPIAGLAEFCKASAELALGENNEVLKSGRYVTVQTISGTGALRIGASFLQRFFKFSRDVFLPKPTWGNHTPIFRDAGMQLQSYRYYDPKTCGFDFTGAIEDISKIPAQSVILLHACAHNPTGVDPRPEQWKEMATVVKKNNLFAFFDMAYQGFASGDGNKDAWAVRHFIEQGINVCLCQSYAKNMGLYGERVGAFTVVCKDAEEAKRVESQLKILIRPMYSNPPINGARIASTILTSPDLRKQWLHEVKGMADRIISMRTQLVSNLKKEGSSHNWQHIIDQIGMFCYTGLKPEQVERLTKEFSIYMTKDGRISVAGVTSGNVAYLAHAIHQVTK

SEQ ID NO: 952 - protein, 606 aa, Bos taurus
MDSQRELAEELRLYQSTLLQDGLKDLLDEKKFIDCTLKAGDKSLPCHRLILSACSPYFREYFLSEIDEAKKKEVVLDNVDPAVLDLIIKYLYSASIDLNDGNVQDIFALASRFQIPSVFTVCVSYLQKRLAPGNCLAILRLGLLLDCPRLAISAREFVSDRFVQICKEEDFMQLSPQELISVISNDSLNVEKEEAVFEAVMKWVRTDKENRVKNLSEVFDCIRFRLMTEKYFKDHVEKDDIIKSNPELQKKIKVLKDAFAGKLPEPSKNTEKAGAGEVNGDVGDEDLLPGYLNDIPRHGMFVKDLILLVNDTAAVAYDPTENECYLTALAEQIPRNHSSIVTQQNQVYVVGGLYVDEENKDQPLQSYFFQLDNVASEWVGLPPLPSARCLFGLGEIDDKIYVVAGKDLQTEASLDTVLCYDPAAAKWNEVKKLPIKVYGHSVISHKGMIYCLGGKTDDKKCTNRVFIYNPKKGDWKDLAPMKIPRSMFGVAVHKGKIVIAGGVTEDGLSASVEAFDLNTNKWEVMTEFPQERSSISLVSLAGSLYAIGGFAMIQLESKEFAPTEVNDIWKYEDDKKEWAGMLKEIRYASGASCLATRLNLFKLSKL

SEQ ID NO: 953 - protein, 853 aa, Bos taurus
SDHLELQVSASGGTEDVGNLLENHFSAGDASLEEKERALRAEAAPGETRPLLHPSEGGEDGSSEKTAADGLSSDPDPDPEASLSNASASESAAPGEPAGPGAEDAGPPGAASALPPGREGEPGEEEGARELSSGEGPGQEAEGPAGSGEVPEEAAEALGEAAAGSPEPENSEDSPSQEVETGGEGSPGPGLEPEVTDGAADVDAEAAQRTEDQAEPSSISAAAAEDAAAREEEGGSREHPNEASSEEEGGEESEEESGDEEDSGDAASSEEAGGASEEEEAEKEAGEGAHAAAGSASPGEEGSPEESPEGADAQEPKEEGPQGRGVSRGCPPPPARHLDEADRDPQGGRPTAGVVGHRPQGVPGPLGASRLFLNHLSPLQRDPLRACTLEGPEEPDVCPAEEAEDVSEEAPLRDRSHIEKTLMLNEDKPADDFSVVLQRLRKIYHSSIKPLEQSYKYNELRQHEITDGEITSKPMVLFLGPWSVGKSTMINYLLGLENTRYQLYTGAEPTTSEFTVLMHGPKLKTIEGIVMAADSARSFSPLEKFGQNFLEKLIGIEVPHKLLERVTFVDTPGIIENRKQQERGYPFNDVCQWFIDRADLIFVVFDPTKLDVGLELEMLFRQLKGRESQIRIILNKADNLATQMLMRVYGALFWSLAPLINVTEPPRVYVSSFWPYDYKPDTHRDLFLREEISLLEDLNQVIENRLENKIAFIRQHAIRVRIHALLVDRYLQTYKEKMTFFSDGELVFKDIVEDPDKFYIFKTILAKTNVSKFDLPHREAYKDFFGINPISSFKLLSQQCSYMGGCFLDKIERAITQELPSLLGSLGLGKNPGALNCDKTGCGETPKNRYKKP

SEQ ID NO: 954 - protein, 4644 aa, Bos taurus
  MOD_RES (1109)..(1109): Any amino acid
MVAGMFMPLDQLRAIYEVLFREGVMVAKKDRRPRSLHPHVPGVTNLQVMRAMASLRARGLVRETFAWRHFYWYLTNEGIAHLRQYLHLPPEIVPASLQRVRRPVAMVMPARRTPHVQAVQGPLGCPPKRGPPPTEDPAREERCVYRRKEPEEGAPEPPVVPAATPGTLARQGLEPAPPTDERDRVQKKTFTKWVNKHLIKAQRHISDLYEDLRDGHNLISLLEVLSGDSLPREKGRMRFHKLQNVQIALDYLRHRQVKLVNIRNDDIADGNPKLTLGLIWTIILHFQISDIQVSGQSEDMTAKEKLLLWSQRMVEGYQGLRCDNFTSSWRDGRLFNAIIHRHKPMLIDMNKVYRQTNLENLDQAFSVAERDLGVTRLLDPEDVDVPQPDEKSIITYVSSLYDAMPRVPDVQDGVKANELQLRWQEYRELVLLLLQWIRAHTAAFEERRFPSSFEEIEILWCQFLKFKETELPAKEADKNRSKGIYQSLEGAVQAGQLKVPPGYHPLDVEKEWGKLHVAILEREKQLRSEFERLERLQRIVSKLQMEAGLCEEQLNQADALLQSQDVRLLAAGKAPQRAGEVERDLDKADGMIRLLFNDVQALKDGRHPQGEQMYRRVYRLHERLVAIRTEYNLRLRGTPRHPELEDSTLRYLQDLLAWVEENQRRLDGAEWGVDLPSVEAQLGSHRGLHQSVEEFRAKIERARTDEGQLSPATRGAYRDCLGRLDLQYAKLLNSSKARLRSLESLHGFVAAATKELMWLSEKEEEEVGFDWSERNSNMAAKKEAYSALMRELELKEKKIKEIQSTGDRLLREDHPARPTVESFQAALQTQWSWMLQLCCCIEAHLKENTAYFQFFSDVREAEEQLRKLQETLHRKYTCDRSITVTRLEDLLQDAQDEKDQLNEYRGHLSGLAKRAKAIVQLTPRNPTQPTRGRVPLLAVCDYKQVEATVHKGDECQMLGPAQPFHWKVLSGSGSEAAVPSVCFLVPPPNQEALEAVARLEAQHQALVTLWHQLHTDMKSLLAWQSLSRDVQLIRSWSLVTFRTLKPEEQRQALRSLELHYQAFLRDSQDAGGFGPEDRLQAEREYGSCSRHYQQLLQSLEQGKCGQCGXLDKEPARECAQRIAEQQKAQAEVEGLGKGVARLSAEAEKVLALPEPSPAAPTLRSELELTLGKLEQVRSLSAIYLEKLKTISLVIRSTQGAEEALKAHEEQLKEAQAVPAALPELEATKAAMKKLRAQAEAQQPVFDALRDELRGAQEVGERLQQRHGERDVEVERWRERVTQLLERWQAVLAQTDVRQRELEQLGRQLRYYRESADPLGAWLQDARRRQEQIQAVPLADSQAVREQLRQEKALLEEIERHAEKVEECQRFAKQYINAIKDYELQLVTYKAQLEPVASPAKKPKVQSGSESVIQEYVDLRTRYSELSTLTSQYIRFISETLRRMEEEERLAEQQRAEERERLAEVEAALEKQRQLAEAHAQAKAQAEREAQELQRRMQEEVARREEVVVDAQQQKRSIQEELQQLRQSSEAEIQAKARQVEAAERSRLRIEEEIRVVRLQLETTERQRGGAEGELQALRARAEEAEAQKRQAQEEAERLRRQVQDETQRKRQAEAELGLRVKAEAEAAREKQRALQALEELRLQAEEAERRLRQAEAERARQVQVALETAQRSAQAELQSKHASFAEKTAQLERTLEEEHVTVVQLREEATRREQQQAEAERAREEAERELERWQLKANEALRLRLQAEEVAQQKSLAQAEAEKQKEAAEREARRRGKAEEQAVRQRELAEQELERQRQLAEGTAQQRLAAEQELIRLRAETEQGEQQRQLLEEELARLQSEAAAATQKRQELEAELAKVRAEMEVLLASKARAEEESRSSSEKSKQRLEAEAGRFRELAEEAARLRALAEEAKRQRQLAEEDAARQRAEAERVLSEKLAAISEATRLKTEAEIALKEKEAENERLRRLAEDEAFQRRRLEEQAAQHKADIEERLAQLRKASESELERQKGLVEDTLRQRRQVEEEILALKASFEKAAAGKAELELELGRIRGNAEDTLRSKEQAEQEAARQRQLAAEEERRRREAEERVQKSLAAEEEAARQRKAALEEVERLKAKVEEARRLRERAEQESARQLQLAQEAAQKRLQAEEKAHAFAVQQKEQELQQTLQQEQSMLERLRGEAEAARRAAEEAEEARERAEGEAAQSRQRVEEAERLKQAAEEQAQAQAQAQAAAEKLRKEAEQEAARRAQAEQAALRQKQAADAEMEKHKKFAEQTLRQKAQVEQELTALRLKLEETDHQKSILDQELQRLKAEVTEAARQRSQVEEELFSVRVQMEELGKLKARIEAENRALILRDKDNTQRLLQEEAEKMKQVAEEAARLSVAAQEAARLRQLAEEDLAQQRALAEKMLKEKMQAVQEATRLKAEAELLQQQKELAQEQARRLQEDKEQMAQQLAQETQGFQRTLETERQRQLEMSAEAERLRLRVAEMSRAQARAEEDAQRFRKQAEEISAKLHRTELATQEKVTLVQTLETQRQQSDRDADRLREAIAELEREKDKLKKEAELLQLKSEEMQTVQQEQLLQETQALQQSFLSEKDSLLQRERFIEEEKAKLERLFQDEVAKAQKLREEQQRQQQQMQQEKQQLLASMEEARRRQREAEEGVRRKQEELQLLEQQRQQQEQLLAEENRRLRERLEHLEEEHRAALAHSEEITAAQAAATRALPNGQDATDGPAAEPEHAFEGLRQKVPAQQLQEAGILSTEEVQRLVQGHTTVAELTQREDVRRYLQGHSSIAGLLLKPANEKLTIYAALRRQLLSPGTAVILLEAQAASGFLLDPVRNRRLTVNEAVKEGVVGPELHHKLLSAERAVTGYKDPYTGEQISLFQAMKKDLIVREHGIRLLEAQIATGGVIDPVHSHRVPVDVAYQRGYFDEEMNRVLQDPSDDTKGFFDPNTHENLTYLQLLERCVEDPETGLRLLPLTDQAAKGGELVYTDSEARDVFEKATVSAPFGKFQGKTVTIWELINSEYFTAEQRRDLLRQFRTGKVTVEKIIKIVITVIEEHEQKGQLCFQGLRALVPAAELLESGVIDWDLFRQLQLGERSVQEVAEVEAVRRALRGSGVIAGVWLEEARQKLSIYEALKKELLQPEAAVALLEAQAGTGHVIDPATSARLTVDEAVRAGLVGPELHEKLLSAEKAVTGYKDPYSGQSVSLFQALKKGLIPREQGLRLLDAQLSTGGIVDPSKSHRLPLDVACARGYLDKETSTALTAPRDDAKTYYNPRTWEPATYSQLQQQCRPDPLTGLSLLPLSEEAARARQQELYSEVQAREAFQKATVEVPVGSFQGRAVTIWELINSEYFTAEQRQELLRQFRTGKVTVEKIIKIIITIVEEVETTRRERLSFSGLRAPVPASELLASGILSSSQFEQLKDGKTSVKDLSELDSVRTLLQGSGCLAGIYLEESKEKVTIYEAMRRGLLRPSTAILLLEAQAATGFLVDPVRNQRLYVHEAVKAGVVGPELHEKLLSAEKAVTGYKDPYSGSTISLFQAMKKGLVVREHGIRLLEAQIATGGIIDPVHSHRVPVDVAYQRGYFDKEMNRVLEDPSDDTKGFFDPNTRENLTYRQLLERCVEDPETGLRLLPLKGPEKAEVVETTRVYTEEETRRAFEETQIDIPGGGSHGGSTMSLWEVMQSDLIPEEQRAQLMADFQAGRVTKERMIIIIIEIIEKTEIVRQQNLASYDYVRRRLTAEDLHEARVISRESYSLLREGTRSLREVLEAESAWRYLYGTGCVAGVYLPGSRQTLTIYQALKKGLLSAEVARLLLEAQAATGFLLDPVKGDRLTVDEAVRKGLVGPELHDRLLSAERAVTGYRDPYTEQTISLFQAMKKDLIPAEEALRLLDAQLATGGIVDPRLGFHLPLEVAYQRGYLNKDTHDQLSEPSEVRSYIDPSTDERLSYTQLLRRCRRDEASGLFLLPLSDARKLTFRGLRKQITVEELVRSHVMDEATAQRLQEGLTSIEEVSKNLQKFLEGTSSIAGVLVDATKERLSVYQAMKKGIIRPGTAFELLEAQAATGYVIDPIKGLKLTVEEAVRMGIVGPEFKDKLLSAERAVTGYKDPYSGKLISLFQAMKKGLILKDHGIRLLEAQIATGGIIDPEESHRLPVDVAYQRGLFDEEMNEILTDPSDDTKGFFDPNTEENLTYLQLMERCVTDPQTGLRLLPLKEKKRERKTSSKSSVRKRRVVIVDPETGKEMSVYEAYRKGLIDHQTYLELSEQECEWEEITISSSDGVVKSMIIDRRSGRQYDIDEAIAKSLIDRSALDQYRAGTLSITEFADMLSGNAGGFRSRSSSVGSSSSYPISPAVSRTQLASWSDPTEETGPVAGILDTETLEKVSITEAMHRNLVDNITGQRLLEAQACTGGIIDPNTGERFPVTEAVNKGLVDKIMVDRINLAQKAFCGFEDPRTKTKMSAAQALKKGWLYYEAGQRFLEVQYLTGGLIEPDTPGRVPLDEALQRGTVDARTAQKLRDVSAYSKYLTCPKTKLKISYKDALDRSMVEEGTGLRLLEAATQSSKGYYSPYSVSGSGSTTGSRSGSRTGSRAGSRRGSFDATGSGFSMTFSSSSYSSSGYGRRYASGPTSSLGGPESTAA

SEQ ID NO: 955 - protein, 142 aa, Bos taurus; identical to SEQ ID NO: 764

SEQ ID NO: 956 - protein, 297 aa, Bos taurus
MPLSGTPAPNKKRKSSKLIMELTGGGQESSGLNLGKKISVPRDVMLEELSLLTNRGSKMFKLRQLRVEKFIYENHPDVFSDSSMDRFQKFIPTVGGQLGTAGQGFSYSKSSGGGQAGRSGSAGQYGSDQQHHHQGSGSGSGSGSGPGSGGAGGPGGHSGRGGALPDNQAGGEGKHITVFKTYISPWEKAMGIDPQQKVELGIDLLAYGAKAELPKYKSFNRTAMPYGGYEKASKRMTFQMPKFDLGPLLSEPLVLYNQNLSNRPSFNRTPIPWLSSGEPVDYNVDISIPLDGETEEL

SEQ ID NO: 957 - protein, 334 aa, Bos taurus
MATLKEKLIAPVAEEETRIPNNKITVVGVGQVGMACAISILGKSLTDELALVDVLEDKLKGEMMDLQHGSLFLQTPKIVADKDYSVTANSKIVVVTAGVRQQEGESRLNLVQRNVNVFKFIIPQIVKYSPDCIIIVVSNPVDILTYVTWKLSGLPKHRVIGSGCNLDSARFRYLMAEKLGIHPSSCHGWILGEHGDSSVAVWSGVNVAGVSLQELNPEMGTDNDSENWKEVHKMVVESAYEVIKLKGYTNWAIGLSVADLIESMLKNLSRIHPVSTMVKGMYGIENEVFLSLPCILNARGLTSVINQKLKDEEVAQLKKSADTLWGIQKDLKDL

SEQ ID NO: 958 - protein, 413 aa, Bos taurus
MAPPSIFAEVPQAQPVLVFKLTADFREDPDPRKVNLGVGAYRTDDSQPWVLPVVRKVEQRIANDSSINHEYLPILGLAEFRTCASRLALGDDSPALQEKRVGGVQCLGGTGALRIGAEFLARWYNGTNNKDTPVYVSSPTWENHNGVFIAAGFKDIRSYHYWDAAKRGLDLQGFLNDLEKAPEFSIFVLHACAHNPTGTDPTPEQWKQIASVMKRRFLFPFFDSAYQGFASGSLEKDAWAIRYFVSEGFELFCAQSFSKNFGLYNERVGNLTVVAKEPDSILRVLSQMEKIVRITWSNPPAQGARIVARTLSDPELFNEWTGNVKTMADRILTMRSELRARLEALKTPGTWNHITEQIGMFSFTGLNPKQVEYLINEKHIYLLPSGRINMCGLTTKNLEYVATSIHEAVTKIQ

SEQ ID NO: 959 - protein, 650 aa, Bos taurus
MSKGPAVGIDLGTTYSCVGVFQHGKVEIIANDQGNRTTPSYVAFTDTERLIGDAAKNQVAMNPTNTVFDAKRLIGRRFDDAVVQSDMKHWPFMVVNDAGRPKVQVEYKGETKSFYPEEVSSMVLTKMKEIAEAYLGKTVTNAVVTVPAYFNDSQRQATKDAGTIAGLNVLRIINEPTAAAIAYGLDKKVGAERNVLIFDLGGGTFDVSILTIEDGIFEVKSTAGDTHLGGEDFDNRMVNHFIAEFKRKHKKDISENKRAVRRLRTACERAKRTLSSSTQASIEIDSLYEGIDFYTSITRARFEELNADLFRGTLDPVEKALRDAKLDKSQIHDIVLVGGSTRIPKIQKLLQDFFNGKELNKSINPDEAVAYGAAVQAAILSGDKSENVQDLLLLDVTPLSLGIETAGGVMTVLIKRNTTIPTKQTQTFTTYSDNQPGVLIQVYEGERAMTKDNNLLGKFELTGIPPAPRGVPQIEVTFDIDANGILNVSAVDKSTGKENKITITNDKGRLSKEDIERMVQEAEKYKAEDEKQRDKVSSKNSLESYAFNMKATVEDEKLQGKINDEDKQKILDKCNEIINWLDKNQTAEKEEFEHQQKELEKVCNPIITKLYQSAGGMPGGMPGGMPGGFPGGGAPPSGGASSGPTIEEVD

SEQ ID NO: 960 - protein, 164 aa, Bos taurus
MEIPVSVQPSWLRRASAPLPGLSAPGRLFDQRFGEGLLEAELAALCPAALAPYYLRAPSVALPTAQVSTDPGHFSVLLDVKHFSPEEIAVKVVGDHVEVHARHEERPDEHGYIAREFHRRYRLPPGVDPAAVTSALSPEGVLSIQAAPAPAQAPLQSPPGAAAK

SEQ ID NO: 961 - protein, 252 aa, Bos taurus
MSDAEEQEYEEEQPEEEEAAEEEEEEEERPKPSRPVVPPLIPPKIPEGERVDFDDIHRKRMEKDLLELQTLIDVHFEQRKKEEEELVALKERIERRRAERAEQQRFRTEKERERQAKLAEEKMRKEEEEAKKRAEDDAKKKKVLSNMGAHFGGYLVKAEQKRGKRQTGREMKLRILSERKKPLNIDHMGEEQLREKAQELSDWIHQLESEKFDLMAKLKQQKYEINVLYNRISHAQKFRKGAGKGRVGGRWK

SEQ ID NO: 962 - protein, 499 aa, Bos taurus
MFNYERPKHFIQSQNPCGSRLQPPGPEISSYSSQTKQSSITIQPRQCTEQRYSASSTVSSHITMSSSAFPASPQQLAGSNPAQRVTATYNQSPASFLSSILPSQPDYSSSKNPSTVDSNYQQPSVGQPINVKSSQNANAKLTPKTPDHEIQGSKEALIQDLERKLKCKDSLLHNGNQRLTYEEKMARRLLGPQNAAAVFQGQNDSEAQDSAQQHNIEHARLQVPTSQVRSRSSSRGDVNDQDAIQEKFYPPRFIQVPENMSIEEGRFCRMDFKVSGLPAPDVSWYLNGRPVQSDDFHKMIVSEKGFHSLIFEVVRASDAGAYACVAKNRAGEATFTVQLDVLAKEHRRAPMFIYKPQSKKVFEGESVKLECQISAVPPPKLFWKRNNEMVQFNTDRISLYHDNSGRVTLLIKDVNKKDAGWYTVSAVNEAGVTTCNTRLDVTARPNQTLPAPKQLRVRPTFSKYLALNGKGLNVKQAFNPEGEFQRLAAQSGLYESEEL

SEQ ID NO: 963 - protein, 620 aa, Bos taurus
VTVEDFEMVCKGLYRALCIREKYMQKSFQRFPKTPSKYLRNIDGEAWVEKENFYPVFTPPMKKGEDPFRTDNLPENLGYQLKMKDGVVYVYPNEEAASKDEPKPLPYPNLDTFLDDMNFLLALIAQGPVKTYTHRRLKFLSSKFQVHQMLNEMDELKELKNNPHRDFYNCRKVDTHIHAAACMNQKHLLRFIKKSYQIDADRVVYSTKEKNLTLKELFAKLKMHPYDLTVDSLDVHAGRQTFQRFDKFNDKYNPVGASELRDLYLKTDNYINGEYFATIIKEVGADLVEAKYQHAEPRLSIYGRSPEEWSKLSTWFVQNRVYCPNMTWMIQVPRIYDVFRSKNFLPHFGKMLENVFMPVFEATINPQAHPDLSVFLKHITGFDSVDDESKHSGHMFSSKSPKPQDWTMEKNPSYTYYTYYMYANIMVLNSLRKERGMNTFLFRPHCGEAGALTHLMTAFMTADNISHGLNLKKSPVLQYLFFLAQIPIAMSPLSNNSLFLEYARNPFLDFLQKGLMISLSTDDPMQFHFTKEPLMEEYAIAAQVFKLSTCDMCEVARNSVLQCGISHQEKVRFLGNNYLEEGPAGNDIRKTNVAQIRMAYRYETWCYELNLIAEGIKSGE

SEQ ID NO: 964 - protein, 730 aa, Bos taurus
MSYSVTLTGPGPWGFRLQGGKDFNMPLTISRITPGSKAAQSQLSQGDLVVAIDGVNTDTMTHLEAQNKIKSASYNLSLTLQKSKRPIPISTAAPPIQSPLPVIPHQKDPALDTNSSLAAASPHPEARAGPGTPGTPELGQIFSSSFSQTPVFSSHTEASDPGPPRGGPGAKISLEGALDSLSPKAPLGSSQPRQYNNPIGLYSAETLREMAQMYQMSRRGKASGAGLLGGADYQERFNPSALKDSALSTHKPIEVKGLGGKATIIHAQYNTPISMYSQDAIMDAIAGQAQAQGSDFSGSLPIKDLTVDSASPVYQAVIKNQNKPEDEADDWARRSSNLQSRSFRILAQMTGTEYMQDPDEEALRRSRPQASTYSPAVATSPAPAAHTYSEAPAAPAPKPRVVTTASIRPSVYQPVPASTYSPSPGANYSPTPYTPSPAPAYTPSPTPAYTPSPAPTYSPSPAPAYTPSPAPSYNPTLYSGGPAESASRPPWVTDDSFSQKFAPGKTTTTVSKQSLPRGAPAYTPPPPAPQVSPLARGTVQRAERFPASSRTPLCGHCNSIIRGPFLVAMGRSWHPEEFNCAYCKASLADVCFVEEQNNVYCERCYEQFFAPVCAKCNTKIMGEVMHALRQTWHTTCFVCAACKKPFGNSLFHMEDGEPYCEKDYVNLFSTKCHGCDFPVEAGDKFIEALGHTWHDTCFICAVCHVNLEGQPFYSKKDKPLCKKHAHAINV

SEQ ID NO: 965 - protein, 218 aa, Bos taurus
MPMILGYWDIRGLAHAIRLLLEYTDTNYEERQYSVGDAPDYDRSQWLNEKFKLGLDFPNLPYLIDGTHKLTQSNAILRYIARKHNLCGETEEEMIRVDILENQVMDVRLAMARICYSPDFEKLKPGFLKEIPEKIKLFSEFLGKRPWFAGDKLTYVDFLVYDVLDMHRIFEPKCLDAFPNLKDFISRFEGLKKISAYMKSSRFLPGPLFMKLAVWGNK

SEQ ID NO: 966 - protein, 298 aa, Bos taurus
MSDQALSFLKDFLAGGVAAAISKTAVAPIERVKLLLQVQHASKQISAEKQYKGIIDCVVRIPKEQGFLSFWRGNLANVIRYFPTQALNFAFKDKYKQIFLGGVDRHKQFWRYFAGNLASGGAAGATSLCFVYPLDFARTRLAADVGKGAAQREFTGLGNCITKIFKSDGLRGLYQGFNVSVQGIIIYRAAYFGVYDTAKGMLPDPKNVHIIVSWMIAQTVTAVAGLVSYPFDTVRRRMMMQSGRKGADIMYTGTVDCWRKIAKDEGPKAFFKGAWSNVLRGMGGAFVLVLYDEIKKFV

SEQ ID NO: 967 - protein, 334 aa, Bos taurus
MSEPIRVLVTGAAGQIAYSLLYSIGNGSVFGKDQPIILVLLDITPMMGVLDGVLMELQDCALPLLKDVIATDKEEIAFKDLDVAILVGSMPRRDGMERKDLLKANVKIFKCQGAALDKYAKKSVKVIVVGNPANTNCLTASKSAPSIPKENFSCLTRLDHNRAKAQIALKLGVTSDDVKNVIIWGNHSSTQYPDVNHAKVKLQGKEVGVYEALKDDSWLKGEFITTVQQRGAAVIKARKLSSAMSAAKAICDHVRDIWFGTPEGEFVSMGIISDGNSYGIPDDLLYSFPVTIKDKTWKVVEGLPINDFSREKMDLTAKELAEEKETAFEFLASA

SEQ ID NO: 968 - protein, 247 aa, Bos taurus
MVDREQLVQKARLAEQAERYDDMAAAMKNVTELNEPLSNEERNLLSVAYKNVVGARRSSWRVISSIEQKTSADGNEKKIEMVRAYREKIEKELEAVCQDVLSLLDNYLIKNCSETQIESKVFYLKMKGDYYRYLAEVATGEKRATVVESSEKAYSEAHEISKEHMQPTHPIRLGLALNYSVFYYEIQNAPEQACHLAKTAFDDAIAELDTLNEDSYKDSTLIMQLLRDNLTLWTSDQQDDDGGEGNN

SEQ ID NO: 969 - protein, 283 aa, Bos taurus
MAVPPTYADLGKSARDVFTKGYGFGLIKLDLKTKSENGLEFTSSGSANTETTKVTGSLETKYRWTEYGLTFTEKWNTDNTLGTEITVEDQLARGLKLTFDSSFSPNTGKKNAKIKTGYKREHINLGCDVDFDIAGPSIRGALVLGYEGWLAGYQMNFETAKSRVTQSNFAVGYKTDEFQLHTNVNDGTEFGGSIYQKVNKKLETAVNLAWTAGNSNTRFGIAAKYQIDPDACFSAKVNNSSLIGLGYTQTLKPGIKLTLSALLDGKNVNAGGHKLGLGLEFQA

SEQ ID NO: 970 - protein, 448 aa, Bos taurus
MRECISVHVGQAGVQMGNACWELYCLEHGIQPDGQMPSDKTIGGGDDSFTTFFCETGAGKHVPRAVFVDLEPTVIDEIRNGPYRQLFHPEQLITGKEDAANNYARGHYTIGKEIIDPVLDRIRKLSDQCTGLQGFLVFHSFGGGTGSGFTSLLMERLSVDYGKKSKLEFSIYPAPQVSTAVVEPYNSILTTHTTLEHSDCAFMVDNEAIYDICRRNLDIERPTYTNLNRLISQIVSSITASLRFDGALNVDLTEFQTNLVPYPRIHFPLATYAPVISAEKAYHEQLSVAEITNACFEPANQMVKCDPRHGKYMACCLLYRGDVVPKDVNAAIAAIKTKRSIQFVDWCPTGFKVGINYQPPTVVPGGDLAKVQRAVCMLSNTTAIAEAWARLDHKFDLMYAKRAFVHWYVGEGMEEGEFSEAREDMAALEKDYEEVGIDSYEDEDEGEE

SEQ ID NO: 971 - protein, 1027 aa, Bos taurus
MRLPRALLPLLLQACWASAQDDPVASRAIAFQDCPVDLFFVLDTSESVALRLKPYGALVDKVKSFTKRFIDNLNDRYYRCDRNLVWNAGALHYSDEVEIIRGLTRMPSGRDELKSSVDAVKYFGKGTYTDCAIKKGLEELLVGGSHLKENKYLVVVTDGHPLEGYKEPCGGLEDAVNEAKHLGIKVFSVAITPDHLEPRLSIIATDHTYRRNFTAADWGQSRDAEEVISQTIDTITDMIKNNVEQVCCSFECQPARGPPGPRGDPGYEGERGKPGLPGEKGEAGDPGRPGDLGPVGYQGMKGEKGSRGEKGSRGPKGYKGEKGKRGMDGVDGMKGETGFPGLPGCKGSPGFDGIQGPPGPKGDPGAFGLKGQKGEPGADGEPGRPGSTGPPGDEGEPGEPGPPGEKGEAGDEGNAGPDGAPGERGGPGERGPRGTPGARGPRGDPGEAGPQGDQGREGPVGVPGDPGEAGPIGPKGYRGDEGPPGTEGPKGAPGPAGPPGDPGLMGERGEDGPPGNGTEGFPGFPGYPGSRGPPGINGTKGYPGLKGDEGEAGDPGEDNNDIAARGAKGAKGYRGPEGPQGPPGHVGPPGPDECEILDIIMKMCSCCECKCGPIDILFVLDSSESIGLQNFEIAKDFIVKVIDRLSKDELVKFEPGQSHAGVVQYSHNQMQEHVDLRDPNIRNAQDLKEAIKKLQWMGGGTFTGEALQYTRSRLLPPTPNNRIALVITDGRSDTQRDTTPLSVLCGPDIQVVSVGIKDVFGLAAGSDQLNVISCQGLAPQGRPGISLVKENYAELLDDGFLKNITAQICIDKKCPDYSCPITFSSPADITILLDGSASVGSHNFDITKRFAKRLAERFLTASRTDPGQDVRVAVVQYSGTGQQRPERAALQFLQNYTVLANTVDSMDFFNDATDVMDALGYVTRFYREASSNAAKKRLLLFSDGNSQGATPAAIEKAVQEAQRAGVEIFAVVVGRQVNEPHVRVLVTGKAAEYDVVFGERHLFRVPSYQALLRGVFYQTVSRKVALD

SEQ ID NO: 972 - protein, 136 aa, Bos taurus
MARTKQTARKSTGGKAPRKQLATKAARKSAPATGGVKKPHRYRPGTVALREIRRYQKSTELLIRKLPFQRLVREIAQDFKTDLRFQSSAVMALQEACEAYLVGLFEDTNLCAIHAKRVTIMPKDIQLARRIRGERA

SEQ ID NO: 973 - protein, 189 aa, Bos taurus
MASKRALVILAKGAEEMETVIPVDVMRRAGIKVTVAGLAGKDPVQCSRDVVICPDASLEDAKKEGPYDVVVLPGGNLGAQNLSESAAVKEILKEQEKRKGLIAAICAGPTALLAHEIGFGSKVTTHPLAKDKMMNGSHYSYSENRVEKDGLILTSRGPGTSFEFALKIVEVLVGKEVADQVKAPLVLKD

SEQ ID NO: 974 - protein, 224 aa, Bos taurus
MPGGLLLGDEAPNFEANTTIGRIRFHDYLGDSWGILFSHPRDFTPVCTTELGRAAKLAPEFAKRNVKMIALSIDSVEDHLAWSKDINAYNGEEPTEKLPFPIIDDKNRDLAIQLGMLDPAEKDEKGMPVTARVVFIFGPDKKLKLSILYPATTGRNFDEILRVIISLQLTAEKRVATPVDWKNGDSVMVLPTIPEEEAKKLFPKGVFTKELPSGKKYLRYTPQP

SEQ ID NO: 975 - protein, 255 aa, Bos taurus
MDDREDLVYQAKLAEQAERYDEMVESMKKVAGMDVELTVEERNLLSVAYKNVIGARRASWRIISSIEQKEENKGGEDKLKMIREYRQMVETELKLICCDILDVLDKHLIPAANTGESKVFYYKMKGDYHRYLAEFATGNDRKEAAENSLVAYKAASDIAMTELPPTHPIRLGLALNFSVFYYEILNSPDRACRLAKAAFDDAIAELDTLSEESYKDSTLIMQLLRDNLTLWTSDMQGDGEEQNKEALQDVEDENQ

SEQ ID NO: 976 - protein, 325 aa, Bos taurus
MFLQSRVSRLLAQLRAAGQLLGAPRPWPGPSPGATRTRSSACGPPASLSAHHPRARTSAGVGAWGAAAVGRRAGVRTWAPLAMAAKVDLSTSTDWKEAKSFLKGLSDKQREEHYFCRDFVRLKKIPTWKETAKGVTVKVEEPKYKKDKQLNEKISLFRGDITKLEVDAIVNAANSSLLGGGGVDGCIHRAAGPLLTDECRTLQNCETGKAKITCGYRLPAKYVIHTVGPIAHGEPSASQAAELRSCYLSSLDLLLEHRLRSAAFPCISTGVFGYPNEAAAEVVLTALREWLEQHKDKVDRLIICVFLEKDENIYRERLPHYFPVA

SEQ ID NO: 977 - protein, 480 aa, Bos taurus
MAASAVCRAAGAGTRVLLRTRRSPALLRSSDLRGTATYAQALQSVPETQVSQLDNGLRVASEQSSQPTCTVGVWIDAGSRYESEKNNGAGYFVEHLAFKGTKNRPGNALEKEVESMGAHLNAYSTREHTAYYIKALSKDLPKAVELLADIVQNCSLEDSQIEKERDVILQELQENDTSMRDVVFNYLHATAFQGTPLAQSVEGPSENVRKLSRADLTEYLSRHYKAPRMVLAAAGGLEHRQLLDLAQKHFSGLSGTYDEDAVPTLSPCRFTGSQICHREDGLPLAHVAIAVEGPGWAHPDNVALQVANAIIGHYDCTYGGGAHLSSPLASIAATNKLCQSFQTFNICYADTGLLGAHFVCDHMSIDDMMFVLQGQWMRLCTSATESEVLRGKNLLRNALVSHLDGTTPVCEDIGRSLLTYGRRIPLAEWESRIAEVDARVVREVCSKYFYDQCPAVAGFGPIEQLPDYNRIRSGMFWLRF

SEQ ID NO: 978 - protein, 493 aa, Bos taurus
PAMSAAPGLLHQELSCPLCLQLFDAPVTAECGHSFCRACLSRVAGEPAADGTVLCPSCQAPTRPQALSTNLQLARLVEGLAQVPQGHCEEHLDPLSIYCEQDRALVCGVCASLGSHRGHRLLPAAEAHARLKERLSSSIFICKKRMRDKKPGVGQNTWVLGEEEGFVWFVHAEEDIFIQLPTLRTRETLAALEGSLDREAERVRGEAGVALRRELGSLNSYLEQLRQMEKVLEEVADKPQTEFLMKYCLVTSSWTLSQEKALKKYCKPNPNRRALNQDDFKFQVWRKMFRALMPVAARQELTFDPSTAHPSLVLSNSGRCVECSEQKAPPAGEDPRQFDKAVAVVTHQLLSEGEHYWEVEVGDKPRWALGVIGAQAGRRGRLHAVPSQGLWLLGLRDGKILEAHVEAKEPRALRTPERRPTRIGIYLSFGDGVLSFYDASDPDALELLFAFHERLPGPVYPFFDVCWHDKGKNAQPLLLVGPEPPGPFRLGGP

SEQ ID NO: 979 - protein, 103 aa, Bos taurus [sequence omitted]

SEQ ID NO: 980 - protein, 106 aa, Bos taurus
MTTDQQAEARSYLSEEMIAEFKAAFDMFDADGGGDISVKELGTVMRMLGQTPTKEELDAIIEEVDEDGSGTIDFEEFLVMMVRQMKEDAKGKTEEELAECFRIFDR

SEQ ID NO: 981 - protein, 129 aa, Bos taurus
MSGRGKQGGKARAKAKSRSSRAGLQFPVGRVHRLLRKGNYAERVGAGAPVYMAAVLEYLTAEILELAGNAARDNKKTRIIPRHLQLAIRNDEELNKLLGKVTIAQGGVLPNIQAVLLPKKTESHKAKSK

SEQ ID NO: 982 - protein, 126 aa, Bos taurus
MPEPAKSAPAPKKGSKKAVTKAQKKDGKKRKRSRKESYSVYVYKVLKQVHPDTGISSKAMGIMNSFVNDIFERIAGEASRLAHYNKRSTITSREIQTAVRLLLPGELAKHAVSEGTKAVTKYTSSK

SEQ ID NO: 983 - protein, 199 aa, Bos taurus
MSSGNAKIGHRAPQFKATAVMPDGQFKDISLADYKGKYVVFFFYPLDFTFVCPTEIIAFSDRAEEFKKLNCQVIGASVDSHFCHLAWINTPKKQGGLGPMNIPLISDPKRTIAQDYGVLKADEGISFRGLFIIDDKGILRQITINDLPVGRSVDETLRLVQAFQFTDKHGEVCPAGWKPGSDTIKPDVQKSKEYFSKQK

SEQ ID NO: 984 - protein, 213 aa, Bos taurus
MAALAVSGLSQQVRCFSTSVVRPFAKLVRPPVQIYGIEGRYATALYSAASKQNKLEQVEKELLRVGQILKEPKMAASLLNPYVKRSVKVKSLSDMTAKEKFSPLTSNLINLLAENGRLTNTPAVISAFSTMMSVHRGEVPCTVTTASALDEATLTELKTVLKSFLSKGQVLKLEVKIDPSIMGGMIVRIGEKYVDMSAKTKIQKLSRAMREIL

SEQ ID NO: 985 - protein, 210 aa, Bos taurus
MPPYTIVYFPVQGRCEAMRMLLADQGQSWKEEVVAMQSWLQGPLKASCLYGQLPKFQDGDLTLYQSNAILRHLGRTLGLYGKDQQEAALVDMVNDGVEDLRCKYVSLIYTNYEAGKEDYVKALPQHLKPFETLLSQNKGGQAFIVGDQISFADYNLLDLLRIHQVLAPSCLDSFPLLSAYVARLNSRPKLKAFLASPEHMNRPINGNGKQ

SEQ ID NO: 986 - protein, 224 aa, Bos taurus
MAQKEEAAAAAEPASQNGEEVENLEDPEKLKELIELPPFEIVTGERLPAHYFKFQFRNVEYSSGRNKTFLCYVVEAQSKGGQVQASRGYLEDEHATNHAEEAFFNSIMPTFDPALRYMVTWYVSSSPCAACADRIVKTLNKTKNLRLLILVGRLFMWEEPEIQAALRKLKEAGCRLRIMKPQDFEYIWQNFVEQEEGESKAFEPWEDIQENFLYYEEKLADILK

SEQ ID NO: 987 - protein, 234 aa, Bos taurus
MSNYSVSLVGPAPWGFRLQGGKDFNMPLTISSLKDGGKASQANVRIGDVVLSIDGISAHGMTHLEAQNKIKGCTGSLNMTLQRASATPKLEPVPVQKPTVTSVCAETAQELAEGQRRGSQGDSKQQNGKIPPKRPPRKHIMDRNTEFYHIPTHSDASKKRLIEDTEDWRPRTGTTQSRSFRILAQITGTEHLKESEADNTKKAKEKIPLHVFSPKYTKLRDWHHEVSARALNVQ

SEQ ID NO: 988 - protein, 274 aa, Bos taurus
MLSVAARSGPFAPVLSATSRGVAGALRPLVQAAVPATSESPVLDLKRSVLCRESLRGQAAGRPLVASVSLNVPASVRYSHTDIKVPDFSDYRRPEVLDSTKSSKESSEARKGFSYLVTATTTVGVAYAAKNVVSQFVSSMSASADVLAMSKIEIKLSDIPEGKNMAFKWRGKPLFVRHRTKKEIDQEAAVEVSQLRDPQHDLERVKKPEWVILIGVCTHLGCVPIANAGDFGGYYCPCHGSHYDASGRIRKGPAPLNLEVPSYEFTSDDMVIVG

SEQ ID NO: 989 - protein, 280 aa, Bos taurus; identical to SEQ ID NO: 608

SEQ ID NO: 990 - protein, 316 aa, Bos taurus
MPQNVVLPGPAPWGFRLSGGIDFNQPLVITRITPGSKAAAANLCPGDVILAIDGFGTESMTHADAQDRIKAAGHQLCLKIDRAEARLWSPQVTEDGKAHPFKINLESEPQEFKPIGAAHNRRAQPFVAAANIDDKRQVVSASYNSPIGLYSTSNIQDALHGQLRGLIPSSPQNEPTASVPPESDVYRMLHDNRNEPTQPRQSGSFRVLQELVNDGADDRPAGTRSVRAPVTKVHGGAGGTQKMPFCDKCGSGIVGAVVKARDKYRHPECFVCADCNLNLKQKGYFFVEGELYCETHARARMRPPEGYDTVTLYPKA

SEQ ID NO: 991 - protein, 339 aa, Bos taurus; identical to SEQ ID NO: 727

SEQ ID NO: 992 - protein, 453 aa, Bos taurus
MKLLTRAGSLSRFYSLKVAPKVKATEAPAGVPPHPQDLEFTRLPNGLVIASLENYAPASRIGLFIKAGSRYENSNNLGTSHLLRLASSLTTKGASSFKITRGIEAVGGKLSVTSTRENMAYTVECLRDDVDILMEFLLNVTTAPEFRRWEVAALQPQLRIDKAVALQNPQAHVIENLHAAAYRNALANSLYCPDYRIGKVTPVELHDYVQNHFTSARMALIGLGVSHPVLKQVAEQFLNIRGGLGLSGAKAKYHGGEIREQNGDSLVHAALVAESAAIGSAEANAFSVLQHVLGAGPHVKRGSNATSSLYQAVAKGVHQPFDVSAFNASYSDSGLFGFYTISQAASAGDVIKAAYNQVKTIAQGNLSNPDVQAAKNKLKAGYLMSVESSEGFLDEVGSQALAAGSYTPPSTVLQQIDAVADADVINAAKKFVSGRKSMAASGNLGHTPFIDEL

SEQ ID NO: 993 - protein, 455 aa, Bos taurus
MLSRSRCASRAFSRSLSAFQKGNCPLVRRSLPGISLCQGPGYPDSRKTVINSSNIFSVRFFRTTAVCKDDVITVKTPAFAESVTEGDVRWEKAVGDTVAEDEVVCEIETDKTSVQVPSPANGVIEALLVPDGGKVEGGTPLFTLRKTGAAPAKAKPAAAPAAAAPKAEPTVSAVPPPPAAPIPTQMPPVPSPSQPLTSKPVSAVKPTAAPPRAEAGAGVGLRSEHREKMNRMRQRIAQRLKEAQNTCAMLTTFNEIDMSNIQEMRARHKDAFLKKHNLKLGFMSAFVKASAFALQEQPVVNAVIDDATKEVVYRDYIDISVAVATPRGLVVPVIRNVETMNYADIERTISELGEKARKNELAIEDMDGGTFTISNGGVFGSLFGTPIINPPQSAILGMHAIVDRPVVIGGKVEVRPMMYVALTYDHRLIDGREAVTFLRKIKAAVEDPRVLLLDL

SEQ ID NO: 994 - protein, 463 aa, Bos taurus
MGKEKTHINIVVIGHVDSGKSTTTGHLIYKCGGIDKRTIEKFEKEAAEMGKGSFKYAWVLDKLKAERERGITIDISLWKFETTKYYITIIDAPGHRDFIKNMITGTSQADCAVLIVAAGVGEFEAGISKNGQTREHALLAYTLGVKQLIVGVNKMDSTEPAYSEKRYDEIVKEVSAYIKKIGYNPATVPFVPISGWHGDNMLEPSPNMPWFKGWKVERKEGNASGVSLLEALDTILPPTRPTDKPLRLPLQDVYKIGGIGTVPVGRVETGILRPGMVVTFAPVNITTEVKSVEMHHEALSEALPGDNVGFNVKNVSVKDIRRGNVCGDSKSDPPQEAAQFTSQVIILNHPGQISAGYSPVIDCHTAHIACKFAELKEKIDRRSGKKLEDNPKSLKSGDAAIVEMVPGKPMCVESFSQYPPLGRFAVRDMRQTVAVGVIKNVEKKSGGAGKVTKSAQKAQKAGK

SEQ ID NO: 995 - protein, 466 aa, Bos taurus
MALLTAAARLFGAKNASCLVLAARHASASSTNLKDILADLIPKEQTRVKAFRQQHGKTVVGQITVDMMYGGMRGMKGLVYETSVLDPDEGIRFRGYSIPECQKLLPKAKGGEEPLPEGLFWLLVTGQIPTEEQVSWLSQEWAKRAALPSHVVTMLDNFPTNLHPMSQLSAAVTALNSESTFARAYSEGINRTKYWELIYEDSMDLIAKLPCVAAKIYRNLYREGSSIGAIDPKLDWSHNFTNMLGYTDAQFTELMRLYLTIHSDHEGGNVSAHTSHLVGSALSDPYLSFAAAMNGLAGPLHGLANQEVLVWLTQLQKEVGKDVSDEKLRDYIWNTLNSGRVVPGYGHAVLRKTDPRYTCQREFALKHLPQDPMFKLVAQLYKIVPNILLEQGKAKNPWPNVDAHSGVLLQYYGMTEMNYYTVLFGVSRALGVLAQLIWSRALGFPLERPKSMSTDGLMKFVDSKSG

SEQ ID NO: 996 - protein, 647 aa, Bos taurus
MWRVCARRAQNAAPRAGFGARWTAFREEPGAPCVTPQAGSALARCSSKTPGYGRVRALCGWSPVSRATPRNRVLLQLWGSPSRRWYSLPPHQKVPLPSLSPTMQAGTIARWEKKEGEKINEGELIAEVETDKATVGFESVEECYMAKILVAEGTRDVPVGAIICITVDKPEDVEAFKNYTLDSSAAPAPPAAPAPTPAAPAPSPTPSAQAPGSSYPTHMQVLLPALSPTMTMGTVQRWEKKVGEKLNEGDLLAEIETDKATIGFEVQEEGYLAKILIPEGTRDVPLGTPLCIIVEKEADIPAFADYRPAEVTDLKPPAPPPIPSPAAPVPPAPQPVAPPPSAPRPAAPAGPKGRVFVSPLAKKLAAEKGIDLTQVKGTGPDGRIIKKDIDSFVPTKAAPTPAAAVPPPSPGVAPVPTGVFTDIPISNIRRVIAQRLMQSKQTIPHYYLSIDVNMGEVLLVRKELNKMLEGKSKISVNDFIIKASALACLKVPEANSSWMDTVIRQNHVVDISVAVSTPAGLITPIVFNAHIKGLETIANDVVSLATKAREGKLQPHEFQGGTFTISNLGMFGIKNFSAIINPPQACILAIGASEDRLVPADNEKGFDVASMMSVTLSCDHRVVDGAVGAQWLAEFRKYLEKPITMLL

SEQ ID NO: 997 - protein, 673 aa, Bos taurus
MAKPAQGAKYRGSIRDFPDFNPSQDAETLYNAMKGFGSDKEAILELITSRSNRQRQEICQNYKSLYGKDLIADLKYELTGKFERLIVGLMRPPAYADAKEIKDAISGIGTDEKCLIEILASRTNEQIHQLVAAYKDAYERDLEADITGDTSGHFRKMLVVLLQGTREEDDVVSEDLVQQDVQDLYEAGELKWGTDEAQFIYILGNRSKQHLRLVFDEYLKTTGKPIEASIRGELSGDFEKLMLAVVKCIRSTAEYFAERLFKAMKGLGTRDNTLIRIMVSRSELDMLDIREIFRTKYEKSLYSMIKNDTSGEYKKTLLKLCGGDDDAAGQFFPEAAQVAYQMWELSAVARVELKGTVRPAGDFNPDADAKALRKAMKGLGTDEDTIIDIIAHRSNAQRQQIRQTFKSHFGRDLMADLKSELSGDLARLILGLMMPPAHYDAKQLKKAMEGAGTDEKALIEILATRTNAEIQAINKAYKEDYHKSLEDALSSDTSGHFKRILISLATGNREEGGEDRERAREDAQVAAEILEIADTTSGDKSSLETRFMMILCTRSYPHLRRVFQEFIKMTNYDVEHTIKKEMSGDVRDVFVAIVQSVKNKPLFFADKLYKSMKGAGTDEKTLTRIMVSRSEIDLLNIRREFIEKYDKSLHQAIEGDTSGHFLKALLAICGGED

SEQ ID NO: 998 - protein, 780 aa, Bos taurus
MAPYSLLVSRLQKALGARQYHVASVLCQRAKVAMSHFEPNEYIRYDLLEKNINIVRKRLNRPLTLSEKIVYGHLDDPANQEIERGKTYLRLRPDRVAMQDATAQMAMLQFISSGLPKVAVPSTIHCDHLIEAQLGGEKDLRRAKDINQEVYNFLATAGAKYGVGFWRPGSGIIHQIILENYAYPGVLLIGTDSHTPNGGGLGGICIGVGGADAVDVMAGIPWELKCPKVIGVKLTGSLSGWTSPKDVILKVAGILTVKGGTGAIVEYHGPGVDSISCTGMATICNMGAEIGATTSVFPYNHRMKKYLSKTGRADIANLADEFKDHLVPDSGCHYDQLIEINLSELKPHINGPFTPDLAHPVAEVGSVAEKEGWPLDIRVGLIGSCTNSSYEDMGRSAAVAKQALAHGLQCKSQFTITPGSEQIRATIERDGYAQILRDVGGIVLANACGPCIGQWDRKDIKKGEKNTIVTSYNRNFTGRNDANPETHAFVTSPEIVTALAIAGTLKFNPETDFLTGKDGKKFKLEAPDADELPRAEFDPGQDTYQHPPKDSSGQQVDVSPTSQRLQLLEPFDKWDGRDLEDLQILIKVKGKCTTDHISAAGPWLKFRGHLDNISNNLLIGAINVENGKANSVRNAVTQEFGPVPDTARYYKKHGIRWVVIGDENYGEGSSREHAALEPRHLGGRAIITKSFARIHETNLKKQGLLPLTFADPADYNKIHPVDKLTIKGLKDFAPGKPLTCIIKHPNGTQETILLNHTFNETQIEWFRAGSALNRMKELQK

SEQ ID NO: 999 - protein, 733 aa, Bos taurus
MPEETQAQDQPMEEEEVETFAFQAEIAQLMSLIINTFYSNKEIFLRELISNSSDALDKIRYESLTDPSKLDSGKELHINLIPNKQDRTLTIVDTGIGMTKADLINNLGTIAKSGTKAFMEALQAGADISMIGQFGVGFYSAYLVAEKVTVITKHNDDEQYAWESSAGGSFTVRTDTGEPMGRGTKVILHLKEDQTEYLEERRIKEIVKKHSQFIGYPITLFVEKERDKEVSDDEAEEKEDKEEEKEKEEKESDDKPEIEDVGSDEEEEEKKDGDKKKKKKIKEKYIDQEELNKTKPIWTRNPDDITNEEYGEFYKSLTNDWEDHLAVKHFSVEGQLEFRALLFVPRRAPFDLFENRKKKNNIKLYVRRVFIMDNCEELIPEYLNFIRGVVDSEDLPLNISREMLQQSKILKVIRKNLVKKCLELFTELAEDKENYKKFYEQFSKNIKLGIHEDSQNRKKLSELLRYYTSASGDEMVSLKDYCTRMKENQKHIYYITGETKDQVANSAFVERLRKHGLEVIYMIEPIDEYCVQQLKEFEGKTLVSVTKEGLELPEDEEEKKKQEEKKTKFENLCKIMKDILEKKVEKVVVSNRLVTSPCCIVTSTYGWTANMERIMKAQALRDNSTMGYMAAKKHLEINPDHSIIETLRQKAEADKNDKSVKDLVILLYETALLSSGFSLEDPQTHANRIYRMIKLGLGIDEDDPTADDSSAAVTEEMPPLEGDDDTSRMEEVD

SEQ ID NO: 1000 - protein, 1442 aa, Bos taurus
MTLPHSPGGVGEPRPPQAMQVHRREHRREEEQKEERQHSLQMDSSMRKRTFRSRGSEEEYQFSAADYALAAALALTASSETTWEAQLRRQTSTVELEERGQKRVGFGNDWERTEIAFLRTQWLLRQRRDRKALRRRTEEKVREAKELRELCSGRGPWFWIPLRSHAVWEHTTVLLTCTVQGSPPPQVTWYKNDVRIDPRLFPAGKYRITNNYGLLTLEIRRCTIEDAATYTVKVKNAYGQASSFAKVLVRTYLGKDAGFDSEMFKRLMFGPSVDFTSVLKPVFAREKETFSLKCLFSEDVLDAEQNIQWFRDGRLLRSSGRRQILYADRQAVLKVACAYKEDEGLYTVQVPSPFGLQEQSAYVFVRDAAAEKPGVPGSPLNVRCLNVNRDCLILTWTPPSDTRGNPITGYSIELCQGESEEWVPCHQAPGGTCRCPIQGLIEGQSYRFRVRAINRAGSSVPSKASEPVVMGDRDEAQRKTEIPFDMGKSITVSTDDFDDFVTIPSPPTNVHGSEIREAYVVLAWEEPRPRGKAPLTYFLEKSVIGSGTWEAVNSEAPVKSPRFALLDLEKGKSYVFRVRAINQYGMSDPSEPSEPIALRGKPATLPPPTQVQAFRDTQTSVSLTWDPVKDSPELLGYYIYSREAGSSEWRTVNNKPIQGSRFTIPGLRTGKEYEFCIRSVSEAGVGESSAVTEPIRVKQALATPSAPYDFALLNCGKNEMVIGWKPPKRRGGGKILGYFLDQHDSEELDWHEVNQQPVPTQICKVSNLHEGHFYEFRARAVNWAGVGELSAPSKLFECKEWTMPQPGPPYDLRVSEVRATSLMLAWEPPLYRGAGPVTGYRISVQEEGSEQWKPVTPDLISDTHLRISDLQPGKTYMFQVQAVNSAGPGQPSMPTDPVLLEDKPDAREIEVGVDDEGFIYMAFEAPEAPDSAEFQWSKDYKGPPDPERVKVEEEANKSKIILKDPGLEDLGTYSVVVTDADEDISASHTLTEDELNKLKKLSHEIRNPVIKLISGWNVEILEQGEVRLWLEVEKLSPAAELHLIFNEKEIFSSPNRKINFVREKGLVEVIIQHLTEDDKGSYTAQLQDGKAKNQITLALVDDEFDKLLRAADAKRRDWKRKQGPYFVEPLQWKVTDDCQVLLTCKVTNTKKETRFQWFFQKREFPAGQYDPQTGAGLLCIEELSKEDQGVYRAQVSDDRGEDDTILDLRDEALDAIFTELGRIGALSATPLKRSGVRDSARGRVANRDSARAQALMNDEWMSGEKRLESGDRVRAGTTLDEIWLHILDPKDSDKGKYILEITAGKEVRQLSADLSGQAFEDAMAEHQRLKALAIIEKNRAKVVRGLPDVATIMEDKTLCLTCVVSGDPAPEIYWLKNDQPVTFLDRYHMDVKGTEVTITIERVNSEDSGRYGVFVKNKYGSETGQVTISVFKHGEEEKVLKM

SEQ ID NO: 1001 - protein, 705 aa, Gallus gallus
MKLILCTVLSLGIAAVCFAAPPKSVIRWCTISSPEEKKCNNLRDLTQQERISLTCVQKATYLDCIKAIANNEADAISLDGGQAFEAGLAPYKLKPIAAEVYEHTEGSTTSYYAVAVVKKGTEFTVNDLQGKTSCHTGLGRSAGWNIPIGTLLHRGAIEWEGIESGSVEQAVAKFFSASCVPGATIEQKLCRQCKGDPKTKCARNAPYSGYSGAFHCLKDGKGDVAFVKHTTVNENAPDQKDEYELLCLDGSRQPVDNYKTCNWARVAAHAVVARDDNKVEDIWSFLSKAQSDFGVDTKSDFHLFGPPGKKDPVLKDLLFKDSAIMLKRVPSLMDSQLYLGFEYYSAIQSMRKDQLTPSPRENRIQWCAVGKDEKSKCDRWSVVSNGDVECTVVDETKDCIIKIMKGEADAVALDGGLVYTAGVCGLVPVMAERYDDESQCSKTDERPASYFAVAVARKDSNVNWNNLKGKKSCHTAVGRTAGWVIPMGLIHNRTGTCNFDEYFSEGCAPGSPPNSRLCQLCQGSGGIPPEKCVASSHEKYFGYTGALRCLVEKGDVAFIQHSTVEENTGGKNKADWAKNLQMDDFELLCTDGRRANVMDYRECNLAEVPTHAVVVRPEKANKIRDLLERQEKRFGVNGSEKSKFMMFESQNKDLLFKDLTKCLFKVREGTTYKEFLGDKFYTVISSLKTCNPSDILQMCSFLEGK

SEQ ID NO: 1002 - protein, 703 aa, Gallus gallus
MKLILCTVLSLGIAAVCFAAPPKSVIRWCTISSPEEKKCNNLRDLTQQERISLTCVQKATYLDCIKAIANNEADAISLDGGQVFEAGLAPYKLKPIAAEVYEHTEGSTTSYYAVAVVKKGTEFTVNDLQGKTSCHTGLGRSAGWNIPIGTLIHRGAIEWEGIESGSVEQAVAKFFSASCVPEWELSSSILPRLRTTMSVRCWFFNISPASSTHSCLKDGKGDVAFVKHTTVNENAPDQKDEYELLCLDGSRQPVDNYKTCNWARVAAHAVVARDDNKVEDIWSFLSKAQSDFGVDTKSDFHLFGPPGKKDPVLKDLLFKDSAIMLKRVPSLMDSQLYLGFEYYSAIQSMRKDQLTPSPRENRIQWCAVGKDEKSKCDRWSVVSNGDVECTVVDETKDCIIKIMKGEADAVALDGGLVYTAGVCGLVPVMAERYDDESQCSKTDERPASYFAVAVARKDSNVNWNNLKGKKSCHTAVGRTAGWVIPMGLIHNRTGTCNFGESGRTGCSFHSNLLSAFSTLCQGSGIPPERCVASSHEKYFGYTGALRCLVEKGDVAFVQHSTVEENTGGKNKADWAKNLQMDDFELLCTDGRRANVMDYRECNLAEVPTHAVVVRPEKANKIRDLLERQEKRFGVNGSEKSKFMMFESQNKDLLFKDLTKCLFKVREGTTYKEFLGDKFYTVISSLKTCNPSDILQMCSFLEGK

SEQ ID NO: 1003 - protein, 2108 aa, Gallus gallus
MEIKKERSFWIFCLIWSFCKGKEPVQIVQVSTVGRSECTTWGNFHFHTFDHVKFTFPGTCTYVFASHCNDSYQDFNIKIRRSDKNSHLIYFTVTTDGVILEVKETGITVNGNQIPLPFSLKSILIEDTCAYFQVTSKLGLTLKWNWADTLLLDLEETYKEKICGLCGNYDGNKKNDLILDGYKMHPRQFGNFHKVEDPSEKCPDVRPDDHTGRHPTEDDNRCSKYKKMCKKLLSRFGNCPKVVAFDDYVATCTEDMCNCVVNSSHSDLVSSCICSTLNQYSRDCVLSKGDPGEWRTKELCYQECPSNMEYMECGNSCADTCADPERSKICKAPCTDGCFCPPGTILDDLGGKKCVPRDSCPCMFQGKVYSSGGTYSTPCQNCTCKGGHWSCTSLPCSGSCSIDGGFHITTFDNKKFNFHGNCHYVLAKNTDDTFVVIGEIIQCGTSKTMTCLKNVLVTLGRTTIKICSCGSIYMNNFIVKLPVSKDGITIFRPSTFFIKILSSTGVQIRVQMKPVMQLSITVDHSYQNRTSGLCGNFNNIQTDDFRTATGAVEDSAAAFGNSWKTRASCFDVEDSFEDPCSNSVDKEKFAQHWCALLSNISSTFAACHSVVDPSVYIKRCMYDTCNAEKSEVALCSVLSTYSRDCAAAGMTLKGWRQGICDPSEECPETMVYNYSVKYCNQSCRSLDEPDPLCKVQIAPMEGCGCPEGTYLNDEEECVTPDDCPCYYKGKIVQPGNSFQEDKLLCKCIQGRLDCIGETVLVKDCPAPMYYFNCSSAGPGAIGSECQKSCKTQDMHCYVTECVSGCMCPDGLVLDGSGGCIPKDQCPCVHGGHFYKPGETIRVDCNTCTCNKRQWNCTDSPCKGTCTVYGNGHYMSFDGEKFDFLGDCDYILAQDFCPNNMDAGTFRIVIQNNACGKSLSICSLKITLIFESSEIRLLEGRIQEIATDPGAEKNYKVDLRGGYIVIETTQGMSFMWDQKTTVVVHVTPSFQGKVCGLCGDFDGRSRNDFTTRGQSVEMSIQEFGNSWKITSTCSNINMTDLCADQPFKSALGQKHCSIIKSSVFEACHSKVNPIPYYESCVSDFCGCDSVGDCECFCTSVAAYARSCSTAGVCINWRTPAICPVFCDYYNPPDKHEWFYKPCGAPCLKTCRNPQGKCGNILYSLEGCYPECSPDKPYFDEERRECVSLPDCTSCNPEEKLCTEDSKDCLCCYNGKTYPLNETIYSQTEGTKCGNAFCGPNGMIIETFIPCSTLSVPAQEQLMQPVTSAPLLSTEATPCFCTDNGQLIQMGENVSLPMNISGHCAYSICNASCQIELIWAECKVVQTEALETCEPNSEACPPTAAPNATSLVPATALAPMSDCLGLIPPRKFNESWDFGNCQIATCLGEENNIKLSSITCPPQQLKLCVNGFPFMKHHDETGCCEVFECQCICSGWGNEHYVTFDGTYYHFKENCTYVLVELIQPSSEKFWIHIDNYYCGAADGAICSMSLLIFHSNSLVILTQAKEHGKGTNLVLFNDKKVVPDISKNGIRITSSGLYIIVEIPELEVYVSYSRLAFYIKLPFGKYYNNTMGLCGTCTNQKSDDARKRNGEVTDSFKEMALDWKAPVSTNRYCNPGISEPVKIENYQHCEPSELCKIIWNLTECHRVVPPQPYYEACVASRCSQQHPSTECQSMQTYAALCGLHGICVDWRGQTNGQCEATCARDQVYKPCGEAKRNTCFSREVIVDTLLSRNNTPVFVEGCYCPDGNILLNEHDGICVSVCGCTAQDGSVKKPREAWEHDCQYCTCDEETLNISCFPRPCAKSPPINCTKEGFVRKIKPRLDDPCCTETVCECDIKTCIINKTACDLGFQPVVAISEDGCCPIFSCIPKGVCVSEGVEFKPGAVVPKSSCEDCVCTDEQDAVTGTNRIQCVPVKCQTTCQQGFRYVEKEGQCCSQCQQVACVANFPFGSVTIEVGKSYKAPYDNCTQYTCTESGGQFSLTSTVKVCLPFEESNCVPGTVDVTSDGCCKTCIDLPHKCKRSMKEQYIVHKHCKSAAPVPVPFCEGTCSTYSVYSFENNEMEHKCICCHEKKSHVEKVELVCSEHKTLKFSYVHVDECGCVETKCPMRRT

SEQ ID NO: 1004 - protein, 388 aa, Gallus gallus
MDSISVTNAKFCFDVFNEMKVHHVNENILYCPLSILTALAMVYLGARGNTESQMKKVLHFDSITGAGSTTDSQCGSSEYVHNLFKELLSEITRPNATYSLEIADKLYVDKTFSVLPEYLSCARKFYTGGVEEVNFKTAAEEARQLINSWVEKETNGQIKDLLVSSSIDFGTTMVFINTIYFKGIWKIAFNTEDTREMPFSMTKEESKPVQMMCMNNSFNVATLPAEKMKILELPYASGDLSMLVLLPDEVSGLERIEKTINFDKLREWTSTNAMAKKSMKVYLPRMKIEEKYNLTSILMALGMTDLFSRSANLTGISSVDNLMISDAVHGVFMEVNEEGTEATGSTGAIGNIKHSLELEEFRADHPFLFFIRYNPTNAILFFGRYWSP

SEQ ID NO: 1005 - protein, 147 aa, Gallus gallus; identical to SEQ ID NO: 814

SEQ ID NO: 1006 - protein, 210 aa, Gallus gallus
MAMAGVFVLFSFVLCGFLPDAAFGAEVDCSRFPNATDKEGKDVLVCNKDLRPICGTDGVTYTNDCLLCAYSIEFGTNISKEHDGECKETVPMNCSSYANTTSEDGKVMVLCNRAFNPVCGTDGVTYDNECLLCAHKVEQGASVDKRHDGGCRKELAAVSVDCSEYPKPDCTAEDRPLCGSDNKTYGNKCNFCNAVVESNGTLTLSHFGKC

SEQ ID NO: 1007 - protein, 472 aa, Gallus gallus
MRTARQFVQVALALCCFADIAFGIEVNCSLYASGIGKDGTSWVACPRNLKPVCGTDGSTYSNECGICLYNREHGANVEKEYDGECRPKHVTIDCSPYLQVVRDGNTMVACPRILKPVCGSDSFTYDNECGICAYNAEHHTNISKLHDGECKLEIGSVDCSKYPSTVSKDGRTLVACPRILSPVCGTDGFTYDNECGICAHNAEQRTHVSKKHDGKCRQEIPEIDCDQYPTRKTTGGKLLVRCPRILLPVCGTDGFTYDNECGICAHNAQHGTEVKKSHDGRCKERSTPLDCTQYLSNTQNGEAITACPFILQEVCGTDGVTYSNDCSLCAHNIELGTSVAKKHDGRCREEVPELDCSKYKTSTLKDGRQVVACTMIYDPVCATNGVTYASECTLCAHNLEQRTNLGKRKNGRCEEDITKEHCREFQKVSPICTMEYVPHCGSDGVTYSNRCFFCNAYVQSNRTLNLVSMAAC

SEQ ID NO: 1008 - protein, 1454 aa, Gallus gallus
MWLKFILAILLLHAAAGKEPEPQYVLMVPAVLQSDSPSQVCLQFFNLNQTISVRVVLEYDTINTTIFEKNTTTSNGLQCLNFMIPPVTSVSLAFVSFTAKGTTFDLKERRSVMIWNMESFVFVQTDKPIYKPGQSVMFRVVALDFNFKPVQEMYPLIAVQDPQNNRIFQWQNVTSEINIVQIEFPLTEEPILGNYKIIVTKKSGERTSHSFLVEEYVLPKFDVTVTAPGSLTVMDSELTVKICAVYTYGQPVEGKVQLSVCRDFDSYGRCKKSPVCQSFTKDLDTDGCLSHILSSKVFELNRIGYKRNLDVKAIVTEKGTGLQLTATQSISITQVMSSLQFENVDHHYRRGIPYFGQIKLVDKDNSPISNKVIQLFVNNKNTHNFTTDINGIAPFSIDTSKIFDPELSLKALYKTSDQCHSEGWIEPSYPDASLSVQRLYSWTSSFVRIEPLWKDMSCGQKRMITVYYILNTEGYEHINIVNFYYVGMAKGKIVLTGEIKVNIQADQNGTFMIPLVVNEKMAPALRLLVYMLHPAKELVADSVRFSIEKCFKNKVQLQFSEKQMLTTSNVSLVIEAAANSFCAVRAVDKSMLLLKSETELSAETIYNLHPIQDLQGYIFNGLNLEDDPQDPCVSSDDIFHKGLYYRPLTSGLGPDVYQFLRDMGMKFFTNSKIRQPIVCTRETVRPPSYFLNAGFTASTHHVKLSAEVAREERGKRHILETIREFFPETWIWDIILINSTGKASVSYTIPDTITEWKASAFCVEELAGFGMSVPATLTAFQPFFVDLTLPYSIIHGEDFLLRANVFNYLNHCIKINVLLLESLDYQAKLISPEDDGCVCAKIRKSYVWNIFPKGTGDVLFSITAETNDDEACEEEALRNIRIDYRDTQIRALLVEPEGIRREETQNFLICMKDDVISQDVAIDLPTNVVEGSPRPSFSVVGDIMGTAIQNVHQLLQMPFGNGEQNMVLFAPNIYVLDYLDKTRQLSEDMKSKTIGYLVSGYQKQLSYKHPDGSYSTFGIRDKEGNTWLTAFVYKSFAEASRFIYIDDNVQAQTLIWLARKQKTDGCFQSTGILVNNAMKGGVENELSLSAYITIALLEAGHSVSHTVIRNAFYCLETASEKNITDIYTQALVAYAFCLAGKAEICESFLRELQKSAKEVDGSKYWEQNQRSAPEKSHLLDHVQSTDVEITSYVLLALLYKPNRSQEDLTKASAIVQWIIRQQNSYGGFASMQDTVVALQALAAYGAATYNSVTQNVIKINSKNTFEKVFTVNNENRLLLQQTPLPQVPGKYSLTVNGTGCVLIQTALRYNIHLPEGAFGFSLSVQTSNASCPRDQPGKFDIVLISSYTGKRSSSNMVIIDVKMLSGFVPVKSSLDQLIDDHTVMQVEYKKNHVLLYLGNILQKRRKEVTFSVEQDFVVTHPKPAPVQIYDYYETEEYAVAEYMSLCRGVVEEMG

SEQ ID NO: 1009 - protein, 935 aa, Gallus gallus
LKGFFSIPVTFSSVYAPTSTLIVYVIFPNGKTIADSAVFSVSMCFRNKAELSFSVPKILPGSEVNLHLQAAPGSTCAVWAVDQTVFLLKPEKELSHSMIYGLFPSIPSTYSGYPHQVSEDDNSCGFQNSDQPDVFTAFRGEVSSASVLFFFFFFLQEMGLKIMSNTNIRKPRLCLTTQSTTMMQERAGHLMTSTYQPTMFSPVSSPEEKVHKYFTKTWLWDLYSVGPSGKQTVTVTVPNTITGWKAGMFCTGHNGFGLAPTSSLLVFKPFSVELTLPSSVIQGETFILKATVLSYLQQCMKIQVTMEEFPQFQLKSCEGCVYSSCLCAGEVKTFLWSVTAERLGFTNITLSTEAIATKELCGKEIPFVPNQGQKDTITKLLLVRPEGVLIEKAHSSILCPKKGSPAEESVSLTLPPNTVEGSVRATVSVTGDLMGTALQNLDHLVQMPHGCGEQNMVLFAPIVYMLQYLEKTRQLTPEIKERATGFLRNGYQIQLQYQHPDGSFSEFGTKDEYGNTWLTAFVVKCFAQAKPYIFLDDRSIQAAFNWLEFHQLPNGCFRDVGQLFHTAMKGGMDGEVLLAAYITAAYMERGDTPESTVVRKALGCIIPSLPKATSTYTQALLAYTFALAKDPQRTQELLDILDEKAIRAGGQIHWSQTPSKAHSTSLWSQPLSVDVELTAYVLLALLSKPNVTEADFTIASGIVAWLTRQQNAYGGFASTQDTVVALQALAKYAALTHNTKGVAEVRVRSQRGSGRKFQVSYHNRLLVQEMALREIPGKFSVQAHGSCCVFTRTVLRYNIPFPQVSKSFALQVKTKPDNCTEDDAYSVTLYVNVRYTGKRAISNMVIVEVSLLSGFVLAARSGMSVRGLEYPVRRTEKTQAGVAIYLDKLSHVSETYVLHLEREIEVTNLKPGQVRVYDYYHPEEQALADYNVSCI

SEQ ID NO: 1010 - protein, 232 aa, Gallus gallus
QIKDLLVSSSTDLDTTLVLVNAIYFKGMWKTAFNAEDTREMPFHVTKQESKPVQMMCMNNSFNVATLPAEKMKILELPFASGDLSMLVLLPDEVSDLERIEKTINFEKLTEWTNPNTMEKRRVKVYLPQMKIEEKYNLTSVLMALGMTDLFIPSANLTGISSAESLKISQAVHGAFMELSEDGIEMAGSTGVIEDIKHSPESEQFRADHPFLFLIKHNPTNTIVYFGRYWSP

SEQ ID NO: 1011 - protein, 203 aa, Gallus gallus
MEKALHFDSIAGLGGSTQTKCGKSVNIHLLFKELLSDITASKANYSLRIANRLYAEKSRPILPIYLKCVKKLYRAGLETVNFKTASDQARQLINSWVEKQTEGQIKDLLVSSSTDLDTTLVLVNAIYFKGMWKTAFNAEDTREMPFHVTKEESKPVQMMCMNNSFNVATLPAEKMKILELPFASGDLSMLVLLPDEVSGLERI

SEQ ID NO: 1012 - protein, 426 aa, Gallus gallus
PPTLPTELSAAGSKYIDTEVENAINGVKQMKTLMDKTSKEHQAMLHTLEETKRRKEEAVKLALEKEKQLAEKQEVCNETMLSLWEECKPCLKHTCMRVYSKICHSGSGLVGRQLEELLNRSSPFSIWVNGERIDALLDREQRQERRFEDLEERFGLMEDGVEDIFQDSTQLYGPAFPFFRTPPFGGFREAFVPPVQRVRLVPPRRRLSRELHPFLQHPVHGFHRLFEMTQRMLDGGHGAWDHLLGGFESESRNFSTDRMVCREIRRNSAGCLRMRDECEKCREILAVDCSQTDPVQSQLREQFEDALRLAERFTRRYDDLLSAFQAEMLNTSSLLDQLNRQFGWVSRLGNLTQGTDGFLQVTTVFSKTPNLEDPSAPADTQVTVQLFDSEPLSLTVPGDISWDDPRFMEIVAEQALQHFKQNNTIE

SEQ ID NO: 1013 - protein, 405 aa, Gallus gallus
MGALLALLDPVQPTRAPDCGGILTPLGLSYLAEVSKPHAEVVLRQDLPKEPQTCSLAPWSPAGDRNRITSVKVADLWLSVVPEAGLRLGIEVELRVAPLHAVPMPVRISIRADLHVDMGPDGNLQLLTSACRPTVQAQSTREAESKSSRSILDKVVDVDKLCLDVSKLLLFPNEQLMSLTALFPVTPNCQLQYLPLAAPVFSKQGIALSLQTTFQVAGAVVPVPVSPVPFSMPELASTSTSHLILALSEHFYTSLYFTLETAALGPGTPSSVLPFAGQRQCHCQLGGLWLQGAAGRHCPVCEPLPVTKHSCLWKTAELSCWATAVLPDAELSLAASNVGLVRAALLEELFLAPVCQQVPAWMDDVLREGVHLPHLSHFTYTDVNVVVHKDYVLVPCKLKLRSTMA

SEQ ID NO: 1014 - protein, 114 aa, Gallus gallus
NETCVVKNSSKIHVFRHNSTLTHEDGQVVSMAELIHSDKDLFILKHFKDNHVGLSLSARTAEVTKEQLEEFEAQLRCHGFKLEEAFITSPKDACPAAGEETGEGSAATAEPQLG

SEQ ID NO: 1015 - protein, 440 aa, Gallus gallus
MGALLALLDPVQPTRAPDCGGILTPLGLSYLAEVSKPHAEVVLRQDLMPKEPQTCSLAPWSPAGTELPAVKVADLWLSVIPEAGLRLGIEVELRIAPLHTVPMPVRISIRADLHVDMGPDGNLQLLTSACRPTVQAQSTREAESKSSRSILDKVVDVDKLCLDVSKLLLFPNEQLMSLTALFPVTPNCQLQYLALAAPVFSKQGIALSLQTTFQVAGAVVPVPVSPVPFSMPELASTSTSHLILALSEHFYTSLYFTLERAGAFNMTIPSMLTTATLAQKITQVGSLYHEDLPITLSAALRSSPRVVLEEGRAALKLFLTVHIGAGSPDFQSFLSVSADVTRAGLQLSVSDTRMMISTAVIEDAELSLAASNVGLVRAALLEELFLAPVCQQVPAWMDDVLREGVHLPHMSHFTYTDVNVVVHKDYVLVPCKLKLRSTMA

SEQ ID NO: 1016 - protein, 831 aa, Gallus gallus
AQLLLGRLCAEREKAKSLRHYLVVIPAHLRYPSIQVACLHITCYEAKIQVKLVLERFAGHDLLVQKNIQKEKTFMCTKFWVAPPADGTEEIATVRLIITGQGVNIEEKKNVLIHKANSGTFIQMDKPIYKPGQTVKFRIVTLDEDFIAFNDSISVFLQDPKNNRIEQWLNVVPQEGIADLSFQLSDEPLLGTYVINVTNRKIYDSFTVEEYVLPKFEVIFEAPVKIYALDKTFPLRVCGRYTYGKAVQGMVYVSLCQKISQFLPSASKPDLCQEFYNQTDNMGCFFTNVTLSFSQDLRYYRDSIVAEASLLEDGTEIQVNASHKLLISKIGGMALFDDVNSYYHAGEMYRGKIKVIDYKGKMLKYKKVLLVVSFGEQQFQQKYLTGDTGTASFSLNTTAWNSTSVSLEASVLHQDMDREPGTVDLNYMRASHFIRPFYSTSRSFLSIVHVPEMMPCGKKQAIQVDFRIYQEDLEHGPKRVIFSYLVTGKSGIVHAGQKTVWVGLPRMLKGFFSIPVTFSSVYAPTSTLIVYVIFPNGKTIADSAVFSVSMCFRNKAELSFSVPKILPGSEVNLHLQAAPGSTCAVWAVDQTVFLLKPEKELSHSMIYGLFPSIPSTYSGYPHQVSEDDNSCGFQNSDQPDVFTAFRGEVSSASVLFFFFFFLQEMGLKIMSNTNIRKPRLCLTTQSTTMMQERAGHLMTSTYQPTMFSPVSSPEEKVHKYFTKTWLWDLYSVGPSGKQTVTVTVPNTITGWKAGMFCTGHNGFGLAPTSSLLVFKPFSVELTLPSSVIQGETFILKATVLSYLQQCMKIQVTMEEFPQFQQLLMCWRTERL

SEQ ID NO: 1017 - protein, 1185 aa, Gallus gallus
CSTWGGGHFSTFDKYQYDFTGTCNYIFATVCDESSPDFNIQFRRGLDKKIARIIIELGPSVIIVEKDSISVRSVGVIKLPYASNGIQIAPYGRSVRLVAKLMEMELVVMWNNEDYLMVLTEKKYMGKTCGMCGNYDGYELNDFVSEGKLLDTYKFAALQKMDDPSEICLSEEISIPAIPHKKYAVICSQLLNLVSPTCSVPKDGFVTRCQLDMQDCSEPGQKNCTCSTLSEYSRQCAMSHQVVFNWRTENFCSVGKCSANQIYEECGSPCIKTCSNPEYSCSSHCTYGCFCPEGTVLDDISKNRTCVHLEQCPCTLNGETYAPGDTMKAACRTCKCTMGQWNCKELPCPGRCSLEGGSFVTTFDSRSYRFHGVCTYILMKSSSLPHNGTLMAIYEKSGYSHSETSLSAIIYLSTKDKIVISQNELLTDDDELKRLPYKSGDITIFKQSSMFIQMHTEFGLELVVQTSPVFQAYVKVSAQFQGRTLGLCGNYNGDTTDDFMTSMDITEGTASLFVDSWRAGNCLPAMERETDPCALSQLNKISAETHCSILTKKGTVFETCHAVVNPTPFYKRCVYQACNYEETFPYICSALGSYARTCSSMGLILENWRNSMDNCTITCTGNQTFSYNTQACERTCLSLSNPTLECHPTDIPIEGCNCPKGMYLNHKNECVRKSHCPCYLEDRKYILPDQSTMTGGITCYCVNGRLSCTGKLQNPAESCKAPKKYISCSDSLENKYGATCAPTCQMLATGIECIPTKCESGCVCADGLYENLDGRCVPPEECPCEYGGLSYGKGEQIQTECEICTCRKGKWKCVQKSRCSSTCNLYGEGHITTFDGQRFVFDGNCEYILAMDGCNVNRPLSSFKIVTENVICGKSGVTCSRSISIYLGNLTIILRDETYSISGKNLQVKYNVKKNALHLMFDIIIPGKYNMTLIWNKHMNFFIKISRETQETICGLCGNYNGNMKDDFETRSKYVASNELEFVNSWKENPLCGDVYFVVDPCSKNPYRKAWAEKTCSIINSQVFSACHNKVNRMPYYEACVRDSCGCDIGGDCECMCDAIAVYAMACLDKGICIDWRTPEFCPVYCEYYNSHRKTGSGGAYSYGSSVNCTWHYRPCNCPNQYYKYVNIEGCYNCSHDEYFDYEKEKCMPCAMQPTSVTLPTATQPTSPSTSSASTVLTETTNPPV

SEQ ID NO: 1018 - protein, 152 aa, Gallus gallus; identical to SEQ ID NO: 569

SEQ ID NO: 1019 - protein, 238 aa, Gallus gallus
MLRFAITLFAVITSSTCQQYGCLEGDTHKANPSPEPNMHECTLYSESSCCYANFTEQLAHSPIIKVSNSYWNRCGQLSKSCEDFTKKIECFYRCSPHAARWIDPRYTAAIQSVPLCQSFCDDWYEACKDDSICAHNWLTDWERDESGENHCKSKCVPYSEMYANGTDMCQSMWGESFKVSESSCLCLQMNKKDMVAIKHLLSESSEESSSMSSSEEHACQKKLLKFEALQQEEGEERR

SEQ ID NO: 1020 - protein, 178 aa, Gallus gallus
MRTLALSLALALLCLLHTEAAATVPDRSEVAGKWYIVALASNTDFFLREKGKMKMVMARISFLGEDELEVSYAAPSPKGCRKWETTFKKTSDDGELYYSEEAEKTVEVLDTDYKSYAVIFATRVKDGRTLHMMRLYSRSREVSPTAMAIFRKLARERNYTDEMVAVLPSQEECSVDEV

SEQ ID NO: 1021 - protein, 738 aa, Gallus gallus
MKSSENVLYLLLVHAALSLERVRWCTMSNQELSKCKDMSNAFTGAGILPPLECMEGESAANCTQMIKDYLADAVTLDGRWIYQAGKEYGLKPVVGEVYDQEIGTSYYAVAVVRKGSNITINSLKGVRSCHTGINRTAGWNVPVGYLIDSGRLPAMGCDLPKAVSDYFSASCVPGTNSASYPTSLCQLCKGDSSGQNKCQGNSQEQYYDYSGAFRCLAEGAGEVAFVKHSTVPENTDGRTLSTWAQQFRSKDFQLLCRNGSTADVTEWRTCHLARVPARAVVVRPDTDGTAVFQLLNQGQQRFNGVGAQFQMFDSTAYGAQNLMFRDSTTKLIAVTSQNYQAWLGDEYLHAMQALSCDPNTLPESLNWCVVSTEEIWKCGEMGTAFRSKNLKPEIQCISAKTKEECMEMIQKKEIDVVALGGADIYIAGKTYGLVPAAGESFSAEDNNNAYYAVALVKRNPSNAFTINDLKGKKSCHTGLGRTAGWNIPIGMLVKKGFINPRDCNIPQAVSEFFSASCVPSAEQGNYPSTLCQLCIGDNNGNNKCSASSQERYYSYNGAFRCLAEDAGDVAFVKHSTVFENTDGKNTESWAHDLKSSGFQLLCRNGARAEVTQFAQCHLARVPAQAIMVHPDTNIFALYGLLDKAQEYFGNNSNRNGFKMFDSSAFQGKDLIFKDSAVKIVPVEERRTYAEWLGSEYVESLEGMQTPQCSGAGNKLVQQHLLVITFVPFIILGQLQGLG

SEQ ID NO: 1022 - protein, 63 aa, Gallus gallus
MRFLYLIFSVFLLVSLATPGYGLVLKYCPKIGYCSNTCSKTQIWATSHGCKMYCCLPASWKWK

SEQ ID NO: 1023 - protein, 221 aa, Gallus gallus
PDMGCRAACVLAVLLAGLVPLGQGQEREKVKCYDSVRGTIYDYGALTIDGDEYIPFRKYAGKMVLFVNVATYSILGSLPAELNALQNELGPYGLVVLGFPSNQFGKQEPGQNSEILPALKYVRPGGGFVPNFQLFQKGDVNGAKEQKVYSFLKNSCPPVAEEFGNPKNLFWEPLRNHDIKWNFEKFLVGTDGVPVMRWYHRANIATVKNDIIAYMRQQRGQ

SEQ ID NO: 1024 - protein, 139 aa, Gallus gallus
MAGARGCVVLLAAALMLVGAVLGSEDRSRLLGAPVPVDENDEGLQRALQFAMAEYNRASNDKYSSRVVRVISAKRQLVSGIKYILQVEIGRTTCPKSSGDLQSCEFHDEPEMAKYTTCTFVVYSIPWLNQIKLLESKCQ

SEQ ID NO: 1025 - protein, 183 aa, Gallus gallus
MKVLTPAALILLFFFYTVDARTREYTSVITVPNGGHWGKWGIRQFCHSGYANGFALKVEPSQFGRDDTALNGIRLRCLDGSVIESLVGKWGTWTSFLVCPTGYLVSFSLRSEKSQGGGDDTAANNIQFRCSDEAVLVGDGLSWGRFGPWSKRCKICGLQTKVESPQGLRDDTALNNVRFFCCK

SEQ ID NO: 1026 - protein, 190 aa, Bos taurus
MMKSFFLVVTILALTLPFLGAQEQNQEQPIRCEKDERFFSDKIAKYIPIQYVLSRYPSYGLNYYQQKPVALINNQFLPYPYYAKPAAVRSPAQILQWQVLSNTVPAKSCQAQPTTMARHPHPHLSFMAIPPKKNQDKTEIPTINTIASGEPTSTPTTEAVESTVATLEDSPEVIESPPEINTVQVTSTAV

SEQ ID NO: 1027 - protein, 222 aa, Bos taurus; identical to SEQ ID NO: 780

SEQ ID NO: 1028 - protein, 178 aa, Bos taurus
MKCLLLALALTCGAQALIVTQTMKGLDIQKVAGTWYSLAMAASDISLLDAQSAPLRVYVEELKPTPEGDLEILLQKWENGECAQKKIIAEKTKIPAVFKIDALNENKVLVLDTDYKKYLLFCMENSAEPEQSLVCQCLVRTPEVDDEALEKFDKALKALPMHIRLSFNPTQLEEQCHI

SEQ ID NO: 1029 - protein, 708 aa, Bos taurus
MKLFVPALLSLGALGLCLAAPRKNVRWCTISQPEWFKCRRWQWRMKKLGAPSITCVRRAFALECIRAIAEKKADAVTLDGGMVFEAGRDPYKLRPVAAEIYGTKESPQTHYYAVAVVKKGSNFQLDQLQGRKSCHTGLGRSAGWIIPMGILRPYLSWTESLEPLQGAVAKFFSASCVPCIDRQAYPNLCQLCKGEGENQCACSSREPYFGYSGAFKCLQDGAGDVAFVKETTVFENLPEKADRDQYELLCLNNSRAPVDAFKECHLAQVPSHAVVARSVDGKEDLIWKLLSKAQEKFGKNKSRSFQLFGSPPGQRDLLFKDSALGFLRIPSKVDSALYLGSRYLTTLKNLRETAEEVKARYTRVVWCAVGPEEQKKCQQWSQQSGQNVTCATASTTDDCIVLVLKGEADALNLDGGYIYTAGKCGLVPVLAENRKSSKHSSLDCVLRPTEGYLAVAVVKKANEGLTWNSLKDKKSCHTAVDRTAGWNIPMGLIVNQTGSCAFDEFFSQSCAPGADPKSRLCALCAGDDQGLDKCVPNSKEKYYGYTGAFRCLAEDVGDVAFVKNDTVWENTNGESTADWAKNLNREDFRLLCLDGTRKPVTEAQSCHLAVAPNHAVVSRSDRAAHVKQVLLHQQALFGKNGKNCPDKFCLFKSETKNLLFNDNTECLAKLGGRPTYEEYLGTEYVTAIANLKKCSTSPLLEACAFLTR

SEQ ID NO: 1030 - protein, 1332 aa, Bos taurus
MTADELVFFVNGKKVVEKNADPETTLLAYLRRKLGLRGTKLGCGEGGCGACTVMLSKYDRLQDKIIHFSANACLAPICTLHHVAVTTVEGIGSTKTRLHPVQERIAKSHGSQCGFCTPGIVMSMYTLLRNQPEPTVEEIEDAFQGNLCRCTGYRPILQGFRTFAKNGGCCGGNGNNPNCCMNQKKDHTVTLSPSLFNPEEFMPLDPTQEPIFPPELLRLKDVPPKQLRFEGERVTWIQASTLKELLDLKAQHPEAKLVVGNTEIGIEMKFKNQLFPMIICPAWIPELNAVEHGPEGISFGAACALSSVEKTLLEAVAKLPTQKTEVFRGVLEQLRWFAGKQVKSVASLGGNIITASPISDLNPVFMASGTKLTIVSRGTRRTVPMDHTFFPSYRKTLLGPEEILLSIEIPYSREDEFFSAFKQASRREDDIAKVTCGMRVLFQPGSMQVKELALCYGGMADRTISALKTTQKQLSKFWNEKLLQDVCAGLAEELSLSPDAPGGMIEFRRTLTLSFFFKFYLTVLKKLGKDSKDKCGKLDPTYTSATLLFQKDPPANIQLFQEVPNGQSKEDTVGRPLPHLAAAMQASGEAVYCDDIPRYENELFLRLVTSTRAHAKIKSIDVSEAQKVPGFVCFLSADDIPGSNETGLFNDETVFAKDTVTCVGHIIGAVVADTPEHAERAAHVVKVTYEDLPAIITIEDAIKNNSFYGSELKIEKGDLKKGFSEADNVVSGELYIGGQDHFYLETHCTIAIPKGEEGEMELFVSTQNAMKTQSFVAKMLGVPVNRILVRVKRMGGGFGGKETRSTLVSVAVALAAYKTGHPVRCMLDRNEDMLITGGRHPFLARYKVGFMKTGTIVALEVDHYSNAGNSRDLSHSIMERALFHMDNCYKIPNIRGTGRLCKTNLSSNTAFRGFGGPQALFIAENWMSEVAVTCGLPAEEVRWKNMYKEGDLTHFNQKLEGFSVPRCWDECLKSSEYYARKSEVDKFNKENCWKKRGLCIIPTKFGISFTVPFLNQAGALIHVYTDGSVLVSHGGTEMGQGLHTKMVQVASKALKIPISKIYISETSTNTVPNSSPTAASVSTDIYGQAVYEACQTILKRLEPFKKKNPDGSWEDWVMAAYQDRVSLSTTGFYRTPNLGYSFETNSGNAFHYFTYGVACSEVEIDCLTGDHKNLRTDIVMDVGSSLNPAIDIGQVEGAFVQGLGLFTLEELHYSPEGSLHTRGPSTYKIPAFGSIPTEFRVSLLRDCPNKKAIYASKAVGEPPLFLGASVFFAIKDAIRAARAQHTNNNTKELFRLDSPATPEKIRNACVDKFTTLCVTGAPGNCKPWSLRV

SEQ ID NO: 1031 - protein, 1661 aa, Bos taurus
MKPTSGPSLLLLLLASLPMALGNPMYSMITPNILRLESEETVVLEAHGGQGTIQVSVTVHDFPAKKQVLSNENTQLNSNNGYLSTVTIKIPASKELKSDKGHKFVTVVATFGNVQVEKVVLISLQSGYLFIQTDKTIYTPGSTVLYRVFTVDHKLLPVGQTVFITIETPDGIPVKRDSKSSQNQFGILTLSWNIPELVNMGVWKIKAYYEDSPQQVFSAEFEVKEYVLPSFEVQLEPEEKFYYIDDPDGLKVNIIARFLYGEQVDGTAFVIFGVQDGDRRISLTHSLTRVPINDGNGEAILKRQVLLNGVQPSRADALVGKSIYVSATVILQSGSDMVEAERTGIPIVTSPYQIHFTKTPKFFKPAMPFDLMVYVTNPDGSPARHIPVVTQGSNVQSLTQDDGVAKLSINTQNKRDPLTITVRTKKDNIPEGRQATRTMQALPYNTQGNSNNYLHLSVPRVELKPGETLNVNFHLRTDPGEQAKIRYYTYMIMNKGKLLKVGRQYREPGQDLVVLPLTITSDFIPSFRLVAYYTLINAKGQREVVADSVWVDVKDSCMGTLVVKNGGKEEKHHRPGQQITLKIEADQGARVGLVAVDKGVFVLNKKNKLTQRKIWDVVEKADIGCTPGSGRNYAGVFTDAGLTLKTSQGLETQQRADPQCPQPATRRRRSVQLMEKRMDKAGQYSSDLRKCCEDGMRDNPMKFPCQRRAQFILQGDACVKAFLDCCEYITQLRQQHSRDGALELARSDLDDDIIPEEDIISRSQFPESWLWTVIEDLKQADKNGISTKLMNVFLKDSITTWEILAVSLSDKKGICVADPYEVTVMQDFFIDLRLPYSVVRNEQVEIRAILYNYREAENLKVRVELLYNPAFCSLATAKKRHQQTITIPARSSVAVPYVIVPLKIGLHEVEVKAAVYNHFISDGVKKTLKVVPEGVRVNKTVAVRTLNPEHLGQGGVQREEVPAADLSDQVPDTESETKILLQGTPVAQMTEDAIDGERLKHLIQTPSGCGEQNMIGMTPTVIAVHYLDSTDQWEKFGLEKRQESLELIRKGYTQQLAFRQKSSAYAAFQYRPPSTWLTAYVVKVFALAANLIAIDSKDLCETVKWLILEKQKPDGIFQEDGPVIHQEMIGGFRDTREKDVSLTAFVLIALHEAKDICEAQVNSLGRSIAKAGDFLENHYRELRRPYTVAIAAYALALLGKLEGDRLTKFLNTAKEKNRWEEPNQKLYNVEATSYALLALLARKDYDTTPPVVRWLNEQRYYGGGYGSTQATFMVFQALAQYQKDVPDHKELNLDVSIQLPSRNSAVRHRILWESASLLRSEETKENERFTVKAEGKGQGTLSVVTVYHAKLKGKVSCKKFDLRVSIRPAPETVKKPQDAKGSMILDICTKYLGDQDATMSILDISMMTGFSPDVEDLKTLSTGVDRYISKYEMNRDSNKNTLIIYLDKVSHTVEDCLSFKVHQYFNVGLIQPGAVKVYSYYNLDETCIRFYHPDKEDGMLSKLCHKDTCRCAEENCFMHHTEKEVTLEDRLDKACEPGVDYVYKTRLIQKKLEDDFDEYIMVIENIIKSGSDEVQVKQERKFISHIKCREALKLKEGAHYLVWGVSSDLWGEKPKISYIIGKDTWVELWPEAEECQDEENQKQCEDLANFTENMVVFGCPN

SEQ ID NO: 1032 - protein, 427 aa, Bos taurus; identical to SEQ ID NO: 847

SEQ ID NO: 1033 - protein, 526 aa, Bos taurus
MAVFPNSCLAGCLLIFILLQLPKLDSAPFDVIGPQEPILAVVGEDAELPCRLSPNVSAKGMELRWFREKVSPAVFVSREGQEQEGEEMAEYRGRVSLVEDHIAEGSVAVRIQEVKASDDGEYRCFFRQDENYEEAIVHLKVAALGSDPHISMKVQESGEIQLECTSVGWYPEPQVQWRTHRGEEFPSMSESRNPDEEGLFTVRASVIIRDSSMKNVSCCIRNLLLGQEKEVEVSIPASFFPRLTPWMVAVAVILVVLGLLTIGSIFFTWRLYKERSRQRRNEFSSKEKLLEELKWKRATLHAVDVTLDPDTAHPHLFLYEDSKSVRLEDSRQKLPEKPERFDSWPCVMGREAFTSGRHYWEVEVGDRTDWAIGVCRENVMKKGFDPMTPENGFWAVELYGNGYWALTPLRTPLPLAGPPRRVGVFLDYESGDIFFYNMTDGSHIYTFSKASFSGPLRPFFCLWSCGKKPLTICPVTDGLEGVMVVADAKDISKEIPLSPMGEDSASGDIETLHSKLIPLQPSQGVP

SEQ ID NO: 1034 - protein, 757 aa, Bos taurus
MSRLFLACLLAIFPVVSMKSPIFGPEEVTSVEGRSVSIKCYYPPTSVNRHTRKYWCRQGAQGRCTTLISSEGYVSDDYVGRANLTNFPESGTFVVDISHLTHKDSGRYKCGLGISSRGLNFDVSLEVSQDPAQASHAHVYTVDLGRTVTINCPFTRANSEKRKSLCKKTIQDCFQVVDSTGYVSNSYKDRAHISILGTNTLVFSVVINRVKLSDAGMYVCQAGDDAKADKINIDLQVLEPEPELVYGDLRSSVTFDCSLGPEVANVPKFLCQKKNGGACNVVINTLGKKAQDFQGRIVSVPKDNGVFSVHITSLRKEDAGRYVCGAQPEGEPQDGWPVQAWQLFVNEETAIPASPSVVKGVRGGSVTVSCPYNPKDANSAKYWCHWEEAQNGRCPRLVESRGLIKEQYEGRLALLTEPGNGTYTVILNQLTDQDTGFYWCVTDGDTRWISTVELKVVQGEPSLKVPKNVTAWLGEPLKLSCHFPCKFYSFEKYWCKWSNRGCSALPTQNDGPSQAFVSCDQNSQVVSLNLDTVTKEDEGWYWCGVKEGPRYGETAAVYVAVESRVKGSQGAKQVKAAPAGAAIQSRAGEIQNKALLDPSFFAKESVKDAAGGPGAPADPGRPTGYSGSSKALVSTLVPLALVLVAGVVAIGVVRARHRKNVDRISIRSYRTDISMSDFENSRDFEGRDNMGASPEAQETSLGGKDEFATTTEDTVESKEPKKAKRSSKEEADEAFTTFLLQAKNLASAATQNGPTEA

SEQ ID NO: 1035 - protein, 712 aa, Bos taurus; identical to SEQ ID NO: 845

SEQ ID NO: 1036 - protein, 153 aa, Bos taurus; identical to SEQ ID NO: 859

SEQ ID NO: 1037 - protein, 447 aa, Bos taurus
MASVAVEPQLSVVTRVANLPLVSSTYDLVSSAYISRKDQYPYLKSLCEMAEKGMKTITSVAVTSALPIIQKLEPQIAVANTYACKGLDRIEEKLPILNQPTNQVVANAKGAMTGAKDAVTTTVTGAKDSVASTITGVVDRTKGAVTGSVEKTKSVVSGSINTVLRSRVMQLMSSGVENALTKSELLVDQYLPLTKDELEKEAKKVEGFDMVQKPSYYVRLGSLSTKLRSRAYQQALCRVEEAKRKGQETISQLHSAFNLSELARKNVHNANQKIQDAQDKLYLSWLEWKRSIGYDDTDESHCAEHIESRTLAIARNLTQQLQTMCHTLLSNIQGLPQNIQDRANHLGVMAGDIYSVFRNAASFKEVSDGLLASSKGQLQKMKESLDDVMDYLVNNTPLNWLALDFSITDFTSETDEIPDIIALEEEDGPNHSHANGPEPSQGKMLNN

SEQ ID NO: 1038 - protein, 478 aa, Bos taurus
MESKALLLLALSVCLQSLTVSRGGLVAADRITGGKDFRDIESKFALRTPEDTAEDTCHLIPGVTESVANCHFNHSSKTFVVIHGWTVTGMYESWVPKLVAALYKREPDSNVIVVDWLSRAQQHYPVSAGYTKLVGQDVAKFMNWMADEFNYPLGNVHLLGYSLGAHAAGIAGSLTNKKVNRITGLDPAGPNFEYAEAPSRLSPDDADFVDVLHTFTRGSPGRSIGIQKPVGHVDIYPNGGTFQPGCNIGEALRVIAERGLGDVDQLVKCSHERSVHLFIDSLLNEENPSKAYRCNSKEAFEKGLCLSCRKNRCNNMGYEINKVRAKRSSKMYLKTRSQMPYKVFHYQVKIHFSGTESNTYTNQAFEISLYGTVAESENIPFTLPEVSTNKTYSFLLYTEVDIGELLMLKLKWISDSYFSWSNWWSSPGFDIGKIRVKAGETQKKVIFCSREKMSYLQKGKSPVIFVKCHDKSLNRKSG

SEQ ID NO: 1039 - protein, 534 aa, Bos taurus
MSQLLERMTSVLWLALASYILTLSSTEQQGYRNSTNTGSYEKDLDCGAPGTPEAQLCFDPCQNYTLLNEPFRSTENTEDIQGCDSDKHGWYRFVGDGGVRMPEDCVPTFRCQTSAPLWLNGTHPGLGEGIVNRTACAHWSGNCCLWKTEVLVKACPGPYYVYRLEGTPQCSLRYCTDPATAEDKCDRTCRPEEECRLVSGTWGCFCRQDLNVSDVHSLQPQLDCGDTEIKVSLDKCLLGSLGFGDEVHAYLRDGNWNCSSLRQSEEENWISVTNPTQAGACGNILERNQTHAIYINTLSLVNDFIIRDTILSINFQCAYPLDMKVSLQMALQPIVSSLNITVDGEGEFTVRMALFQDQDYTSPYEGTAVMLSVESMLYVGTILERGDTSRFNLVLKNCYATPTEDKTDPVKYFIIRNSCPNQRDSTISVEENGVSAESRFSVQMFKFAGNYDLVFLHCEVSLCDFIKEECQPSCSRSQLRSEGVAIDPARVLDLGPITRKGAQSLGVMSGTPNTAGFLVAWPLVLLPVLLAGLF

SEQ ID NO: 1040 - protein, 704 aa, Bos taurus
MRPAVRALLACAVLGLCLADPERTVRWCTISTHEANKCASFRENVLRILESGPFVSCVKKTSHMDCIKAISNNEADAVTLDGGLVYEAGLKPNNLKPVVAEFHGTKDNPQTHYYAVAVVKKDTDFKLNELRGKKSCHTGLGRSAGWNIPMAKLYKELPDPQESIQRAAANFFSASCVPCADQSSFPKLCQLCAGKGTDKCACSNHEPYFGYSGAFKCLMEGAGDVAFVKHSTVFDNLPNPEDRKNYELLCGDNTRKSVDDYQECYLAMVPSHAVVARTVGGKEDVIWELLNHAQEHFGKDKPDNFQLFQSPHGKDLLFKDSADGFLKIPSKMDFELYLGYEYVTALQNLRESKPPDSSKDECMVKWCAIGHQERTKCDRWSGFSGGAIECETAENTEECIAKIMKGEADAMSLDGGYLYIAGKCGLVPVLAENYKTEGESCKNTPEKGYLAVAVVKTSDANINWNNLKDKKSCHTAVDRTAGWNIPMGLLYSKINNCKFDEFFSAGCAPGSPRNSSLCALCIGSEKGTGKECVPNSNERYYGYTGAFRCLVEKGDVAFVKDQTVIQNTDGNNNEAWAKNLKKENFEVLCKDGTRKPVTDAENCHLARGPNHAVVSRKDKATCVEKILNKQQDDFGKSVTDCTSNFCLFQSNSKDLLFRDDTKCLASIAKKTYDSYLGDDYVRAMTNLRQCSTSKLLEACTFHKP

SEQ ID NO: 1041 - protein, 234 aa, Bos taurus; identical to SEQ ID NO: 483

SEQ ID NO: 1042 - protein, 389 aa, Bos taurus
  MOD_RES (263)..(263): Any amino acid
GESHPRVFPLVSCVSSPSDESTVALGCLARDFVPNSVSFSWKFNNSTVSSERFWTFPEVLRDGLWSASSQVVLPSSSAFQGPDDYLVCEVQHPKGGKTVGTVRVIATKAEVLSPVVSVFVPPRNSLSGDGNSKSSLICQATDFSPKQISLSWFRDGKRIVSGISEGQVETVQSSPITFRAYSMLTITERDWLSQNVYTCQVEHNKETFQKNVSSSCDVAPPSPIGVFTIPPSFADIFLTKSAKLSCLVTNLASYDGLNISWSXGFAPADVFVQWLQRGEPVTKSKYVTSSPAPEPQDPSVYFVHSILTVAEEDWSKGETYTCVVGHEALPHMVTERTVDKSTDLLLEEEICADAQDGELDGLWTTISIFITLFLLSVCYSATVTLFKVG

SEQ ID NO: 1043 - protein, 457 aa, Bos taurus
SPEGESLPRVFPLVSCMSSPSDESTVALGCLAQDFMPNSVSFSWKFNNSTVSSERFWTFPAVLRDGLWSASSQVVLPSSSTFQGPDDYLVCEVQHPKGGKTVGTVRVVTPKAEVLSPIVSVFVPPRNSLSGDGNSKSSLICQATDFSPKQISLSWFRDGKRIVSGISEGQVETVQSSPITFRAYSMLTITEKDWLSQNVYTCQVEHNKETFQKNVSSSCDAAPPSPIGVFTIPPSFADIFLTKSAKLSCLVTNLASYDGLNISWSRQNGKALETHTYFERHLNDTFSARGEASVCSEDWESGEEFTCTVAHSDLPFPEKNAVSKPKDVAMKPPSVYLLPPTREQLSLRESASVTCLVKGFAPADVFVQWLQRGEPVTKSKYVTSSPAPEPQDPSVYFVHSILTVAEEDWSKGETYTCVVGHEALPHMVTERTVDKSTGKPTLYNVSLVLSDTASTCY

SEQ ID NO: 1044 - protein, 299 aa, Bos taurus; identical to SEQ ID NO: 857

SEQ ID NO: 1045 - protein, 472 aa, Bos taurus
MGCNRNCGLIAGAVIGAVLAVFGGILMPVGDMLIEKTIKKEVVLEEGTIAFKNWVKTGTDVYRQFWIFDVQNPDEVTVNSSKIKVKQRGPYTYRVRYLAKENITQDPETHTVSFLQPNGAIFEPSLSVGTEDDTFTILNLAVAAAPQLYPNTFMQGILNSFIKKSKSSMFQNRTLKELLWGYTDPFLNLVPYPITTTIGVFYPYNNTADGIYKVFNGKDDISKVAIIDTYKGRKNLSYWSSYCDLINGTDAASFPPFVEKTRVLQFFSSDICRSIYAVFGAEINLKGIPVYRFILPSFAFASPFQNPDNHCFCTEKIISKNCTLYGVLDIGKCKEGKPVYISLPHFLHGSPELAEPIESLSPNEEEHSTYLDVEPITGFTLRFAKRLQVNMLVKPAKKIEALKNLKHNYIVPILWLNETGTIGDEKAEMFRNQVTGKINLLGLVEIVLLSVGVVMFIAFMISYCACRSKRVN

SEQ ID NO: 1046 - protein, 474 aa, Bos taurus
MPPSGPRAALFLLPSLLLLRAVLAVPLERGAPKEENPATESPDTGLYYHRYLQEVINVLETDGHFREKLQAANAEDIKSGKLSRELDFVSHHVRTKLDELKRQEVSRLRMLLKAKMDAQQEPNIQLDHLNLLKQFEHLDPQNQHTFEARDLELLIQTATRDLAQYDAAHHEEFKRYEMLKEHERRRYLESLGEEQRKEAERKLEEQQRRHREHPKVNVPGSQAQLKEVWEELDGLDPNRFNPKTFFILHDINSDGVLDEQELEALFTKELEKVYDPKNEDDDMREMEEERLRMREHVMKNVDTNQDRLVTLEEFLASTQRKEFGDTGEGWEQGKAGVPLPMAPVLTLQTVEMHPAYTEEELRRFEEELAAREAELNAKAQRLSQETEALGRSQGRLEAQKRELQQAVLQMEQRKQQQQSHNNPAPGPEGQLKFHPDTDDVPVPAPAGDQKDVDASEKKVPEQTPEPPQLDSQHL

SEQ ID NO: 1047 - protein, 724 aa, Bos taurus
MLRRSIPRGGWSRWTPWLLTSPRIFCLSLIVLLGQVGLLQGHPQCLDYRPPFQPLQHLEFCSDYESFGCCDQRKDHRIAARYWDIMEYFDLKGHELCGGYIKDILCQECSPYAAHLYDAENPRTPLRNLPGLCSDYCSAFHSNCHSAIALLTNDRRFQESPGKDGTRFCHLLNLPDKDYCFPNILRSDHLNRNLGTVAEDRRGCLQLCLAEVANRLRNPVAMVHAGDGTHRFFVAEQVGVVWVYLPDGSRLEQPFLDLKSLVLTTPWIGDERGFLGLAFHPRFRRNRKFYIYYSCLGKKRVEKIRISEMKVSRADPNKADPKSERVILEIEEPASNHNGGQLLFGLDGYMYIFTGDGGQAGDPFGKFGNAQNKSSLLGKVLRIDVNGAGSGGKRYRVPMDNPFVSEPGAHPAIYAYGIRNMWRCAVDRGDPITHQGRGRMFCGDVGENRFEEVDIIVKGGNYGWRAKEGFECYDKKLCQNASLDDILPIYAYGHAVGKSVTGGYVYRGCESPNLNGLYIFGDFMSGRLMALQEDRKTKKWKKQDICLGSTESCAFPGLISTHSKFIISFGEDEAGELYFLATSYPSAYAPHGSIYKFVDPSRRAPPGKCKYKPVPVKTRSKRVQFRPLAKMVLDLLKEQSEKAARKLSSATLASSPNRASSQKDSFKKPASPTSSRKTSPGPGAKKRARVWSPGPQGKRKGIPKRPSGIARQAAQHRRAGRSLP

SEQ ID NO: 1048 - protein, 233 aa, Bos taurus
MAWTPLLLPLLTLCAGHLASSQLTQPPAVSVSLGQTASITCQGDDLELLSAHWYQQKPGQAPVLVIYADDNLASGIPDRFSGSKSDTTATLTIRGAQAEDEADYYCQSADPVSLCDLFGGGTRVTVLGQPKSPPSVTLFPPSKEELSANKATLVCLISDFYPGSVTVAWKADGSTITRNVKTTRASKQSNSKYAASSYLSLTDSDWKSKGSYSCEVTHEGSTVTKTVKTSACS

SEQ ID NO: 1049 - protein, 326 aa, Bos taurus
ASTTAPKVYPLASRCGDTSSSTVTLGCLVSSYMPEPVTVTWNSGALKSGVHTFPAVLQSSGLYSLSSMVTVPASTSGQTFTCNVAHPASSTKVDKAVGVSIDCSKCHNQPCVREPSVFIFPPKPKDTLMITGTPEVTCVVVNVGHDNPEVQFSWFVDDVEVHTARTKPREEQFNSTYRVVSALPIQHQDWTGGKEFKCKVNNKGLSAPIVRIISRSKGPAREPQVYVLDPPKEELSKSTLSVTCMVTGFYPEDVAVEWQRNRQTESEDKYRTTPPQLDTDRSYFLYSKLRVDRNSWQEGDTYTCVVMHEALHNHYTQKSTSKSAGK

SEQ ID NO: 1050 - protein, 443 aa, Bos taurus; identical to SEQ ID NO: 848

SEQ ID NO: 1051 - protein, 107 aa, Bos taurus
QAVLTQPSSVSGSLGQRVSITCSGSSSNVGRGNYVNWFQQIPGSAPRTLIYGATSRASGVPDRFSGSRSGNTATLTISSLQAEDEADYFCAAYDSSSNNGTVLQARG

SEQ ID NO: 1052 - protein, 242 aa, Bos taurus
MALFTVVLFLAAVWLPFFPAKGQDRRFADLSNTLKNVQTEIVNKHNDLRRGVSPPPSNMLKMQWNTTAAANANWANKCLFHSKKEDRDSGTRNCGENLFMSSYPSTWSNAIQSWYDEVHDFVFEVGPKSPQAVIGHFTQIVWYSSFLIGCGVAYCPKQSLKYLYVCQYCPAGNIVGRQHVPYQKGTPCGSCPNHCDNGLCTNSCEYEDTYSNCASLKETWTCASDFVKTNCKAACNCQGKIY

SEQ ID NO: 1053 - protein, 655 aa, Bos taurus
MSSNSYEVSIPMSKKLNGIPETTSKDLQTLTEGAVLSFHNICYRVKVKTGFLLCRKTIEKEILANINGVMKPGLNAILGPTGGGKSSLLDILAARKDPHGLSGDVLINGAPRPANFKCNSGYVVQDDVVMGTLTVRENLQFSAALRLPTTMTSYEKNERINKVIQELGLDKVADSKVGTQFIRGVSGGERKRTSIAMELITDPSILFLDEPTTGLDSSTANAVLLLLKRMSKQGRTIIFSIHQPRYSIFKLFDSLTLLASGRLMFHGPAQEALGYFGAIGFRCEPYNNPADFFLDIINGDSSAVVLNREDIGDEANETEEPSKKDTPLIEKLAEFYVNSSFFKETKVELDKFSGDQRRKKLPSYKEVTYATSFCHQLKWISRRSFKNLLGNPQASIAQLIVTVFLGLVIGAIFYDLKNDPAGIQNRAGVLFFLTTNQCFSSVSAVELLVVEKKLFIHEYISGYYRVSSYFFGKLLSDLLPMRMLPSIIFTCITYFLLGLKPKVEAFFIMMLTLMMVAYSASSMALAIAAGQSVVSIATLLMTISFVFMMIFSGLLVNLKTVVPWLSWLQYLSIPRYGYAALQHNEFLGQNFCPGLNVTTNNTCSYAICTGEEFLTNQGIDISPWGLWKNHVALACMIVIFLTIAYLKLLFLKKFS

SEQ ID NO: 1054 - protein, 2512 aa, Bos taurus
MEEVVITGMSGKLPESENLEEFWANLIGGVDMVTDDDRRWKAGLYGLPRRSGKLKDLSRFDASFFGVHPKQAHNMDPQLRLLLEVTYEAIVDAGINPASIRGTNTGVWVGVSGSEASEALSRDPETLVGYSMVGCQRAMLANRLSFFFDFKGPSITLDTACSSSLLALQRAYQAIQRGECAMAIVGGVNILLKPNTSVQFMKLGMLSPEGTCKSFDASGNGYCRAEAVMAILLTKKSLARRVYATILNAGTNTDGCKEKGVTFPSGEAQEQLISSLYKPAGLDPETLEYVEAHGTGTKVGDPQELNGIVQALCGTRQSPLRIGSTKSNMGHPEPASGLAALAKVLLSLEHGLWAPNLHFHNPNPKIPALQDGRLQVVDRPLPVLGGNVGINSFGFGGSNVHVILQPNSQPLPPPAPHAALPRLLRASGRTLEGVQGLLELGLQHSQNLAFVSMLNDIAAPSPAAMPFRGYAVLGSQGGSQEVQQVLAGKRPLWFICSGMGTQWRGMGLSLMRLSRFRDSILRSDEAVKPLGLQVSQLLLSTDEAIFDDMVISFVSLTAIQIALIDLLTSMGLQPDGIIGHSLGEVACGYADGCISQEEAILSAYWRGQCIKEANIPPGAMAAVGLTWEECKQRCPPGIVPACHNCIDTVTISGPQASMLEFVQQLKQEGVFAKEVRTGGMAFHSYFMDAIAPMLLQQLKKVIREPQPRSPRWLSTSIPETQWQESLARTFSAEYNVNNLVSPVLFQEALWRVPEDAVVLEIAPHALLQAVLKRGLKSSCTIIPLMKKDHRDNLEFFLSNVGQLYLTGIDVNPNGLFPPVEFPAPRGTPLISPHIKWDHSQTWDVPTAEDFPSGSSSSSATIYKIDINPESPDHYLVDHCIDGRIIFPGTGYLCLVWKTLARALDQNMEHTPVVFEDVTLHQAVILPKTGIVLLEVRLLEASCTFEVSENGNLIASGKVYQWEDPNPKLFDNRYGPDPATPVDPTTAIHLCRGDVYKELQLQGFNYGPYFQGILEASSEGNTGQLLWKDNWVTFMDTMLQMSILAPSKRSLRLPTRITAIYIHPATHQQKLYTLQDKTQVADVVINRCLDTTVAGGIYISRIHTSVAPRHQQEQLVPILEKFCFTPHVETGCLAGNLALQEELQLCVGLAQALQTRVAQQGIKMVVPGLDGAQAPQEAPQQGLPRLLATACQLQLNGNLQMEMGQILAQERALLCDDPLLSGLLNSPALKACVDTALENMTSLKMKVVLAGDGQLYSRIPTLLNTQPLLELDYTATDRHPQALEAAQAKLQQLDITQGQWDPSDPAPSNLGGANLVVCNYALASLGDPATAVGNMVAALKEGGFLLLHTLLRGHPLGETVTFLTCPEPQQGQRHLLSQDEWERLFAGASLYLVALKKSFYGSVLFLCRRLAPLDSPIFLPVEDTSFQWVDSLKNILADSSSRPVWLMAVGCTTSGVVGLVNCLRKEPDGHRIRCVLVSNLNSTSPIPETDPKSLELQKVLQSDLVMNVYRDGAWGAFRHFPLEQDKPEEQTEHAFINVLTRGDLSSIRWVCSPLRHSQPTAPGFQLCTIYYASLNFRHHAGHGQAVPRRHPRNWASRNCLLGMEFSGRDASGKRVMGLVPAEGLATSTLVPQSFLWDVPSNWTLEEAASVPVVYSTAYYALMVRGRMQPGETVLIHSGSGGVGQAAIAIALSLGCRVFTTVGSAEKRAYLQSRFPQLNETSFANSRDTSFEQHVLWHTAGKGADLVLNSLAEEKLQASVRCLAQHGRFLEIGKFDLSKNHPLGMAIFLKNVTFHGILLDSLFEENNTMWQEVSTLLKAGIREGVVQPLKRTVFPRTQAEDAFRYMAQGKHIGKVVLQVREEEQEAVLHGTKPTQMVALCKTFCPAHKSYIITGGLGGFGLELAHWLVERGAQKLVLTSRSGIRTGYQARQVHEWRRQGVQVLVSTSDVSALDGTRSLITEAAQLGPVGGIFNLAVVLRDAMLDNQTPEFFQDVNKPKYNGTLNLDRVTREACPELDYFVVFSSVSCGRGNAGQTNYGFANSTMERICEKRRHDGLPGLAVQWGAIADVGLLMELKGTKDKAIGGTLPQRITSCMEVLDLFLNQPHPVLSSFVLAEKATSRGPSGSHQDLVKAVTHILGIRDLATVNLDSSLSDLGLDSLMGVEVRQMLEREHNLLLSMREIRQLTIHKLQEISAQAGTADELTDSTPKFGSPAQSQTQLNLSTLLVNPEGPTLTRLNSVQSSERPLFLVHPIEGSTTVFHSLAAKLSIPTYGLQCTGAAPLDSIQSLATYYIECIRQVQPEGPYRIAGYSYGACVAFEMCSQLQAQQNAGPTNNSLFLFDGSHTFVMAYTQSYRAKLNPGCEAEAEAEAMCFFMQQFTEAEHSRVLEALLPLGDLEARVAATVELIVQSHAGLDRHALSFAARSFYHKLRAAEEYTPRATYHGNVTLLRAKMGSAYQEGLGADYNLSQVCDGKVSVHIIEGDHRTLLEGSGLESILSIIHSSLAEPRVSVREG

SEQ ID NO: 1055 - protein, 247 aa, Bos taurus
SESETSPSIFPLSLGNNDPAGQVVIGCLVQGFFPSAPLSVTWNQNGDSVSVRNFPAVLAGSLYTMSSQLTLPASLCPKGQSVTCQVQHLSKASKTVAVPCIIQDSSSCCVPNCEPSLSVQPPALEDLLLGSNASLTCTLSGLKSAEGASFTWNPTGGKTAVQGSPKRDSCGCYSVSSVLPGCADPWNSGQTFSCSVTHPESRSSLTATIKKDLGNTFPQVHLLPPPSSWPLNELVTLTCLVRGFQPQ

SEQ ID NO: 1056 - protein, 693 aa, Bos taurus
MAPWPELENSQPTSEKYTVKADGEQSAKPEKAKETEKDDTGTPITKIELVPSHSTATLIEEPTEVEDPWDLPELKDTGLKWSERDTKGKILCVFQGIGKFILLLVFLYFFVCSLDVLSSAFQLVGGKVAGKFFNNNSIMSNPLAGMVIGVLVTVLVQSSSTSTSIVVSMVASSLLPVHAAIPIIMGANIGTSITNTIVALMQAGDRKEFRRAFAGATVHDFFNWLSVLVLLPLEAATGYLERLTNLVVESFHFKNGEEAPELLKVITDPFTKLIIQLDKSILNQIAMNDESVQNKSMIKIWCKTFTNVTERNVTVPSPENCTSPSLCWTDGLYTWTIKNVTYKENIAKCQHIFVNFNLSDAIVGTILLITSLLILCTCLILIVKLLGSVLRGQVAAVIKKTINTDFPYPFSWVTGYLAILVGAGMTFIVQSSSVFTSAMTPLIGIGVISIQRAYPLTLGANIGTTTTAILAALASPGSTLKSSLQIALCHFFFNISGIILWYPIPFTRLPIRLAKGLGNISSKYRWFAIVYLIVFFLLIPLAVFGLSLIGWPVLVGVASPIVLVILLVVVLKILQSFCPGSLPQKLRSWDFLPFWMRSLEPWDKLITSLTSCFQMRCCCCCRVCCRLCCGLCGCSKCCRCTKCSEDLEEGKDEPVKSPEAFNNLAMDKEAQDGVTKSEVDASGTKIVSSVTAL

SEQ ID NO: 1057 - protein, 116 aa, Bos taurus
QAVLTQPPSVSGSLGQRVTISCTGSSSNIGGGNCVGWYQQIPGSAPKTLIYRSTSRPSGVPDRFSGSRSGNTATLTISSLQAEDEADYYCATYESSSYHGTVLQGKGNLEYSTMFK

SEQ ID NO: 1058 - protein, 133 aa, Bos taurus
MVDAFVGTWKLVDSKNFDDYMKSLGVGFATRQVGNMTKPTTIIEVNGDTVIIKTQSTFKNTEISFKLGVEFDETTADDRKVKSIVTLDGGKLVHVQKWNGQETSLVREMVDGKLILTLTHGTAVCTRTYEKQA

SEQ ID NO: 1059 - protein, 202 aa, Bos taurus; identical to SEQ ID NO: 855

SEQ ID NO: 1060 - protein, 234 aa, Bos taurus; identical to SEQ ID NO: 856

SEQ ID NO: 1061 - protein, 241 aa, Bos taurus
MAWQMTQLLLLALVAAAWGAQAPRTPRARTDLLNVCMDAKHHKAEPGPEDSLHEQCSPWRKNACCSVNTSIEAHKDISYLYRFNWDHCGKMEPACKRHFIQDTCLYECSPNLGPWIREVNQRWRKERVLGVPLCKEDCQSWWEDCRTSYTCKSNWHKGWNWTSGYNQCPVKAAHCRFDFYFPTPAALCNEIWSHSYKVSNYSRGSGRCIQMWFDPFQGNPNEEVARFYAENPTSGSTPQGI

SEQ ID NO: 1062 - protein, 411 aa, Bos taurus
MRAERTSFLLALGLLVAGIRSVHCLPENVVVKDQHRRVDGHTLASSNTDFAFSLYKQLALKNPNKNVILSPLSVSIALAFLSLGARGSTLTEILEGLKFNLTEIQEKEIHHSFQHLLQALNQPSNQLQLSVGNAMFVQEELKLLDKFIEDAQVLYSSEAFPTNFRDSEAARSLINDYVKNKTQGKIEELFKYLSPRTELVLVNYIYFKAQWKTPFDPKHTEQAEFHVSDNKTVEVPMMTLDLETPYFRDEELGCTLVELTYTSNDSALFILPDEGKMRDLEAKLTPETLTRWRNSLQPRRIHELYLPKFSIKSNYELNDILSQLGIRKIFANADLSGITGTADLVVSQVVHGAALDVDEEGTEGVAATGIGIERTFLRIIVRVNRPFLIAVVLKDTQSIIFLGKVTNPSEA

SEQ ID NO: 1063 - protein, 414 aa, Bos taurus
MSQKIQGGSVVEMQGDEMTRIIWELIKEKLIFPYVELDLHSYDLGIENRDATNDQVTKDAAEAIKKYNVGVKCATITPDEKRVEEFKLKQMWKSPNGTIRNILGGTVFREAIICKNIPRLVSGWVKPIIIGRHAYGDQYRATDFVVPGPGKVEISYTPSDGSPKTVYLVHNFTESGGVAMGMYNQDKSIEDFAHSSFQMALSKNWPLYLSTKNTILKKYDGRFKDIFQEIYDKQYKSEFEAQNIWYEHRLIDDMVAQAMKSEGGFIWACKNYDGDVQSDSVAQGYGSLGMMTSVLVCPDGKTVEAEAAHGTVTRHYRMYQKGQETLTNPIASIFAWTRGLAHRAKLDNNKELSFFAKALEEVCIETIEAGFMTKDLAACIKGLPNVQRSDYLNTFEFMDKLGENLQLKLAQAKL

SEQ ID NO: 1064 - protein, 496 aa, Bos taurus
MSCVLTGVVPLGLVLLLCGAQGFFLPNVTQLEKLLSKYQGDQPHSRTRRAISRADREEILTLHNKLRGQVSPPASNMEYMTWDEELEKSAVAWARECIWEHGPTSLLVSIGQNLAVHWGRPRSPGSHVQSWYDEVKDYTYPYPHECNPWCPERCSGPMCTHYTQIVWATTNRIGCAVNTCPRMNVWGDVWENAVYLVCNYFPKGNWIGEAPYKTGQPCSECPGKYRGGCKNNLCYQETYGQETETDDMNEVEAAPIPDEKHVWVTPRVIKPKKPKKDSPVNYMTQVVKCDTKMKDKCKGSTCNRYQCPAGCLHSGAKIFGTLFYESASSICRAAIHYGILDDRGGLVDVTRNGKVPFFVKSERNGVQSLSKYKASSSFTVSKVKVQDLDCYTTVAQLCPYEKPGTHCPRVRCPAHCKDEPSYWAPVFGSNIYADTSSICKTAVHAGVIRNESGGYVDVMPVDKKKTYVASLRNGVQSESLRTPRDGKAFRIFAVRQ

SEQ ID NO: 1065 - protein, 567 aa, Bos taurus; identical to SEQ ID NO: 844
  MOD_RES (86)..(86): Any amino acid

SEQ ID NO: 1066 - protein, 102 aa, Bos taurus
MRLSVTALLVTLALCYYEANAIVCPTFAADLTEFFYFPDLLYRLSLAKYNAPPEAVAAKMEVKQCTDRFSVKNRLIITNILGKILLNCTVTDVKAVLNPSSA

SEQ ID NO: 1067 - protein, 118 aa, Bos taurus; identical to SEQ ID NO: 853

SEQ ID NO: 1068 - protein, 140 aa, Bos taurus; identical to SEQ ID NO: 557

SEQ ID NO: 1069 - protein, 148 aa, Bos taurus
MVMVLSPLLLVFILGLGLTPVAPAQDDYRYIHFLTQHYDAKPKGRNDEYCFNMMKNRRLTRPCKDRNTFIHGNKNDIKAICEDRNGQPYRGDLRISKSEFQITICKHKGGSSRPPCRYGATEDSRVIVVGCENGLPVHFDESFITPRH

SEQ ID NO: 1070 - protein, 157 aa, Bos taurus; identical to SEQ ID NO: 505

SEQ ID NO: 1071 - protein, 190 aa, Bos taurus
MSRRYTPLAWVLLALLGLGAAQDCGSIVSRGKWGALASKCSQRLRQPVRYVVVSHTAGSVCNTPASCQRQAQNVQYYHVRERGWCDVGYNFLIGEDGLVYEGRGWNTLGAHSGPTWNPIAIGISFMGNYMHRVPPASALRAAQSLLACGAARGYLTPNYEVKGHRDVQQTLSPGDELYKIIQQWPHYRRV

SEQ ID NO: 1072 - protein, 226 aa, Bos taurus
MPVKGGTKCIKYLLFGFNFIFWLAGIAVLSVGLWLRFDSQTKSIFEQENNDSSFYTGVYILIGAGALMMLVGFLGCCGAVQESQCMLGLFFSFLLVIFAIEVAAAIWGYSHKEEVIKEVQKFYEDTYNKLKNKDEPQRETLKAIHIALDCCGLTGVPEQFLTDTCPPKNLIDSLKTRPCPEAIDEIFRSKFHIIGAVGIGIAVVMIFGMVFSMILCCAIRRNRDMV

SEQ ID NO: 1073 - protein, 389 aa, Bos taurus
MPGASLQRACRLLVAVCALHLGVTLVYYLAGRDLRRLPQLVGVHPPLQGSSHGAAAIGQPSGELRLRGVAPPPPLQNSSKPRSRAPSNLDAYSHPGPGPGPGSNLTSAPVPSTTTRSLTACPEESPLLVGPMLIEFNIPVDLKLVEQQNPKVKLGGRYTPMDCISPHKVAIIIPFRNRQEHLKYWLYYLHPILQRQQLDYGIYVINQAGESMFNRAKLLNVGFKEALKDYDYNCFVFSDVDLIPMNDHNTYRCFSQPRHISVAMDKFGFSLPYVQYFGGVSALSKQQFLSINGFPNNYWGWGGEDDDIYNRLAFRGMSVSRPNAVIGKCRMIRHSRDKKNEPNPQRFDRIAHTKETMLSDGLNSLTYMVLEVQRYPLYTKITVDIGTPS

SEQ ID NO: 1074 - protein, 468 aa, Bos taurus
QFPTDYDEGQDDRPKVGLGARGHRPYDKKKEEAPSLRPVPPPISGGGYRARPATATVGQKKVERKPPDADGCLHADPDLGVLCPTGCKLQDTLVRQERPIRKSIEDLRNTVDSVSRTSSSTFQYITLLKNMWKGRQNQVQDNENVVNEYSSHLEKHQLYIDETVKNNIPTKLRVLRSILENLRSKIQKLESDVSTQMEYCRTPCTVTCNIPVVSGKECEKIIRNEGETSEMYLIQPEDSSKPYRVYCDMKTEKGGWTVIQNRQDGSVDFGRKWDPYKQGFGNIATNAEGKKYCGVPGEYWLGNDRISQLTNMGPTKLLIEMEDWKGDKVTALYEGFTVQNEANKYQLSVSKYKGTAGNALIEGASQLVGENRTMTIHNSMFFSTYDRDNDGWKTTDPRKQCSKEDGGGWWYNRCHAANPNGRYYWGGAYTWDMAKHGTDDGVVWMNWQGSWYSMKKMSMKIRPYFPEQ

SEQ ID NO: 1075 - protein, 481 aa, Bos taurus
MVTSTGTLPSLLLGTLLTFTSGALGANPGLVVRITDQGLEYVAQEELLALQSKLHKVTLPDFNGDVRIKHFGSVDYRFHSLNIQSCKLLGSALKLLPNQGLHFSISDSFIQVTGDWKVRKRILRLDGSFDVKVKGITISVNLLLDSEPSGRPKVAVSSCSSHIRDVEVHISGDLGWLLNLFHNQIESRFRRVLESKICEIIEDSVTSELQPYLQTLPVTTEIDHLAGLDYSLMGAPQATAQMLDVMFKGEIFSRDDRFPVAFLAPVMNLPEEHSRMVYFAISDYAFNTASLVYHKAGFLNFTITDDVIPPDSSIRQNTKSFRAFVPRIARLYPNTNLELQGAVISAPCLNFSPGNLSTAAQMEIEAFVLLPNSVKEPVFRLSVATNVSAMLTFNTSKITGFLEPGKIQVELKESKVGRFNVELLEALLNYYLLNNFYPKVNDKLAEGFPLPLLRKIQLYDPILQIHKDFLFLGTNVRYLRV

SEQ ID NO: 1076 - protein, 580 aa, Bos taurus
MTPDIQAPFLSLLLLFPVLTVANVPTLTTSDSINPRRTTPVSTTQSSPTSSPTKETSWSTTTTLLTASSPAPSPAASPGHDGASTPTSSPAPSPAASPGHDGASTPTSSPAPSPAASPGHDGASTPTSSPAPSPAASPGHDGASTPTSSPAPSPAASPGHNGTSSPTGSPAPSPAASPGHDGASTPTSSPAPSPAASPGHNGTSSPTGSPAPSPAASPGHDGASTPTSSPAPSPAASPGHNGTSSPTGSPAPSPTASPGHDSAPSLTSSPAPSPTASPGQHGASSPTSSDTSSMTTRSMSSSMVTSAHKGTSSRATMTPVSKGTPSSVPSSETAPTAASHITRTAASSPSIALSTSSNPKTSQQLSVRVSLYFLSFRITNLQFNSSLENPQTSYYQELQRSIWGLILQIYKQRDFLGLSEIKFRPGSVVVELTLAFREGTTAEWVKAQFSQLEAHAASYNLTISGVSVYSAPFPSSAQAGSGVPGWGIALLVLVCVLVALAIIYLIALVVCQCGRKKCEQLDVFPTLDAYHPMSEYSTYHTHGRYVPPGSTKRSPYEEVSAGNGGSNLSYTNLAATSANL

SEQ ID NO: 1077 - protein, 495 aa, Glycine max
MAKLVFSLCFLLFSGCCFAFSSREQPQQNECQIQKLNALKPDNRIESEGGLIETWNPNNKPFQCAGVALSRCTLNRNALRRPSYTNGPQEIYIQQGKGIFGMIYPGCPSTFEEPQQPQQRGQSSRPQDRHQKIYNFREGDLIAVPTGVAWWMYNNEDTPVVAVSIIDTNSLENQLDQMPRRFYLAGNQEQEFLKYQQEQGGHQSQKGKHQQEEENEGGSILSGFTLEFLEHAFSVDKQIAKNLQGENEGEDKGAIVTVKGGLSVIKPPTDEQQQRPQEEEEEEEDEKPQCKGKDKHCQRPRGSQSKSRRNGIDETICTMRLRHNIGQTSSPDIYNPQAGSVTTATSLDFPALSWLRLSAEFGSLRKNAMFVPHYNLNANSIIYALNGRALIQVVNCNGERVFDGELQEGRVLIVPQNFVVAARSQSDNFEYVSFKTNDTPMIGTLAGANSLLNALPEEVIQHTFNLKSQQARQIKNNNPFKFLVPPQESQKRAVA

SEQ ID NO: 1078 - protein, 605 aa, Glycine max
MMRARFPLLLLGLVFLASVSVSFGIAYWEKENPKHNKCLQSCNSERDSYRNQACHARCNLLKVEKEECEEGEIPRPRPRPQHPEREPQQPGEKEEDEDEQPRPIPFPRPQPRQEEEHEQREEQEWPRKEEKRGEKGSEEEDEDEDEEQDERQFPFPRPPHQKEERKQEEDEDEEQQRESEESEDSELRRHKNKNPFLFGSNRFETLFKNQYGRIRVLQRFNQRSPQLQNLRDYRILEFNSKPNTLLLPNHADADYLIVILNGTAILSLVNNDDRDSYRLQSGDALRVPSGTTYYVVNPDNNENLRLITLAIPVNKPGRFESFFLSSTEAQQSYLQGFSRNILEASYDTKFEEINKVLFSREEGQQQGEQRLQESVIVEISKEQIRALSKRAKSSSRKTISSEDKPFNLRSRDPIYSNKLGKFFEITPEKNPQLRDLDIFLSIVDMNEGALLLPHFNSKAIVILVINEGDANIELVGLKEQQQEQQQEEQPLEVRKYRAELSEQDIFVIPAGYPVVVNATSNLNFFAIGINAENNQRNFLAGSQDNVISQIPSQVQELAFPGSAQAVEKLLKNQRESYFVDAQPKKKEEGNKGRKGPLSSILRAFY

SEQ ID NO: 1079 - protein, 621 aa, Glycine max
MMRARFPLLLLGVVFLASVSVSFGIAYWEKQNPSHNKCLRSCNSEKDSYRNQACHARCNLLKVEEEEECEEGQIPRPRPQHPERERQQHGEKEEDEGEQPRPFPFPRPRQPHQEEEHEQKEEHEWHRKEEKHGGKGSEEEQDEREHPRPHQPHQKEEEKHEWQHKQEKHQGKESEEEEEDQDEDEEQDKESQESEGSESQREPRRHKNKNPFHFNSKRFQTLFKNQYGHVRVLQRFNKRSQQLQNLRDYRILEFNSKPNTLLLPHHADADYLIVILNGTAILTLVNNDDRDSYNLQSGDALRVPAGTTYYVVNPDNDENLRMITLAIPVNKPGRFESFFLSSTQAQQSYLQGFSKNILEASYDTKFEEINKVLFGREEGQQQGEERLQESVIVEISKKQIRELSKHAKSSSRKTISSEDKPFNLRSRDPIYSNKLGKLFEITPEKNPQLRDLDVFLSVVDMNEGALFLPHFNSKAIVVLVINEGEANIELVGIKEQQQRQQQEEQPLEVRKYRAELSEQDIFVIPAGYPVVVNATSDLNFFAFGINAENNQRNFLAGSKDNVISQIPSQVQELAFPGSAKDIENLIKSQSESYFVDAQPQQKEEGNKGRKGPLSSILRAFY

SEQ ID NO: 1080 - protein, 563 aa, Glycine max
MGKPFTLSLSSLCLLLLSSACFAISSSKLNECQLNNLNALEPDHRVESEGGLIQTWNSQHPELKCAGVTVSKLTLNRNGLHLPSYSPYPRMIIIAQGKGALGVAIPGCPETFEEPQEQSNRRGSRSQKQQLQDSHQKIRHFNEGDVLVIPPGVPYWTYNTGDEPVVAISLLDTSNFNNQLDQTPRVFYLAGNPDIEYPETMQQQQQQKSHGGRKQGQHQQEEEEEGGSVLSGFSKHFLAQSFNTNEDIAEKLQSPDDERKQIVTVEGGLSVISPKWQEQQDEDEDEDEDDEDEQIPSHPPRRPSHGKREQDEDEDEDEDKPRPSRPSQGKREQDQDQDEDEDEDEDQPRKSREWRSKKTQPRRPRQEEPRERGCETRNGVEENICTLKLHENIARPSRADFYNPKAGRISTLNSLTLPALRQFQLSAQYVVLYKNGIYSPHWNLNANSVIYVTRGQGKVRVVNCQGNAVFDGELRRGQLLVVPQNFVVAEQAGEQGFEYIVFKTHHNAVTSYLKDVFRAIPSEVLAHSYNLRQSQVSELKYEGNWGPLVNPESQQGSPRVKVA

SEQ ID NO: 1081 - protein, 491 aa, Glycine max
MGKPFFTLSLSSLCLLLLSSACFAITSSKFNECQLNNLNALEPDHRVESEGGLIETWNSQHPELQCAGVTVSKRTLNRNGLHLPSYSPYPQMIIVVQGKGAIGFAFPGCPETFEKPQQQSSRRGSRSQQQLQDSHQKIRHFNEGDVLVIPPGVPYWTYNTGDEPVVAISLLDTSNFNNQLDQNPRVFYLAGNPDIEHPETMQQQQQQKSHGGRKQGQHQQQEEEGGSVLSGFSKHFLAQSFNTNEDTAEKLRSPDDERKQIVTVEGGLSVISPKWQEQEDEDEDEDEEYEQTPSYPPRRPSHGKHEDDEDEDEEEDQPRPDHPPQRPSRPEQQEPRGRGCQTRNGVEENICTMKLHENIARPSRADFYNPKAGRISTLNSLTLPALRQFGLSAQYVVLYRNGIYSPHWNLNANSVIYVTRGKGRVRVVNCQGNAVFDGELRRGQLLVVPQNFVVAEQGGEQGLEYVVFKTHHNAVSSYIKDVFRAIPSEKV

SEQ ID NO: 1082 - protein, 481 aa, Glycine max
MAKLVLSLCFLLFSGCCFAFSFREQPQQNECQIQRLNALKPDNRIESEGGFIETWNPNNKPFQCAGVALSRCTLNRNALRRPSYTNAPQEIYIQQGSGIFGMIFPGCPSTFEEPQQKGQSSRPQDRHQKIYHFREGDLIAVPTGFAYWMYNNEDTPVVAVSLIDTNSFQNQLDQMPRRFYLAGNQEQEFLQYQPQKQQGGTQSQKGKRQQEEENEGGSILSGFAPEFLEHAFVVDRQIVRKLQGENEEEEKGAIVTVKGGLSVISPPTEEQQQRPEEEEKPDCDEKDKHCQSQSRNGIDETICTMRLRHNIGQTSSPDIFNPQAGSITTATSLDFPALSWLKLSAQFGSLRKNAMFVPHYNLNANSIIYALNGRALVQVVNCNGERVFDGELQEGQVLIVPQNFAVAARSQSDNFEYVSFKTNDRPSIGNLAGANSLLNALPEEVIQQTFNLRRQQARQVKNNNPFSFLVPPKESQRRVVA

SEQ ID NO: 1083 - protein, 516 aa, Glycine max
MGKPFFTLSLSSLCLLLLSSACFAITSSKFNECQLNNLNALEPDHRVESEGGLIETWNSQHPELQCAGVTVSKRTLNRNGSHLPSYLPYPQMIIVVQGKGAIGFAFPGCPETFEKPQQQSSRRGSRSQQQLQDSHQKIRHFNEGDVLVIPLGVPYWTYNTGDEPVVAISPLDTSNFNNQLDQNPRVFYLAGNPDIEHPETMQQQQQQKSHGGRKQGQHRQQEEEGGSVLSGFSKHFLAQSFNTNEDTAEKLRSPDDERKQIVTVEGGLSVISPKWQEQEDEDEDEDEEYGRTPSYPPRRPSHGKHEDDEDEDEEEDQPRPDHPPQRPSRPEQQEPRGRGCQTRNGVEENICTMKLHENIARPSRADFYNPKAGRISTLNSLTLPALRQFGLSAQYVVLYRNGIYSPDWNLNANSVTMTRGKGRVRVVNCQGNAVFDGELRRGQLLVVPQNPAVAEQGGEQGLEYVVFKTHHNAVSSYIKDVFRVIPSEVLSNSYNLGQSQVRQLKYQGNSGPLVNP

SEQ ID NO: 1084 - protein, 504 aa, Glycine max
MAMRTKLSLAIFFFFLLALFSNLAFGKCKETEVEEEDPELVTCKHQCQQPQQYTEGDKRVCLQRCDRYHRMKQEREKQIQEETREKKEEESREREEEQQEQHEEQDENPYIFEEDKDFETRVETEGGRIRVLKKFTEKSKLLQGIENFRLAILEARAHTFVSPRHFDSEVVFFNIKGRAVLGLVSESETEKITLEPGDMIHIPAGTPLYIVNRDENDKLFLAMLHIPVSVSTPGKFEEFFGPGGRDPESVLSAFSWNVLQAALQTPKGKLEKLFDQQNEGSIFAISREQVRALAPTKKSSWWPFGGESKPQFNIFSKRPTISNGYGRLTEVGPDDDEKSWLQRLNLMLTFTNITQRSMSTIHYNSHATKIALVIDGRGHLQISCPHMSSRSSHSKHDKSSPSYHRISSDLKPGMVFVVPPGHPFVTIASNKENLLMICFEVNARDNKKFTFAGKDNIVSSLDNVAKELAFNYPSEMVNGVFDRKESFFFPFELPREERGRRADA

SEQ ID NO: 1085 - protein, 857 aa, Glycine max
MLGGLLHRGHKIKGTVVLMRKNVLDVNSVTSVGGIIGQGLDLVGSTLDTLTAFLGRSVSLQLISATKADANGKGKLGKATFLEGIITSLPTLGAGQSAFKINFEWDDGSGIPGAFYIKNFMQTEFFLVSLTLEDIPNHGSIHFVCNSWIYNAKLFKSDRIFFANQTYLPSETPAPLVKYREEELHNLRGDGTGERKEWERIYDYDVYNDLGDPDKGENHARPVLGGNDTFPYPRRGRTGRKPTRKDPNSESRSNDVYLPRDEAFGHLKSSDFLTYGLKSVSQNVLPLLQSAFDLNFTPREFDSFDEVHGLYSGGIKLPTDIISKISPLPVLKEIFRTDGEQALKFPPPKVIQVSKSAWMTDEEFAREMLAGVNPNLIRCLKDFPPRSKLDSQVYGDHTSQITKEHLEPNLEGLTVDEAIQNKRLFLLDHHDPIMPYLRRINATSTKAYATRTILFLKNDGTLRPLAIELSLPHPQGDQSGAFSQVFLPADEGVESSIWLLAKAYVVVNDSCYHQLVSHWLNTHAVVEPFIIATNRHLSVVHPIYKLLHPHYRDTMNINGLARLSLVNDGGVIEQTFLWGRYSVEMSAVVYKDWVFTDQALPADLIKRGMAIEDPSCPHGIRLVIEDYPYAVDGLEIWDAIKTWVHEYVFLYYKSDDTLREDPELQACWKELVEVGHGDKKNEPWWPKMQTREELVEACAIIIWTASALHAAVNFGQYPYGGLILNRPTLSRRFMPEKGSAEYEELRKNPQKAYLKTITPKFQTLIDLSVIEILSRHASDEVYLGERDNPNWTSDTRALEAFKRFGNKLAQIENKLSERNNDEKLRNRCGPVQMPYTLLLPSSKEGLTFRGIPNSISI

SEQ ID NO: 1086 - protein, 524 aa, Glycine max
MGMRTKLSLAIFFFFLLALFSNLAFGKCKETEVEEEDPELVTCKHQCQQQQQYTEGDKRVCLQSCDRYHRMKQEREKQIQEETREKKEEESREREEEQQEQHEEQDENPYIFEEDKDFETRVETEGGRIRVLKKFTEKSKLLQGIENFRLAILEARAHTFVSPRHFDSEVVFFNIKGRAVLGLVSESETEKITLEPGDMIHIPAGTPLYIVNRDENDKLFLAMLHIPVSVSTPGKFEEFFAPGGRDPESVLSAFSWNVLQAALQTPKGKLENVFDQQNEGSIFRISREQVRALAPTKKSSWWPFGGESKPQFNIFSKRPTISNGYGRLTEVGPDDDEKSWLQRLNLMLTFTNITQRSMSTIHYNSHATKIALVIDGRGHLQISCPHMSSRSSHSKHDKSSPSYHRISSDLKPGMVFVVPPGHPFVTIASNKENLLMICFEVNARDNKKFTFAGKDNIVSSLDNVAKELAFNYPSEMVNGVFLLQRFLERKLIGRLYHLPHKDRKESFFFPFELPREERGRRADA

SEQ ID NO: 1087 - protein, 506 aa, Glycine max
MDHLKPRVSLLFLTDLTMATRAKLSLAIFLFFLLALISNLALGKLKETEVEEDPELVTCKHQCQQQRQYTESDKRTCLQQCDSMKQEREKQVEEETREKEEEHQEQHEEEEDENPYVFEEDKDFSTRVETEGGSIRVLKKFTEKSKLLQGIENFRLAILEARAHTFVSPRHFDSEVVLFNIKGRAVLGLVRESETEKITLEPGDMIHIPAGTPLYIVNRDENEKLLLAMLHIPVSTPGKFEEFFGPGGRDPESVLSAFSWNVLQAALQTPKGKLERLFNQQNEGSIFKISRERVRALAPTKKSSWWPFGGESKAQFNIFSKRPTFSNGYGRLTEVGPDDEKSWLQRLNLMLTFTNITQRSMSTIHYNSHATKIALVMDGRGHLQISCPHMSSRSDSKHDKSSPSYHRISADLKPGMVFVVPPGHPFVTIASNKENLLIICFEVNVRDNKKFTFAGKDNIVSSLDNVAKELAFNYPSEMVNGVFERKESLFFPFELPSEERGRRAVA

SEQ ID NO: 1088 - protein, 865 aa, Glycine max
MFSVPGVSGILNRGGGHKIKGTVVLMRKNVLDFNSVADLTKGNVGGLIGTGLNVVGSTLDNLTAFLGRSVALQLISATKPLANGKGKVGKDTFLEGIIVSLPTLGAGESAFNIQFEWDESMGIPGAFYIKNYMQVEFYLKSLTLEDVPNQGTIRFVCNSWVYNTKLYKSVRIFFANHTYVPSETPAALVGYREEELKNLRGDGKGERKEHDRIYDYDVYNDLGNPDHGENFARPILGGSSTHPYPRRGRTGRYPTRKDQNSEKPGEVYVPRDENFGHLKSSDFLAYGIKSLSQYVLPAFESVFDLNFTPNEFDSFQDVRDLHEGGIKLPTEVISTIMPLPVVKELFRTDGEQVLKFPPPHVIQVSKSAWMTDEEFAREMVAGVNPCVIRGLQEFPPKSNLDPTIYGEQTSKITADALDLDGYTVDEALASRRLFMLDYHDVFMPYIRRINQTYAKAYATRTILFLRENGTLKPVAIELSLPHPAGDLSGAVSQVILPAKEGVESTIWLLAKAYVVVNDSCYHQLMSHWLNTHAVIEPFIIATNRHLSALHPIYKLLTPHYRDTMNINALARQSLINADGIIEKSFLPSKHSVEMSSAVYKNWVFTDQALPADLIKRGVAIKDPSAPHGLRLLIEDYPYAVDGLEIWAAIKTWVQEYVSLYYARDDDVKPDSELQQWWKEAVEKGHGDLKDKPWWPKLQTIEELVEICTIIIWTASALHAAVNFGQYPYGGFILNRPTSSRRLLPEKGTPEYEEMVKSHQKAYLRTITSKFQTLVDLSVIEILSRHASDEVYLGQRDNPHWTSDSKALQAFQKFGNKLKEIEEKLARKNNDQSLSNRLGPVQLPYTLLHPNSEGLTCRGIPNSISI

SEQ ID NO: 1089 - protein, 357 aa, Glycine max
MSTAGQVIKCRAAVAWEAGKPLSIETIEVAPPQKGEVRLKILFNSLCRTDVYWWDAKGQTPLFPRILGHEASGIVESVGKGVTHLKPGDHALPIFTGECGECTYCKSEESNLCELLRINTDRGVMLSDGKTRFSKNGQPIYHFVGTSTFSEYTVLHEGCVAKINPAAPLDKVAVVSCGFCTGFGATVNVAKPKPNNTVAVFGLGAVGLAACEGARVSGASRIIGVDLLTNRFEQAKQFGVTDFVNPKDHNKPVQEVIAEMTNGGVDRAIECTGSIQASISAFECTHDGWGTAVLVSVPKKDAEFKTHPMKFMEGRTLKGTFYGHYRPRTDIPGVVEKYLNKVITMLDFIFISFKDKT

SEQ ID NO: 1090 - protein, 216 aa, Glycine max
MKSTIFFLFLFCAFTTSYLPSAIADFVLDNEGNPLENGGTYYILSDITAFGGIRAAPTGNERCPLTVVQSRNELDKGIGTIISSPYRIRFIAEGHPLSLKFDSFAVIMLCVGIPTEWSVVEDLPEGPAVKIGENKDAMDGWFRLERVSDDEFNNYKLVFCPQQAEDDKCGDIGISIDHDDGTRRLVVSKNKPLVVQFQKLDKESLAKKNHGLSRSE

SEQ ID NO: 1091 - protein, 839 aa, Glycine max
MFSAGHKIKGTVVLMPKNELEVNPDGSAVDNLNAFLGRSVSLQLISATKADAHGKGKVGKDTFLEGINTSLPTLGAGESAFNIHFEWDGSMGIPGAFYIKNYMQVEFFLKSLTLEAISNQGTIRFVCNSWVYNTKLYKSVRIFFANHTYVPSETPAPLVSYREEELKSLRGNGTGERKEYDRIYDYDVYNDLGNPDKSEKLARPVLGGSSTFPYPRRGRTGRGPTVTDPNTEKQGEVFYVPRDENLGHLKSKDALEIGTKSLSQIVQPAFESAFDLKSTPIEFHSFQDVHDLYEGGIKLPRDVISTIIPLPVIKELYRTDGQHILKFPQPHVVQVSQSAWMTDEEFAREMIAGVNPCVIRGLEEFPPKSNLDPAIYGDQSSKITADSLDLDGYTMDEALGSRRLFMLDYHDIFMPYVRQINQLNSAKTYATRTILFLREDGTLKPVAIELSLPHSAGDLSAAVSQVVLPAKEGVESTIWLLAKAYVIVNDSCYHQLMSHWLNTHAAMEPFVIATHRHLSVLHPIYKLLTPHYRNNMNINALARQSLINANGIIETTFLPSKYSVEMSSAVYKNWVFTDQALPADLIKRGVAIKDPSTPHGVRLLIEDYPYAADGLEIWAAIKTWVQEYVPLYYARDDDVKNDSELQHWWKEAVEKGHGDLKDKPWWPKLQTLEDLVEVCLIIIWIASALHAAVNFGQYPYGGLIMNRPTASRRLLPEKGTPEYEEMINNHEKAYLRTITSKLPTLISLSVIEILSTHASDEVYLGQRDNPHWTSDSKALQAFQKFGNKLKEIEEKLVRRNNDPSLQGNRLGPVQLPYTLLYPSSEEGLTFRGIPNSISI

SEQ ID NO: 1092 - protein, 338 aa, Glycine max
MGKVKIGINGFGRIGRLVARVALQRDDVELVAVNDPFITTDYMTYMFKYDSVHGHWKHHDVTVKDEKTLLFGDKPVTIFGHRNPEEIPWGSTGADIIVESTGVFTDKDKAAAHLKGGAKKVIISAPSKDAPMFVVGVNEHEYKPELDIISNASCTTNCLAPLAKVINDRFGIVEGLMTTVHSITATQKTVDGPSAKDWRGGRAASFNIIPSSTGAAKAVGKVLPALNGKLTGMAFRVPTVDVSVVDLTVRLEKEASYDEIKNAIKEESEGKLKGILGYTEDDVVSTDFIGDSRSSIFDAKAGIALNKNFVKLVSWYDNEWGYSSRVIDLLVFVAKKSL

SEQ ID NO: 1093 - protein, 388 aa, Glycine max
MSDPTLAQPHLVEVHTTLETVVTTHNHNHRPSINASGEKKKIVGVFYKGNEYAKLNPNFVGCVEGALGIREWLESQGHQYIVTDDKEGPDSELEKHIPDAHVIISTPFHPAYVTAERIKKAQKLELLLTAGIGSDHVDLKAAAAAGLTVAEVTGSNVVSVAEDELMRILILMRNFLPGYHQAVKGEWNVAGIAHRAYDLEGKTVGTVGAGRIGKLLLQRLKPFNCNLLYFDRLRIDPELEKEIGAKFEEDLDAMLPKCDVIVINTPLTEQTRGLFDKNRIAKCKKGVLIVNNARGAIADTQAIADACSSGHVAGYSGDVWFPQPAPKDHPWRYMPNHAMTPHISGTTIDAQLRYAAGVKDMLDRHFKGEDFPEQNYIVKEGQLASQYR

SEQ ID NO: 1094 - protein, 340 aa, Glycine max
MASDKKIRIGINGFGRIGRLVARVALQRNDVELVAVNDPFITTDYMTYMFKYDTVHGQWKHFDVKVKDSKTLLFGEKPVTVFGIRNPEEIPWGEVGADYVVESTGVFTDKDKAAAHLKGGAKKVVISAPSKDAPMFVVGVNEKEYKPELDIVSNASCTTNCLAPLAKVINDRFGIVEGLMTTVHAITATQKTVDGPSNKDWRGGRAASFNIIPSSTGAAKAVGKVLPALNGKLTGMSFRVPTVDVSVVDLTVRLEKPATYEQIKSAIKEESEGKLKGILGYTEDDVVSTDFVGDNRSSIFDAKAGISLNDNFVKLVSWYDNEWGYSSRVIDLIVHIASVA

SEQ ID NO: 1095 - protein, 426 aa, Glycine max
MYPIHLAYLPITAVFYSSTAFLKPYLSPTSATSYSNHFLFSRSHGYANNHHTLTVFFSFSTLHSVSSDVIFLLLSFLIFVLFSNELHGSGKVKIGINGFGRIGRLVARVALQRDDVELVAVNDPFITTDYMTYMFKYDSVHGHWKHHDVTVKDEKTLLFGDKPVTVFGHRNPEEIPWKSTGADIIVESTGVFTDKDKAAAHLKGGAKKVIISAPSKDAPMFVVGVNEHEYKPELDIISNASCTTNCLAPLAKVINDRFGIVEGLMTTVHSITATQKTVDGPSAKDWRGGRAASFNIIPSSTGAAKAVGKVLPALNGKLTGMAFRVPTVDVSVVDLTVRLEKEASYDEIKNAIKEESEGKLKGILGYTEDDVVSTDFVGDSRSSIFDAKAGIALNKNFVKLVSWYDNEWGYSSRVIDLLVFVAKKSF

SEQ ID NO: 1096 - protein, 338 aa, Glycine max
MGKVKIGINGFGRIGRLVARVALQRDDVELVAVNDPFITTDYMTYMFKYDSVHGHWKHHDVTVKDEKTLLFGDKAVTVFGHRNPEEIPWGSTGADIIVESTGVFTDKDKAAAHLKGGAKKVIISAPSKDAPMFVVGVNEHEYKPELDIISNASCTTNCLAPLAKVINDRFGIVEGLMTTVHSITATQKTVDGPSAKDWRGGRAASFNIIPSSTGAAKAVGKVLPALNGKLTGMAFRVPTVDVSVVDLTVRLEKEASYDEIKNAIKEESEGKLKGILGYTEDDVVSTDFVGDNRSSIFDAKAGIALNKNFVKLVSWYDNEWGYSSRVIDLLVIVAKKSF

SEQ ID NO: 1097 - protein, 439 aa, Glycine max
MMRVRFPLLVLLGTVFLASVCVSLKVREDENNPFYLRSSNSFQTLFENQNGRIRLLQRFNKRSPQLENLRDYRIVQFQSKPNTILLPHHADADFLLFVLSGRAILTLVNNDDRDSYNLHPGDAQRIPAGTTYYLVNPHDHQNLKIIKLAIPVNKPGRYDDFFLSSTQAQQSYLQGFSHNILETSFHSEFEEINRVLFGEEEEQRQQEGVIVELSKEQIRQLSRRAKSSSRKTISSEDEPFNLRSRNPIYSNNFGKFFEITPEKNPQLRDLDIFLSSVDINEGALLLPHFNSKAIVILVINEGDANIELVGIKEQQQKQKQEEEPLEVQRYRAELSEDDVFVIPAAYPFVVNATSNLNFLAFGINAENNQRNFLAGEKDNVVRQIERQVQELAFPGSAQDVERLLKKQRESYFVDAQPQQKEEGSKGRKGPFPSILGALY

SEQ ID NO: 1098 - protein, 389 aa, Glycine max
MSDPTLAQQHLVKVHTTTHETVVTTHNHNQTPSINASGEKKKIVGVFYKGNEYAKLNPNFVGCVEGALGIREWLESQGHQYIVTDDKEGPDSELEKHIPDAHVIISTPFHPAYVTAERIKKAKNLELLLTAGIGSDHVDLKAAAAAGLTVAEVTGSNVVSVAEDELMRILILMRNFLPGYHQAVNGEWNVAGIAHRAYDLEGKTVGTVGAGRIGKLLLQRLKPFSCNLLYFDRLRIDPELEKEIGAKFEEDLDAMLPKCDVIVINTPLTEQTRGLFDKNRIAKCKKGVLIVNNARGAIADTQAIADACSSGHVAGYSGDVWFPQPAPKDHPWRYMPNHAMTPHISGTTIDAQLRYAAGVKDMLDRHFKGEDFPEQNYIVKEGQLASQYR

SEQ ID NO: 1099 - protein, 226 aa, Glycine max
MTTQVPPHSVQVHTTTHRYEAGVVPPGARFEPPRYEAGVKAPSIYHSERGPTTSQVLAVLAGLPVGGILLLLAGLTLAGTLTGLAVATPLFVLFSPVLVPATVAIGLAVAGFLTSGAFGLTALSSFSWILNYIRETQPASENLAAAAKHHLAEAAEYVGQKTKEVGQKTKEVGQDIQSKAQDTREAAARDAREAAARDAREAAARDAKVEARDVKRTTVTATTATA

SEQ ID NO: 1100 - protein, 223 aa, Glycine max
MTTVPPHSVQVHTTTHRYEAGVVPPARFEAPRYEAGIKAPSSIYHSERGPTTSQVLAVVAGLPVGGILLLLAGLTLAGTLTGLVVATPLFIIFSPVLIPATVAIGLAVAGFLTSGVFGLTALSSFSWILNYIRETQPASENLAAAAKHHLAEAAEYVGQKTKEVGQKTKEVGQDIQSKAQDTREAAARDARDAREAAARDARDAKVEARDVKRTTVTATTATA

SEQ ID NO: 1101 - protein, 584 aa, Glycine max
MIARFPLLPLLLLGIVFLASVSVSLQVKPPSHHECLQSCESETDPYKRKACKLSCKFVPEHGEQQHEEEEREREHPQPHPPHEERGRRERGRQEGEKEEKEQDERELQPRPFPRPEEHEGEQWKGRHRHEDPEERARMRLREAERIEREREEQRVREEEEKLRRREKKEQREEKEEEGQGSEDSHSKRQNNPFHFSSNRFQTLFKNQHGHLRVLQRFDQRSPQLENLRDYRVVELMAKPNTLFLPHHADADFLLLVLSGRALINLVKPDDRDPYYLDRGYAQRIPAGTTVYLVNPDKKKDLRVIKLAIPVNKPGNFEDFFLSSTQDQQSYLQGFSENILEASFNTKFEEINRVLFGGEGRRHQQEGVILELSKEQIRELSKRAKSSSRSTNSFDYEPFYLRGSQISSNNFGKFYEITPEKNPQLRDFDILLNTVDINEGGLLLPHYNSKAIVILMVTEGEANIELVGLKEQQQGEETREVRKYRAELSEDDIFVIPAAYPFVVNATSNLNFVAFGINAENNQRNFLAGSKDNVIRQIQKQVKELAFPAGSAQDIENLIKNQRESYFADAQPLQKEEGKKGSFVF

SEQ ID NO: 1102 - protein, 358 aa, Glycine max
MSHFKGKYHDELIANAAYIGTPGKGILAADESTGTIGKRLASISVENIESNRRALRELLFTAPGVLQYLSGVILFEETLYQSTAAGKPFVNVLKEAGVLPGIKVDKGTVELAGTNGETTTQGLDGLGQRCAKYYEAGARFAKWRAVLKIGPNEPSELSIHENAYGLARYAVICQENGLVPIVEPEILVDGPHDIHKCAAVTERVLAACYKALNDHHVLLEGTLLKPNMVTPGSQSAKVSPQVVAEHTVRALQRTVPAAVPAVVFLSGGQSEEEASVNLNAINQVNGKKPWSLSFSFGRALQQSTLKAWGGKEENVKKAQEALLVRAKANSEATLGTYKGNSQLADGASESLHVSNYSY

SEQ ID NO: 1103 - protein, 427 aa, Glycine max
MASILHYFLALSLSCSFLFFLSDSVTPTKPINLVVLPVQNDGSTGLHWANLQKRTPLMQVPVLVDLNGNHLWVNCEQQYSSKTYQAPFCHSTQCSRANTHQCLSCPAASRPGCHKNTCGLMSTNPITQQTGLGELGEDVLAIHATQGSTQQLGPLVTVPQFLFSCAPSFLVQKGLPRNTQGVAGLGHAPISLPNQLASHFGLQRQFTTCLSRYPTSKGAIIFGDAPNNMRQFQNQDIFHDLAFTPLTITLQGEYNVRVNSIRINQHSVFPLNKISSTIVGSTSGGTMISTSTPHMVLQQSVYQAFTQVFAQQLPKQAQVKSVAPFGLCFNSNKINAYPSVDLVMDKPNGPVWRISGEDLMVQAQPGVTCLGVMNGGMQPRAEITLGARQLEENLVVFDLARSRVGFSTSSLHSHGVKCADLFNFANA

SEQ ID NO: 1104 - protein, 380 aa, Glycine max
MSSTVGQTIKCKAAIAWEAGKPLVIEEVEVAPPQAGEVRLKILYTSLCHTDVYFWDAKGQTPLFPRIFGHEASGIVESVGEGVTHLKPGDHALPVFTGECGDCAHCKSEESNMCELLRINTDRGVMIHDGQSRFSKNGQPIHHFLGTSTFSEYTVVHAGCVAKINPAAPLDKVCVLSCGICTGFGATVNVAKPKPGSSVAIFGLGAVGLAAAEGARVSGASRIIGVDLVSARFEEAKKFGVNEFVNPKDHDKPVQQVIAEMTNGGVDRAVECTGSIQAMVSAFECVHDGWGLAVLVGVPSKDDAFKTAPINFLNERTLKGTFYGNYKPRTDLPSVVEKYMSGELEVDKFITHTVPFSEINKAFDLMLKGQSIRCIIRMQE

SEQ ID NO: 1105 - protein, 377 aa, Glycine max
MADAEDIQPLVVDNGTGMVKAGFAGDDAPRAVFPSIIGRPRHTGVMVGMGQKDAYVGDEAQSKRGILTLKYPIEHGIVSNWDDMEKIWHHTFYNELRVAPEEHPVLLTEAPLNPKANREKMTQIMFETFNVPAMYVAIQAVLSLYASGRTTGIVLDSGDGVSHTVPIYEGYALPHAILRLDLAGRDLTEYLVKILTERGYSFSTSAEKEIVRDVKEKLAYVALDFEQEMETTKSSSAVEKSYELPDGQVITIGSERFRCPEVLFQPSLIGMEATGIHETTYNSIMKCDVDIRKDLYGNIVLSGGSTMFPGIADRMSKEIGALAPSSMKIKVVAPPERKYSVWIGGSILASLSTFQQMWISKGEYDESGPAIVHRKCF

SEQ ID NO: 1106 - protein, 371 aa, Glycine max
MRAAAVAWEAGKPLSIETIEVAPPQKGEVRLRILFNSLCRSDVYWWDAKDQTPLFPRILGHEASGIVESVGEGVTHLKPGDHALPIFTGECGECTYCKSEESNLCELLRINTDRGVMLSDGKTRFSKNGQPIYHFVGTSTFSEYTVLHEGCVAKINPNAPLDKVAIVSCGFCTGFGATVNVAKPKPNNTVAVFGLGAVGLAACEGARVSGASRIIGVDLLPNRFEQAKKFGVTDFVNPKDHNKPVQEVIAEMTNGGVDRAIECTGSIQASISAFECTHDGWGTAVLVGVPKKDVEFKTNPMKFMEGRTLKGTFYGHYRPRTDIPGVVEKYLNKELELDKFITHSVPFSKINTAFDLMLKGEGIRCLICMEE

SEQ ID NO: 1107 - protein, 433 aa, Glycine max
MASILHYFLALSLSFSFLFFLSDSVPIPQHHTNPTKPINLLVLPVQNDASTGLHWANLQKRTPLMQVPVLVDLNGNHLWVNCEQHYSSKTYQAPFCHSTQCSRANTHQCLSCPAASRPGCHKNTCGLMSTNPITQQTGLGELGQDVLAIHATQGSTQQLGPLVTVPQFLFSCAPSFLLQKGLPRNIQGVAGLGHAPISLPNQLASHFGLQHQFTTCLSRYPTSKGALIFGDAPNNMQQFHNQDIFHDLAFTPLTVTPQGEYNVRVSSIRINQHSVFPPNKISSTIVGSSGGTMISTSTPHMVLQQSLYQAFTQVFAQQLEKQAQVKSVAPFGLCFNSNKINAYPSVDLVMDKPNGPVWRISGEDLMVQAQPGVTCLGVMNGGMQPRAEVTLGTRQLEEKLMVFDLARSRVGFSTSSLHSHGVKCGDLFNFANA

SEQ ID NO: 1108 - protein, 349 aa, Glycine max
MSSSTVGQVIKCKAAVSWEAGKPLVIEEVEVAPPQAGEVRLKILYTSLCHTDVYFWEAKGQTPLFPRIFGHEAGGIVESVGEGVTHLKPGDHALPVFTGECGECPHCKSEESNMCDLLRINTDRGVMIHDSQTRFSIKGQPIYHFVGTSTFSEYTVVHAGCVAKVNPAAPLDKICVLSCGICTGLGATINVAKPKPGSSVAIFGLGAVGLAAAEGARISGASRIIGVDLVSSRFEEAKKFGVNEFVNPKDHDKPVQEVIAAMTNGGVDRAVECTGSIQAMISAFECVHDGWGVAVLVGVPNKDDAFKTHPVNFLNERTLKGTFYGNYKPRTDLPSVVEKYMNGVSFNID

SEQ ID NO: 1109 - protein, 763 aa, Glycine max
MASHIVGYPRMGPKRELKFALESFWDGKSSAEDLQKVSSDLRASIWKQMADAGIKYIPSNTFSHYDQVLDATATLGAVPPRYGWTGGEIGFDTYFSMARGNATVPAMEMTKWFDTNYHFIVPELGPDVNFTYASHKAVDEYKEAKALGVDTVPVLVGPVTYLLLSKPAKGVEKSFSLLSLLPKVLAVYKEVIADLKAAGASWIQFDEPTLVLDLESHKLQAFTDAYAELAPALSGLNVLVETYFADIPAEAYKTLTSLNGVTAYGFDLVRGTNTLDLIKGGFPSGKYLFAGVVDGRNIWANDLAASLTTLQGLEGIVGKDKLVVSTSSSLLHTAVDLVNETKLDDEIKSWLAFAAQKIVEVNALAKALSGHKDEAFFSGNAAALASRKSSPRVTNEAVQKAAAALKGSDHRRATNVSARLDSQQKKLNLPILPTTTIGSFPQTVELRRVRREFKANKISEEEYVKSIKEEIRKVVELQEELDIDVLVHGEPERNDMVEYFGEQLSGFAFTVNGWVQSYGSRCVKPPIIYGDVSRPKPMTVFWSSLAQSFTKRPMKGMLTGPVTILNWSFVRNDQPRSETTYQIALSIKDEVEDLEKAGITVIQIDEAALREGLPLRKSEQAHYLDWAVHAFRITNVGVQDTTQIHTHMCYSNFNDIIHSIIDMDADVITIENSRSDEKLLSVFREGVKYGAGIGPGVYDIHSPRIPPTEEIADRINKMLAVLEKNILWVNPDCGLKTRKYTEVKPALTNMVAAAKLIRNELAK

SEQ ID NO: 1110 - protein, 285 aa, Glycine max
MATSKLKTQNVVVSLSLTLTLVLVLLTSKANSAETVSFSWNKFVPKQPNMILQGDAIVTSSGKLQLNKVDENGTPKPSSLGRALYSTPIHIWDKETGSVASFAASFNFTFYAPDTKRLADGLAFFLAPIDTKPQTHAGYLGLFNENESGDQVVAVEFDTFRNSWDPPNPHIGINVNSIRSIKTTSWDLANNKVAKVLITYDASTSLLVASLVYPSQRTSNILSDVVDLKTSLPEWVRIGFSAATGLDIPGESHDVLSWSFASNLPHASSNIDPLDLTSFVLHEAI

SEQ ID NO: 1111 - protein, 158 aa, Glycine max
MTKFTILLISLLFCIAHTCSASKWQHQQDSCRKQLQGVNLTPCEKHIMEKIQGRGDDDDDDDDDNHILRTMRGRINYIRRNEGKDEDEEEEGHMQKCCTEMSELRSPKCQCKALQKIMENQSEELEEKQKKKMEKELINLATMCRFGPMIQCDLSSDD

SEQ ID NO: 1112 - protein, 805 aa, Glycine max
MATDRLTRVHSLRERLDETLTANRNEILALLSRIEAKGKGILQHHQVIAEFEEIPEENRQKLTDGAFGEVLRSTQEAIVLPPWVALAVRPRPGVWEYLKVNVHALVVEELQPAEYLHFKEELVDGSSNGNFVLELDFEPFNAAFPRPTLNKSIGNGVQFLNRHLSAKLFHDKESLHPLLEFLRLHSVKGKTLMLNDRIQNPDALQHVLRKAEEYLGTVPPETPYSEFEHKFQEIGLERGWGDNAERVLESIQLLLDLLEAPDPCTLETFLGRIPMVFNVVILSPHGYFAQDNVLGYPDTGGQVVYILDQVRALENEMLHRIKQQGLDIVPRILIITRLLPDAIGTTCGQRLEKVFGTEHSHILRVPFRTEKGIVRQWISRFEVWPYLETYTEDVAHELAKELQGKPDLIVGNYSDGNIVASLLAHKLGVTQCTIAHALEKTKYPESDIYWKKLEERYHFSCQFTADLFAMNHTDFIITSTFQEIAGSKDTVGQYESHTAFTLPGLYRVVHGIDVFDPKFNIVSPGADQTIYFPPTETSRRLTSFHPEIEELLYSSVENEEHICVLKDRSKPIIFTMARLDRVKNITGLVEWYGKNAKLRELVNLVVVAGDRRKESKDLEEKAEMKKMYGLIETYKLNGQFRWISSQMNRVRNGELYRVICDTKGAFVQPAIYEAFGLTVVEAMTCGLPTFATCNGGPAEIIVHGKSGFHIDPYHGDRAADLLVDFFEKCKLDPTHWETISKAGLQRIEEKYTWQIYSQRLLTLTGVYGFWKHVSNLDRRESRRYLEMFYALKYRKLAESVPLAVE

SEQ ID NO: 1113 - protein, 447 aa, Glycine max
MGKEKVHISIVVIGHVDSGKSTTTGHLIYKLGGIDKRVIERFEKEAAEMNKRSFKYAWVLDKLKAERERGITIDIALWKFETTKYYCTVIDAPGHRDFIKNMITGTSQADCAVLIIDSTTGGFEAGISKDGQTREHALLSFTLGVKQMICCCNKMDATTPKYSKARYDEIVKEVSSYLKKVGYNPDKIPFVPISGFEGDNMIERSTNLDWYKGPTLLDALDQISEPKRPSDKPLRLPLQDVYKIGGIGTVPVGRVETGVLKPGMVVTFAPTGLTTEVKSVEMHHESLTEAHPGDNVGFNVKNVAVKDLKRGYVASNSKDDPAKEAANFTAQVIIINHPGQIGNGYAPVLDCHTSHIAVKFAELMTKIDRRSGKELEKEPKFLKNGDAGFVKMIPTKPMVVETFSEYPPLGRFAVRDMRQTVAVGVIKNVEKKDPTGAKVTKAAQKKK

SEQ ID NO: 1114 - protein, 525 aa, Glycine max
MPKFFHSIFRGTMAGRVSTCFFFVFALSLLLPFQISAEESSEKEFVLTLDHSNFHDTVSKHDFIVVEFYAPWCGHCKKLAPEYEKAASILSSHDPPVVLAKIDANEEKNKDLASQYDVRGYPTIKILRNGGKNVQEYKGPREADGIVDYLKKQSGPASTEIKSADEATAFIGENKVAIVGVFPKFSGEEFDNFSALAEKLRSDYDFGHTLNAKHLPRGESSVSGPVVRLFKPFDELFVDFQDFNVEALEKFVEESSTPVVTVFNNDPSNHPFVAKFFNSPNAKAMLFINFTAEGAESFKSKYREAAEQHKQQGVSFLVGDVESSQGAFQYFGLKEEQVPLIIIQHNDGKKFFKPNLEADHIPTWLKAYKDGNVAPFVKSEPIPEANDEPVKVVVGNSLEDIVFKSGKNVLLEFYAPWCGHCKQLAPILDEVAISYQSDADVVIAKLDATANDIPSETFDVQGYPTVYFRSASGKLSQYEGGRTKEDIIEFIEKNRDKPAQQEQGQDKPAQQEQGQDEQEKGKDEL

SEQ ID NO: 1115 - protein, 377 aa, Glycine max
MADAEDIQPLVCDNGTGMVKAGFAGDDAPRAVFPSIVGRPRHTGVMVGMGQKDAYVGDEAQSKRGILTLKYPIEHGIVSNWDDMEKIWHHTFYNELRVAPEEHPVLLTEAPLNPKANREKMTQIMFETFNTPAMYVAIQAVLSLYASGRTTGIVLDSGDGVSHTVPIYEGYALPHAILRLDLAGRDLTDALMKILTERGYTFTTSAEREIVRDMKEKLAYIALDYEQELETAKTSSAVEKSYELPDGQVITIGAERFRCPEVLFQPSMIGMESPGIHETTYNSIMKCDVDIRKDLYGNIVLSGGSTMFPGIADRMSKEITALAPSSMKIKVVAPPERKYSVWIGGSILASLSTFQQMWIAKAEYDESGPSIVHRKCF

SEQ ID NO: 1116 - protein, 444 aa, Glycine max
MATIVSIKARQIFDSRGNPTVEVDLTCSDGTFARAAVPSGASTGIYEALELRDGGSDYLGKGVSKAVDNVNTIIAPALVGKDPTQQTAIDNLMVQQLDGTVNEWGWCKQKLGANAILAVSLAVCKAGAAVLKVPLYKHIANIAGNKKLVLPVPAFNVINGGSHAGNKLAMQEFMVLPVGASSFKEAMKMGVEVYHNLKSVIKKKYGQDAVNVGDEGGFAPNIQENKEGLELLKTAIAKAGYTGKVVIGMDVAASEFYKEDKTYDLNFKEDNNDGSQKISGDALKDLYKSFVTEYPIVSIEDPFDQDDWEHYAKLTAEVGTNVQIVGDDLLVTNPKRVQKAIDTKACNALLLKVNQIGSVTESIEAVRMSKKAGWGVMASHRSGETEDTFIADLSVGLATGQIKTGAPCRSERLAKYNQLLRIEEELGAEAVYAGANFRTPVEPY

SEQ ID NO: 1117 - protein, 234 aa, Glycine max
METHKNGEPTTGTYLRDTATSAIQNFAPINKIHQHLCAFHFYSYDMSRQVEAHHFCAHQNEEMRQCLIYDSPEKKARLIGLEYIISENLYLTLPDQEKRLWHSHLYEVKSGLFFMPKVPALIQRPDMETVCTTYGKVFHFWQVDKGHSLPFGIPQLMMALTRDGQIYDHLLQSSAERMGIDYEEERKAREYMTGPVHGIHPLANGGGKGLELRLREVELKHDPSPPSVKARILF

SEQ ID NO: 1118 - protein, 419 aa, Glycine max
MALILHATKANKNAFKTLIAAEYSGVQVELAPNFEMGVSNRTPEFLKMNPIGKVPVLETPDGPVFESNAIARYVARLKGDNALFSSSAIDNAHIDQWIDFSSLEIDANIMKLYLPRLGFAPYLPPVEEGANSALKRAFEALNTHLASNTYLVGHSVTLADIITTCNLYLGFSQLLVKSFTSEFPHVERYFWTLVNQPNFRKILGQVKQTESVPPIPSAAKKPSQPKESKPKPKDEPKKAAKPEPKQEAEPEEEAPKPKPKNPLDLLPPSKMILDDWKRLYSNTKTNFREVAIKGFWDMYDPEGYSLWFCDYKYNDENTVSFVTLNKVGGFLQRMDLARKYAFGKMLVIGSQAPFKVKGLWLFRGQEIPKFVIDECYDMELYDWTKVDISDETQKERVNQMIEDFEPFEGESLLDAKCFK

SEQ ID NO: 1119 - protein, 379 aa, Glycine max
MGFLVLLLFSLLGLSSSSSISTHRSILDLDLTKFTTQKQVSSLFQLWKSEHGRVYHNHEEEAKRLEIFKNNLNYIRDMNANRKSPHSHRLGLNKFADITPQEFSKKYLQAPKDVSQQIKMANKKMKKEQYSCDHPPASWDWRKKGVITQVKYQGGCGSGWAFSATGAIEAAHAIATGDLVSLSEQELVDCVEESEGCYNGWHYQSFEWVLEHGGIATDDDYPYRAKEGRCKANKIQDKVTIDGYETLIMSDESTESETEQAFLSAILEQPISVSIDAKDFHLYTGGIYDGENCTSPYGINHFVLLVGYGSADGVDYWIAKNSWGEDWGEDGYIWIQRNTGNLLGVCGMNYFASYPTKEESETLVSARVKGHRRVDHSPL

SEQ ID NO: 1120 - protein, 83 aa, Glycine max; identical to SEQ ID NO: 652

SEQ ID NO: 1121 - protein, 245 aa, Glycine max
MASTDKSPDPTPAKGPDPTPGKPMSVGQHVIDKSAMMVQSLDPIKQMSQHVCSFAIYSHDMSRQIETHHYCSRLHQNFIQCAVYDSDESKARLLGVEYIVPADVFEAFPPEEQKLWHSHAYEIKSGLLVNPRVPEVVAMPELENLAQTYGKFWCTWQVDRGDRLPMGAPALMMSPQAASPGLVRAELVLERDAKYNFSSKSLKSSRLEIPEPEMINPLADYWKQHGKGFVIDIEETEMKLRPPFP

SEQ ID NO: 1122 - protein, 294 aa, Glycine max
MASNKESKFPAQSQKTQPGKEHVMNPLPQATNPDHKAANKLQGKVALVTGGDSGIGRAVCLCFAKEGATVAFTYVKGHEDRDKDDTLKMLLEAKTSGADNPLAIAADIGFDENCKQVIDLVVKEYGRLDVLVNNAAEQHLTNSVEEITQQQLERVFGTNIFSQFFLVKHALKHMKEGSCIINSTSVNAYNGNPEALDYTATKGAIVAFTRGLSQQLASRGIRVNGVAPGPVWTPIQPASKPAEMIQNLGCEVPMNRVAQPCEIAPCYLFLATCQDSSYFTGQVLHPNGGMVVNA

SEQ ID NO: 1123 - protein, 570 aa, Glycine max
MAAIATIFVSIIPTSPSPFLTRLTSRLHFAAFPLRSPTRKLMSHTLARATLGLTHPSNIETPKISFGAKDVDVTEWKGDILAVGVTEKDLARDANSKFENVILSKIDSKLGGLLAEASSEEDFSGKVGQSTVLRITGLGSKRVGLIGLGQSPSTPAPFKSLGEAIVAAAKSSQASSVAVALASSEGLSAQSKLSTAYAIASGAVLGLFEDNRYKSEAKKSTLRSIDFIGLGTGPELEKKLKYAGDVSSGIIFGRELVNSPANVLTPGVLAEEAAKIASTYSDVFTAKILNSEQCAELKMGSYLGVAAASANPPHFIHLCYKPLSGPVNVKLALVGKGLTFDSGGYNIKTGPGCSIELMKFDMGGSAAVLGTAKALGQIKPLGVEVHFIVAACENMISGTGMRPGDIVTASNGKTIEVNNTDAEGRLTLADALVYACNQGVEKIIDLATLTGACVVALGPSIAGVFTPCDDLAKEVFEASDVSGEKLWRLPLEESYWETMKSGVADMLNTGGRQGGAIVAALFLKQFVDEKVQWMHIDMAGPVWNDKKRSATGFGIATLVEWVLKNASNAN

SEQ ID NO: 1124 - protein, 701 aa, Glycine max
MLVLSSEHYKWRSPRRKLNKTAIRPSRKERKGDMIMARSFSRGSLLPLAIVSLVCLFVISIAKEEATKLGTVIGIDLGTTYSCVGVYKNGHVEIIANDQGNRITPSWVAFTDSERLIGEAAKNLAAVNPERTIFDVKRLIGRKFEDKEVQRDMKLVPYKIVNKDGKPYIQVKIKDGETKVFSPEEISAMILTKMKETAEAFLGKKINDAVVTVPAYFNDAQRQATKDAGVIAGLNVARIINEPTAAAIAYGLDKKGGEKNILVFDLGGGTFDVSILTIDNGVFEVLATNGDTHLGGEDFDQRIMEYFIKLIKKKHGKDISKDSRALGKLRREAERAKRALSSQHQVRVEIESLFDGVDFSEPLTRARFEELNNDLFRKTMGPVKKAMEDAGLQKSQIDEIVLVGGSTRIPKVQQLLKDYFDGKEPNKGVNPDEAVAYGAAVQGSILSGEGGEETKDILLLDVAPLTLGIETVGGVMTKLIPRNTVIPTKKSQVFTTYQDQQTTVSIQVFEGERSLTKDCRLLGKFELSGIPPAPRGTPQIEVTFEVDANGILNVKAEDKGTGKSEKITITNEKGRLSQEEIERMVREAEEFAEEDKKVKERIDARNSLETYVYNMKNQIGDKDKLADKLESDEKEKIETAVKEALEWLDDNQSVEKEEYEEKLKEVEAVCNPIISAVYQRSGGAPGGGASGEEDDDSHDEL

SEQ ID NO: 1125 - protein, 503 aa, Glycine max
MAGTVSTCFFFVFLLSLLLPFQISAEESSEKEFVLTLDHSNFHDTVSKHDFIVVEFYAPWCGHCKKLAPEYEKAASILSSHDPPIVLAKVDANEEKNKDLASQYDVKGFPTINILRNGGKNVQEYKGPREADGIVDYLKKQSGPASTEIKSADEATAFIGENKVAIVGVFPKFSGEEFDNFSALAEKLRSDYDFGHTLNAKLLPRGESSVSGPVVRLFKPFDELFVDFQDFNVEALEKFVEESSTPVVTVFNNEPSNHPFVVKFFNSPNAKAMLFINFTAEGAEAIKSKYREAAEQYKQQGVSFLVGDVESSQGAFQYFGLKEEQVPLIIIQHNDGKKFFKPNLEADHIPTWLKAYKDGHVAPFVKSEPIPETNDEPVKVVVGASLEDIVFKSGKNVLLEFYAPWCGHCKQLAPILDEVAISYQNEADVVIAKLDATANDIPSETFDVQGYPTVYFRSASGKLSQYDGGRTKEDIIEFIEKNRDKPAQQEQGKDEQEQGKDEL

SEQ ID NO: 1126 - protein, 559 aa, Glycine max
MASRRFVSSLIRSSLRRSQSKPSISASASRLTSSNRASPHGYLLNRVAEYATAAAAATAPPSAPPPGKKEVSGGGKITDEFTGKGSIGQVCQVIGAVVDVRFDEGLPPIMTALEVLDHSSRLVLEVAQHLGEGVVRTIAMDATEGVVRGWRVLNTGSPITVPVGRATLGRIINVIGEPIDDKGEINTEHYLPIHREAPAFVEQETAQQILVTGIKVVDLLAPYQRGGKIGLFGGAGVGKTVLIMELINNVAKAHGGFSVFAGVGERTREGNDLYREMIESGVIKLGDKQSESKCALVYGQMNEPPGARARVGLTGLTVAEHFRDAEGQDVLLFVDNIFRFTQANSEVSALLGRIPSAVGYQPTLSTDLGALQERITTTKKGSITSVQAIYVPADDLTDPAPATTFAHLDATTVLSRQISELGIYPAVDPLDSTSRMLSPLILGADHYETARGVQKVLQNYKNLQDIIAILGMDELSEDDKLTVARARKIQRFLSQPFHVAEVFTGAPGKYVELKENITSFQGVLDGKYDDLPEQSFYMVGGIEEVIAKAEKIAKESAAS

SEQ ID NO: 1127 - protein, 203 aa, Glycine max
MKSTIFFALFLVCAFTISYLPSATAQFVLDTDDDPLQNGGTYYMLPVMRGKGGGIEVDSTGKEICPLTVVQSPNELDKGIGLVFTSPLHALFIAERYPLSIKFGSFAVITLCAGMPTEWAIVEREGLQAVKLAARDTVDGWFNIERVSREYNDYKLVFCPQQAEDNKCEDIGIQIDDDGIRRLVLSKNKPLVVQFQKFRSSTA

SEQ ID NO: 1128 - protein, 328 aa, Glycine max
MAKDPVRVLVTGAAGQIGYALVPMIARGVMLGPDQPVILHMLDIPPAAESLNGVKMELVDAAFPLLKGVVATTDVVEACTGVNIAVMVGGFPRKEGMERKDVMTKNVSIYKSQASALEKHAAANCKVLVVANPANTNALILKEFAPSIPEKNISCLTRLDHNRALGQISERLNIQVSDVKNVIIWGNHSSTQYPDVNHATVGEKPVRELIADDAWLNGEFITTVQQRGAAIIKARKLSSALSAASAACDHIRDWVLGTPQGTWVSMGVYSDGSYNVPAGLIYSFPVTCANGEWTIVQGLPIDEFSRKKLDLTAEELSEEKALAYSCLN

SEQ ID NO: 1129 - protein, 307 aa, Glycine max
MAKDPVRVLVTGAAGQIGYALVPMIARGVMLGPDQPVILHMLDIPPAAESLNGVKMELVDAAFPLLKGVVATTDVVEACTGVNIAVMVGGFPRKEGMERKDVMTKNVSIYKSQASALEKHAAANCKVLVVANPANTNALILKEFAPSIPEKNISCLTRLDHNRALGQISERLTVQVSDVKNVIIWGNHSSTQYPDVNHATVATSAGEKPVRELIADDAWLNGEFITTVQQRGAAIIKARKLSSALSAASAACDHIRDWVLGTPQGTWVSMGVYSDGSYNVPAGLIYSFPVTCANGEWAIVQGKCFVT

SEQ ID NO: 1130 - protein, 485 aa, Glycine max
MASAASPTTFSLLHSATPSSSSTATSASPSPSRVQLTSSLRARPLRRLGFAAADPLLAASVAARVAAVRGGGKGARGVVSMAKKSVGDLSAADLKGKKVFVRADLNVPLDDNQNITDDTRIRAAIPTIKHLIQNGAKVILSSHLGRPKGVTPKYSLAPLVPRLSELIGIQIVKAEDSIGPEVEKLVASLPDGGVLLLENVRFYKEEEKNDPEHAKKLASLADLYVNDAFGTAHRAHASTEGVTKYLKPSVAGFLLQKELDYLVGAVSNPKRPFAAIVGGSKVSSKIGVIESLLEKVDILLLGGGMIFTFYKAQGLSVGSSLVEEDKLDLATSLLAKAKEKGVSLLLPSDVVIADKFAPDANSKVVPASAIPDGWMGLDIGPDSVKSFSEALDTTQTIIWNGPMGVFEFDKFAVGTEAIAKKLADLSGKGVTTIIGGGDSVAAVEKVGVASVMSHISTGGGASLELLEGKELPGVLALDEAVPVAV

SEQ ID NO: 1131 - protein, 843 aa, Glycine max
MVKFTAEELRRIMDYKHNIRNMSVIAHVDHGKSTLTDSLVAAAGIIAQEVAGDVRMTDTRADEAERGITIKSTGISLYYEMTDEALKSFKGERNGNEYLINLIDSPGHVDFSSEVTAALRITDGALVVVDCVEGVCVQTETVLRQALGERIRPVLTVNKMDRCFLELQVDGEEAYQTFQRVIENANVIMATYEDPLLGDVQVYPEKGTVAFSAGLHGWAFTLTNFAKMYASKFGVDEGKMMERLWGENFFDPATKKWTSKNSGSATCKRGFVQFCYEPIKQIINTCMNDQKDKLWPMLQKLGVTMKSEEKDLMGKALMKRVMQTWLPASSALLEMMIFHLPSPSTAQKYRVENLYEGPLDDQYASAIRNCDPEGPLMLYVSKMIPASDKGRFFAFGRVFSGRVSTGLKVRIMGPNYVPGEKKDLYVKSVQRTVIWMGKRQETVEDVPCGNTVAMVGLDQFITKNATLTNEKEVDAHPIRAMKFSVSPVVRVAVQCKVASDLPKLVEGLKRLAKSDPMVVCTIEESGEHIVAGAGELHLEICLKDLQDDFMGGAEIIKSDPVVSFRETVLERSCRTVMSKSPNKHNRLYMEARPLEEGLAEAIDDGKIGPRDDPKVRSKILSEEFGWDKDLAKKIWCFGPETLGPNMVVDMCKGVQYLNEIKDSVVAGFQWASKEGALAEENMRAICFEVCDVVLHADAIHRGGGQIIPTARRVFYASQITAKPRLLEPVYLVEIQAPEQALGGIYSVLNQKRGHVFEEMQRPGTPLYNIKAYLPVIESFGFSSTLRAATSGQAFPQCVFDHWDMMSSDPLEAGSQAAQLVTDIRKRKGLKEQMTPLSEFEDKL

SEQ ID NO: 1132 - protein, 445 aa, Glycine max
MATIKAVKARQIFDSRGNPTVEVDVILSDGSFHRAAVPSGASTGVYEALELRDGGSDYLGKGVLKAVENVNSIIAPALLGKDPTKQTEIDNFMVQQLDGTVNEWGWCKQKLGANAILAVSLAVCKAGAAVKKIPLYKHIANLAGNKTLVLPVPSFNVINGGSHAGNKLAMQEFMILPVGASSFKEAMKMGVEVYHHLKAVIKKKYGQDATNVGDEGGFAPNIQENQEGLELLKTAIAKAGYTGKVVIGMDVAASEFYDNKDKTYDLNFKEENNDGSQKISGDSLKNVYKSYVTDYPIVSIEDPFDQDDWEHYAKLTAEVGQQVQIVGDDLLVTNPKRVEKAIKEKACNALLLKVNQIGSVTESIEAVRMSKQAGWGVMASHRSGETEDTFIADLSVGLATGQIKTGAPCRSERLAKYNQLLRIEEELGSAAVYAGAKFRAPVEPY

SEQ ID NO: 1133 - protein, 449 aa, Glycine max
MREIISIHIGQAGIQVGNSCWELYCLEHGIQPDGMMPSDSTFGVAHDAFNTFFSETGSGKHVPRAVFVDLEPTVIDEVRCGTYRQLFHPEQLISGKEDAANNFARGHYTVGKEIVDLCLDRVRKLADNCTGLQGFLVFNAVGGGTGSGLGSLLLERLSVDYGKKSKLGFTIYPSPQVSTAVVEPYNSVLSTHSLLEHTDVAVLLDNEAIYDICRRSLDIERPTYTNLNRLISQIISSLTTSLRFDGAINVDITEFQTNLVPYPRIHFMLSSYAPVISAAKAYHEQLSVPEITNAVFEPASMMAKCDPRHGKYMACCLMYRGDVVPKDVNAAVATIKTKRTVQFVDWCPTGFKCGINYQPPSVVPGGDLAKVQRAVCMISNNTAVAEVFSRIDHKFDLMYAKRAFVHWYVGEGMEEGEFSEAREDLAALEKDYEEVGAEGAEDDEEGEDY

SEQ ID NO: 1134 - protein, 448 aa, Glycine max
MREILHIQGGQCGNQIGAKFWEVVCAEHGIDSTGRYQGDNELQLERVNVYYNEASCGRFVPRAVLMDLEPGTMDSVRSGPYGQIFRPDNFVFGQSGAGNNWAKGHYTEGAELIDSVLDVVRKEAENCDCLQGFQVCHSLGGGTGSGMGTLLISKIREEYPDRMMLTFSVFPSPKVSDTVVEPYNATLSVHQLVENADECMVLDNEALYDICFRTLKLTTPSFGDLNHLISATMSGVTCCLRFPGQLNSDLRKLAVNLIPFPRLHFFMVGFAPLTSRGSQQYRALTVPELTQQMWDAKNMMCAADPRHGRYLTASAMFRGKMSTKEVDEQMINVQNKNSSYFVEWIPNNVKSTVCDIPPTGLKMASTFIGNSTSIQEMFRRVSEQFTAMFRRKAFLHWYTGEGMDEMEFTEAESNMNDLVSEYQQYQDATADDEGYEYEDEEEPQEDEV

SEQ ID NO: 1135 - protein, 456 aa, Glycine max
MRPPVILKTTTSLLDSSSSSPPCDRRLNTLARHFLPQMASHDSISASPTSASDSVFNHLVRAPEDPILGVTVAYNKDPSPVKLNLGVGAYRTEEGKPLVLNVVRRVEQQLINDVSRNKEYIPIVGLADFNKLSAKLIFGADSPAIQDNRVTTVQCLSGTGSLRVGGEFLAKHYHQRTIYLPTPTWGNHPKVFNLAGLSVKTYRYYAPATRGLDFQGLLEDLGSAPSGSIVLLHACAHNPTGVDPTLEQWEQIRQLIRSKALLPFFDSAYQGFASGSLDADAQPVRLFVADGGELLVAQSYAKNLGLYGERVGALSIVCKSADVASRVESQLKLVIRPMYSSPPIHGASIVAAILKDRNLFNDWTIELKAMADRIISMRQELFDALCSRGTPGDWSHIIKQIGMFTFTGLNAEQVSFMTKEFHIYMTSDGRISMAGLSSKTVPLLADAIHAAVTRVV

SEQ ID NO: 1136 - protein, 310 aa, Glycine max
MATATNAAAAPPRQLSQKEADIQMMLAADVHLGTKNCDFQMERYIFKRRNDGIYIINLGKTWEKLQLAARVIVAIENPQDIIVQSARPYGQRAVLKFAQYTGAHAIAGRHTPGTFTNQLQTSFSEPRLLILTDPRTDHQPIKEAALGNIPTIAFCDTDSPMRYVDIGIPANNKGKHSIGCLFWLLARMVLQMRGTIRPGLKWDVMVDLFFYREPEEAKQQEEEEAPAVDYAITDFNAGAIAADGQWPGTIDQSWSDAVPQPIPAVPGVNWGAPAEAPAAAGGDWGEAVPPPQQIPVPPSGIDTVQPSGWD

SEQ ID NO: 1137 - protein, 508 aa, Glycine max
MEFSVRAAELTTLLESRITNFYTNFQVDEIGRVVSVGDGIARVYGLNEIQAGEMVEFASGVKGIALNLENENVGIVVFGSDTAIKEGDLVKRTGSIVDVPAGKAMLGRVVDALGVPIDGRGALSDHERRRVEVKAPGIIERKSVHEPMQTGLKAVDSLVPIGRGQRELIIGDRQTGKTAIAIDTILNQKQMNSRATSESETLYCVYVAIGQKRSTVAQLVQILSEANALEYSILVAATASDPAPLQFLAPYSGCAMGEYFRDNGMHALIIYDDLSKQAVAYRQMSLLLRRPPGREAFPGDVFYLHSRLLERAAKRSDQTGAGSLTALPVIETQAGDVSAYIPTNVISITDGQICLETELFYRGIRPAINVGLSVSRVGSAAQLKAMKQVCGSLKLELAQYREVAAFAQFGSDLDAATQALLNRGARLTEVLKQPQYAPLPIEKQILVIYAAVNGFCDRMPLDKIPQYERDILTTIKPELLQSLKGGLTSERKIELEKFLKEKGGTYYI

SEQ ID NO: 1138 - protein, 511 aa, Glycine max
MANIDIEGILKQQQPYDGRVPKTKIVCTLGPASRSVEMTEKLLRAGMNVARFNFSHGTHDYHQETLNNLKTAMHNTGILCAVMLDTKGPEIRTGFLKDGKPIQLKEGQEVTITTDYDIKGDPEMISMSYKKLPVHLKPGNTILCSDGTITLTVLSCDPDAGTVRCRCENTATLGERKNVNLPGVVVDLPTLTEKDKEDILGWGVPNKIDMIALSFVRKGSDLVNVRKVLGPHAKNIQLMSKVENQEGVLNFDEILRETDAFMVARGDLGMEIPVEKIFLAQKMMIYKCNLVGKPVVTATQMLESMIKSPRPTRAEATDVANAVLDGTDCVMLSGESAAGAYPELAVKIMARICIEAESSLDYGAIFKEMIRSTPLPMSPLESLASSAVRTANKAKAKLIVVLTRGGSTAKLVAKYRPAVPILSVVVPVLSTDSFDWTCSDETPARHSLIYRGLIPILGEGSAKATDAESTEVILEAALKSATERALCKPGDAVVALHRIGAASVIKICIVK

SEQ ID NO: 1139 - protein, 702 aa, Glycine max
MAETETFAFQAEINQLLSLIINTFYSNKEIFLRELISNASDALDKIRFESLTDKSKLDAQPELFIHIIPDKTNNSLTIVDSGIGMTKADLVNNLGTIARSGTKEFMEALAAGADVSMIGQFGVGFYSAYLVAEKVIVTSKHNDDEQYVWESQAGGSFTVTRDTSGEVLGRGTKITLFLKEDQLEYLEERRLKDLIKKHSEFISYPISLWVEKTTEKEISDDEDEEEKKDEEGKVEDVDEEKEKEEKKKKKIKEVSHEWSLVNKQKPIWMRKPEEITKEEYSAFYKSLTNDWEEHLAVKHFSVEGQLEFKAILFVPKRAPFDLFDTRKKPNNIKLYVRRVFIMDNCEELIPEYLGFVKGIVDSEDLPLNISREMLQQNKILKVIRKNLVKKCLELFFEIAENKEDYNKFYEAFSKNLKLGIHEDSQNKGKIAELLRYHSTKSGDELTSLKDYVTRMKEGQSDIYYITGESKKAVENSPFLEKLKKKGYEVLFMVDAIDEYAVGQLKEFEGKKLVSATKEGLKLDESEDEKKKQEELKEKFDNLCKVIKDVLGDKVEKVVVSDRVVDSPCCLVTGEYGWTANMERIMKAQALRDNSMAGYMSSKKTMEINPENPIMEELRKRADADKNDKSVKDLVLLLFETALLTSGFSLDEPNTFGNRIHRMLKLGLSIDEDAAEADADADMPPLEEEAEADAEGSKMEEVD

SEQ ID NO: 1140 - protein, 839 aa, Glycine max
MKLSPREVEKLGLHNAGYLAQKRLARGLRLNYTEAVALIATQIMEFARDGEKTVAQLMCIGKHLLGRRQVLPEVQHLLNAVQVEATFPDGTKLVTVHDPISCEHGDLGQALFGSFLPVPSLDKFAENKEDNRIPGEIIYGDGSLVLNPGKNAVILKVVSNGDRPIQVGSHYHFIEVNPYLTFDRRKAYGMRLNIAAGTAVRFEPGDSKSVKLVRIGGNKVIRGGNGIADGQVNETNLREAMEAVCKRGFGHKEEEDASEGITGDPDSPFTTIIPREEYANKYGPTTGDKIRLGDTDLFAKIEKDFALYGDECVFGGGKVLRDGMGQSCGDPPAISLDTVITNAVIIDYSGIIKADIGIKDGLIVSIGKAGNPDIMDDVFFNMIIGANTEVIAGEGLIVTAGAIDCHVHYICPQLVDEAISSGITTLVGGGTGPTAGTRATTCTPAPSQMKLMLQSTDDLPLNFGFTGKGSSSKPDELHDIIKAGAMGLKLHEDWGSTPAAIDSCLTVADQYDIQINIHTDTLNEAGFVEHSIAAFKGRTIHTYHSEGAGGGHAPDIIKVCGMKNVLPSSTNPTRPLTLNTIDEHLDMLMVCHHLNREIPEDLAFACSRIREGTIAAEDILHDIGAISIISSDSQAMGRVGEVISRTWQTANKMKVQRGPLQPGESDNDNFRIKRYIAKYTINPAIANGFSQYVGSVEVGKLADLVMWKPSFFGAKPEMVIKGGVVAWADMGDPNASIPTPEPVKMRPMFGTLGKAGGALSIAFVSKAAVDQRVHALYGLNKRVEAVGNVRKLTKLDMKLNDSLPQITVDPDNYTVTADGEVLTSFATTFVPLSRNYFLF

SEQ ID NO: 1141 - protein, 253 aa, Glycine max
MLACIFHHPTSHTTTTSTSLQSKPTTTMASYQKHYDDQGRKVDEYGNVEKQTDEYGNPVHAASVTYVATRTAAGGYSDDINKQHDTTNAYGVDTGRQHSSGGYDGDTNKHHGTTGGYNDDTNRHHGTTGVYGIDTDRQQHGTTGGYAGDTGRQHGNIGGPYYGTNTADTGTGPRSGTTGGTGYGGTGGTDYGTTGGTGYGSGTGYGVNTGGAHTEAGYRKEHRQHDQSHGDQNEKKGIMDKIKEKLPGGHSDK

SEQ ID NO: 1142 - protein, 645 aa, Glycine max
MATKEGKAIGIDLGTTYSCVGVWQNDRVEIIPNDQGNRTTPSYVAFTDTERLIGDAAKNQVAMNPQNTVFDAKRLIGRRFSDSSVQNDMKLWPFKVGGSPCDKPMIVVNYKGEEKKFSAEEISSMVLVKMREVAEAFLGHAVKNAVVTVPAYFNDSQRQATKDAGAISGLNVLRIINEPTAAAIAYGLDKKASRKGEQNVLIFDLGGGTFDVSILTIEEGIFEVKATAGDTHLGGEDFDNRMVNHFVSEFKRKNKKDISGNARALRRLRTACERAKRTLSSTAQTTIEIDSLYEGIDFYATITRARFEEMNMDLFRKCMEPVEKCLRDAKIDKSQVHEVVLVGGSTRIPKVHQLLQDFFNGKELCKSINPDEAVAYGAAVQAAILSGQGDEKVQDLLLLDVTPLSLGLETAGGVMTVLIPRNTTIPTKKEQIFSTYSDNQPGVLIQVFEGERARTKDNNLLGKFELTGIPPAPRGVPQVNVCFDIDANGILNVSAEDKTAGVKNKITITNDKGRLSKEEIEKMVKDAERYKAEDEEVKKKVEAKNSLENYAYNMRNTIKDEKIGGKLSPDEKQKIEKAVEDAIQWLEGNQMAEVDEFEDKQKELEGICNPIIAKMYQGAAGPGGDVPMGADMPAAGAGPKIEEVD

SEQ ID NO: 1143 - protein, 236 aa, Glycine max
MATQMSKKRKFVADGVFFAELNEVLTRELAEDGYSGVEVRVTPMRTEIIIRATRTQAVLGEKGRRIRELTSVVQKRFKFPENSVELYAEKVNNRGLCAIAQAESLRYKLLGGLAVRRACYGVLRFVMESGAKGCEVIVSGKLRAQRAKSMKFKDGYMISSGQPVKDYIDSAVRHVLLRQGVLGIKVKIMLDWDPKGKQGPKTPLPDLVTIHTPKEEEEYNRPPAVLANDIEVVPVA

SEQ ID NO: 1144 - protein, 636 aa, Glycine max
MSSSTTVRKLQVVSPVPADIDIANSVEPVHISQIAKDLNLSPNHYDLYGKYKAKVLLSVLDELQGSEDGYYVVVGGITPTPLGEGKSTTTVGLCQALGAFLDKKVVTCLRQPSQGPTFGIKGGAAGGGYSQVIPMDEFNLHLTGDIHAITAANNLLAAAIDTRIFHESTQSDKALFNRLCPPNKEGKRSFSDVMFRRLTKLGISKTNPDDLTPEEVNKFARLDIDPNSITWRRVMDINDRFLRKIAIGQGPDEKGMVRETGFDISVASEIMAVLALTTSLADMRERLGKMVIGNSKSGDPVTADDLGVGGALTVLMKDAIHPTLMQTLEGTPVLVHAGPFANIAHGNSSIVADKIALKLVGPGGFVVTEAGFGADIGAEKFMNIKCRYSGLTPQCAIIVATIRALKMHGGGPAVVAGRPLDHAYLTENVALVEAGCVNMARHISNTKSYGVNVVVAINKFSTDTEAELNAVRSAALAAGAYDAVICTHHANGGKGAVDLGIAVQKACENVTQPLKFLYPVDLSIKEKIEAIAKSYGASGVEYSEQAEKQIEMYSKQGFSGLPICMAKTQYSFSDNAAAKGAPSGFVLPIRDVRASIGAGFIYPLVGTMSTMPGLPTRPCFYDIDLDTTTGKVIGLS

SEQ ID NO: 1145 - protein, 227 aa, Glycine max
MGRKFFVGGNWKCNGTTEEVKKIVTTLNEAKVPGEDVVEVVVSPPFVFLPFVKSLLRPDFHVSAQNCWVRKGGAYTGEVSAEMLVNLGIPWVIIGHSERRQLLNESNEFVGDKVAYALQQGLKVIACIGETLEQREAGTTTAVVAEQTKAIAAKISNWDNVVLAYEPVWAIGTGKVATPAQAQEVHADLRKWVHDNVSAEVAASVRIIYGGSAEFVDIINAATVKKN

SEQ ID NO: 1146 - protein, 155 aa, Glycine max
MTKLTILLIALLFIAHTCCASKWQQHQQESCREQLKGINLNPCEHIMEKIQAGRRGEDGSDEDHILIRTMPGRINYIRKKEGKEEEEEGHMQKCCSEMSELKSPICQCKALQKIMDNQSEQLEGKEKKQMERELMNLAIRCRLGPMIGCDLSSDD

SEQ ID NO: 1147 - protein, 475 aa, Glycine max
MSPQTETKASVGFKAGVKDYKLTYYTPDYETKDTDILAAFRVTPQPGVPPEEAGAAVAAESSTGTWTTVWTDGLTSLDRYKGRCYGLEPVAGEENQYIAYVAYPLDLFEEGSVTNMFTSIVGNVFGFKALRALRLEDLRIPTAYIKTFQGPPHGIQVERDKLNKYGRPLLGCTIKPKLGLSAKNYGRAVYECLRGGLDFTKDDENVNSQPFMRWRDRFLFCAEAIFKSQAETGEIKGHYLNATAGTCEEMMKRAVFARELGVPIVMHDYLTGGFTANTSLAHYCRDNGLLLHIHRAMHAVIDRQKNHGMHFRVLAKALRLSGGDHVHAGTVVGKLEGEREITLGFVDLLRDDFVEKDRSRGIYFTQDWVSLPGVLPVASGGIHVWHMPALTEIFGDDSVLQFGGGTLGHPWGNAPGAVANRVALEACVQARNEGRDLAREGNEIIREASKWSPELAAACEVWKEIKFEFEAMDTL

SEQ ID NO: 1148 - protein, 222 aa, Glycine max
MGRRPARCYRQIKNKPYPKSRFCRGVPDPKIRIYDVGMKKKGVDEFPFCVHLVSWEKENVSSEALEAARIACNKYMAKFAGKDAFHLRVRVHPFHVLRINKMLSCAGADRLQTGMRGAFGKPQGTCARVAIGQVLLSVRCKDSNSHHAQEALRRAKFKFPGRQKIIVSRKWGFTKFSRSDYLKFKSENRIVPDGVNAKLLGCHGPLANREPGRAFLDTATSS

SEQ ID NO: 1149 - protein, 168 aa, Glycine max
MATISDQPRGSYSYGTSYGAPYGTTYETNTSINNPPSRQTVKFITAATIGITLLLLSGLTLTGTVIGLIIATPLLVIFSPILVPAAFVLFLVASGFLFSGGCGVAAIAALSWIYNYVSGNQPAGYDTLDYAKGYLADKARDVKERAKDYGSYAQGREGSRFVCKVAKH

SEQ ID NO: 1150 - protein, 503 aa, Glycine max
MALLVEKTTSGREYKVKDLSQADFGRLEIELAEVEMPGLMACRTEFGPSQPFKGARITGSLHMTIQTAVLIETLTALGAEVRWCSCNIFSTQDHAAAAIARDSAAVFAWKGETLQEYWWCTERALDWGPGGGPDLIVDDGGDATLLIHEGVKAEELYEKTGELPDPNSTDNAEFQIVLTIIRDGLKTDPTRYRKMKERLVGVSEETTTGVKRLYQMQANGTLLFPAINVNDSVTKSKFDNLYGCRHSLPDGLMRATDVMIAGKVAVVAGYGDVGKGCAAALKQAGARVIVTEIDPICALQALMEGLQVLTLEDVVSEADIFVTTTGNKDIIMVDHMKKMKNNAIVCNIGHFDNEIDMLGLENYPGVKRITIKPQTDRWVFPETNVGIIVLAEGRLMNLGCATGHPSFVMSCSFTNQVIAQLELWKEKSTGKYEKKVYVLPKHLDEKVAALHLGKLGAKLTKLSPAQADYISVPVEGPYKPAHYRSRQNMKCGVSGIWLALIIV

SEQ ID NO: 1151 - protein, 325 aa, Glycine max
MAEGLVLRGTMRAHTDVVTAIATPIDNSDMIVTASRDKSIILWHLTKEDKTYGVPRRRLTGHSHFVQDVVLSSDGQFALSGSWDGELRLWDLAAGTSARRFVGHTKDVLSVAFSIDNRQIVSASRDRTIKLWNTLGECKYTIQDGDAHSDWVSCVRFSPSTLQPTIVSASWDRTVKVWNLTNCKLRNTLAGHNGYVNTVAVSPDGSLCASGGKDGVILLWDLAEGKRLYSLDAGSIIHALCFSPNRYWLCAATEQSIKIWDLESKSIVEDLKVDLKTEADATSGGGNANKKKVIYCTSLNWSADGSTLFSGYTDGVVRVWAIGRY

SEQ ID NO: 1152 - protein, 203 aa, Glycine max
MKSTSLFAIFLLCAFTSYLPSATAQDVLDVDGDPIRNGFIYYVLPAIRGNGGGIERAALGKDTCPITVVQSPNPNSKGLEIKFESAYPAYYINETLILQIKFSYPQQCERKNPWWAISKDISEGPPAIKLSGFHGTELGWFKIQKASKSCDSNDYKLVFCQYDETWCLDVGIYVDRQGNRRLVLAVTGEPFLVHFHKISSSTA

SEQ ID NO: 1153 - protein, 476 aa, Glycine max
MGNKTTLLLLLFVLCHGVATTTMAFHDDEGGDKKSPKSLFLMSNSTRVFKTDAGEMRVLKSHGGRIFYRHMHIGFISMEPKSLFVPQYLDSNLIIFIRRGEAKLGFIYDDELAERRLKTGDLYMIPSGSAFYLVNIGEGQRLHVICSIDPSTSLGLETFQSFYIGGGANSHSVLSGFEPAILETAFNESRTVVEEIFSKELDGPIMFVDDSHAPSLWTKFLQLKKDDKEQQLKKMMQDQEEDEEEKQTSRSWRKLLETVFGKVNEKIENKDTAGSPASYNLYDDKKADFKNAYGWSKALHGGEYPPLSEPDIGVLLVKLSAGSMLAPHVNPISDEYTIVLSGYGELHIGYPNGSKAMKTKIKQGDVFVVPRYFPFCQVASRDGPLEFFGFSTSARKNKPQFLAGAASLLRTLMGPELSAAFGVSEDTLRRAVDAQHEAVILPSAWAAPPENAGKLKMEEEPNAIRSFANDVVMDVF

SEQ ID NO: 1154 - protein, 248 aa, Glycine max
MARSLFLCSLLILAVTTFSSPTGALILTLVNNCNYTVWPGIQPNAGHPVLAGGGLTLRSLTHQSIPVPDAHWSGRVWARTGCSYSGTAFSCASGDCGGRLQCNGAGGAAPATLAQLEVHHGSNDYASYGVSLVDGFNVPMTFTPHEGKGVCPVVGCRNDLLATCPRVLQHRVPAGHGPVVACKSGCEAFHTDELCCRNHFNNPNTCKGSIYSSFFKHACPATFTFAHDTPSLMHQCSSPRELKVIFCH

SEQ ID NO: 1155 - protein, 586 aa, Glycine max
MAAATTSYSSAIAASSDTLAKPASTRTFSATNLALQSSSSKLGFKSLKLHRCAAAAGSALGARMVSAPAVKAPALLDFDTKVFKKEKINLAGHDEYIVKGGRDLFHLLPDAFKGIKQIGVIGWGSQGPAQAQNLRDSLAEAKSDIVVKIGLRKGSRSFAEARAAGFSEENGTLGDIWETVSGSDLVMLLISDSAQADNYEKILSHMKPNSILGLSHGFLLGHLQSLGLDFPKNISVIAVCPKGMGPSVRRLYVQGKEINGAGINASFAVHQDVDGRATDVALGWSVALGSPFTFATTLEQEYRSDIFGERGILLGAVHGVVESLFRRYTDNGMNEDLAYKNTVESITGIISKTISTKGMLAVYNALSEDEKREFEKAYSASYYPCMEILYECYEDVASGSEIRSVVLAGRRFYEKEGLPAFPMGNIDQTRMWKVGERVRSTRAAGDQGPLYPFTAGVFVALMMAQIEILRKKGHSYSEIINESVIEAVDSLNPFMHARGVSFMVDNCSTTARLGSRKWAPRFDYILTQQAMVAVDNGTPVNRDLISNFLSDPVHGAIKVCAELRPTVDISVPPDADFVRPELRSSN

SEQ ID NO: 1156 - protein, 589 aa, Glycine max
MESATQVGAAAQPSSASASVIPSAFDGTLGRHLARRLAETGVRDVFSVPGDFNLTLLDHLIAEPSLNLVGCCNELNAGYAADGYARAKGVGACVVTFTVGGLSVLNAIAGAYSENLPVICIVGGPNSNDYGTNRILHHTIGLPDFTQELRCFQAITCFQAVVNNLDDAHELIDTAISTALKESKPVYISISCNLPGIPHPTFARDPVPFFLAPKVSNQEGLEAAVEATAALLNNAVKPVIVGGPKLRVAKAQKAFLEFAEASGYPIAVMPSGKGLVPEHHPHFIGTYWGAVSSSFCGEIVESADAYVFVGPIFNDYSSVGYSLLIKKEKAIIVQPNRVTIGNGPSLGWVFMADFLTALAKKVKTNTAAVENYRRIYVPPGIPLRREKDEPLRVNVLFKHIQELLSGDTAVIAETGDSWFNCQKLHLPENCGYEFQMQYGSIGWSVGATLGYAQAATDKRVIACIGDGSFQVTAQDISTMIRCGQKTIIFLINNGGYTIEVEIHDGPYNVIKNWDYTRFVDAIHNGQGKCWTAKVRTEDDLTEAIAKATGPQKDSLCFIEVFVHKDDTSKELLEWGSRVAAANSRPPNPQ

SEQ ID NO: 1157 - protein, 212 aa, Glycine max
MQSRHDMQSTLTSCRVTSHTSSYTTIYLSHSILSSTLGLAREKIPTMATISTDQPRGSYSYGTSYGAPYGTTYETNSSINNPPSRQTVKFITAATIGITLLLLSGLTLTGTVIGLIIATPLLVIFSPILVPAAFVLFLVASGFLFSGGCGVAAIAALSWIYNYVSGNQPAGSDTLDYAKGYLTDKARDVKERAKDYGSYAQGRINEATQGTY

SEQ ID NO: 1158 - protein, 264 aa, Glycine max
MARGLKKHLKRLNAPKHWMLDKLGGAFAPKPSSGPHKSRECLPLILILRNRLKYALTYREVIAILMQRHVLVDGKVRTDKTYPAGFMDVVSIPKTNENFRLLYDTKGRFRLHSVRDDEAKFKLCKVRSVQFGQKGIPYLNTYDGRTIRYPDPLIRANDTIKLDLEENKIVDFIKFDVGNVVMVTGGRNRGRVGVIKNREKHKGSFETIHVQDSTGHEFATRMGNVFTIGKGTKPWISLPKGKGIKLSIIEEARKRIAAQQATAA

SEQ ID NO: 1159 - protein, 153 aa, Glycine max
MDWIGAYRGGQRSRDWCDPSSPFTDLWDPRRVGDADDITSSLAHAHVDWRETDKAHIFRADLPGVKKEDLKVQVEENKILQISGERVKEKEDQNDKWHRVERQCGSFLRRFRLPEDANPNQISCTLENGVLNVTVPKVEKKPENKNVRQIDVV

SEQ ID NO: 1160 - protein, 248 aa, Glycine max
MASLGGLQNVSGINFLIKEGPKVNAKFELKPPPYPLNGLEPVMSQQTLEFHWGKHHKTYVENLKKQVVGTELDGKSLEEIIVTSYNKGDILPAFNNAAQVWNHDFFWECMKPGGGGKPSGELLELIERDFGSFVKFLDEFKAAAATQFGSGWAWLAYRARKFDGENVANPPSPDEDNKLVVLKSPNAVNPLVWGGYYPLLTIDVWEHAYYLDFQNRRPDYISVFMDKLVSWDAVSSRLEQAKALITSA

SEQ ID NO: 1161 - protein, 162 aa, Glycine max
MAEEQQRRILVAVDEGEESMYALSWCLKNLAFQNSKDTLLLLYVKPPRVTYSAFDGTGYLFSSDITATMERYSQQVADCVLEKAKKLCNNIENVETRVENGDPRDVICQMVQKLGADVLVMGSHGYGLIKRAFLGSVSNHCAQNVKCPVLIVKKPKPTTGET

SEQ ID NO: 1162 - protein, 285 aa, Glycine max; identical to SEQ ID NO: 606

SEQ ID NO: 1163 - protein, 262 aa, Glycine max
MAASAPTPREEFVYMAKLAEQAERYEEMVEFMEKVSASAESEELTVEERNLLSVAYKNVIGARRASWRIISSIEQKEESRGNEDHVAVIRDYRSKIEAELSNICDGILKLLDTRLVPSAASGDSKVFYLKMKGDYHRYLAEFKTGADRKEAAESTLSAYKAAQDIANTELPPTHPIRLGLALNFSVFYYEILNSPDRACSLAKQAFDEAIAELDTLGEESYKDSTLIMQLLRDNLTLWTSDMQDDGADEIKEAAPKGDGEQN

SEQ ID NO: 1164 - protein, 814 aa, Glycine max
MADPTSSNPDKDQSSTEPKSEKKDYSTAILERKKSPNRLVVDEAINDENSVVTLHPETMEKLQFFRGDTVLIKGKKRRDTICVVLADEQCDEPKIRMNKVVRANLRVRLGDVVSVHQCPDVKYGKRVHILPIDDTIEGVTGNLFDAYLKPYFMESYRPVRKGDLFLVRGGMRSIEFKLIETDPGEYCVVAPDTEIFCEGEPIKREDEERLNDVGYDDVGGVRKQMAQIRELVELPLRHPQLFKSIGVKPPKGILLYGPPGSGKTLIARAVANETGAFFFLINGPEIMSKLAGESESNLRKAFEEAEKNSPSIIFIDELDSIAPKREKTHGEVERRIVSQLLTLMDGLKTRSHVIVIGATNRPNSIDPALRRFGRFDREIDIGVPDEVGRLEVLRIHTKNMKLSDNVDLEKVARDTHGYVGADLAALCTEAALQCIREKMDVIDLEDETIDAEVLNSMAVTNEHFQTALSSSNPSALRETVVEVPNVSWDDIGGLENVKRELQETVQYPVEHPEKFEKFGMSPSKGVLFYGPPGCGKTLLAKAIANECQANFISVKGPELLTMWFGESEANVREIFDKARQSAPCVLFFDELDSIATQRGSSVGDAGGAADRVLNQLLTEMDGMTAKKTVFIIGATNRPDIIDPALLRPGRLDQLIYIPLPDESSRLQIFKACLRKSPISKDVDLSALARFTHGFSGADITEICQRACKYAIREDIEKGIEKERRKRENPEAMEEDDTDEVPEIKPAHFEESMKFARRSVSDADIRKYQLFAQTLQQSRGFGSEFRFPDQNENTAAGASDPFSSVTAEGDDDLYS

SEQ ID NO: 1165 - protein, 232 aa, Glycine max
MAPKVTRKVSRNPELIRGIGKYSRSQMYHKRGIWAIKAKNGGVLPRHDPKPKPETPAEKPPKFYPADDIKKPLVNKHKPKPAKLRASITPGTVLILLAGRFKGKRVVFLKQLPSGLLLVTGPFKVNGVPLRRVNQAYVIGTSTKVDISAVNVDSFGDKYFAKEAQKKKKKGEGEFFEAEKEEKSVLPQQKKDDQKTVDAAVLKAIESVPDLKSYLGARFSLKAGVKPHELVF

SEQ ID NO: 1166 - protein, 582 aa, Glycine max
MVLFNVSRVETTPFDGQKPGTSGLRKKVKVFVQPHYLHNFVQSTFNALTVEKVRGATLVVSGDGRYFSKEAIQIITKMSAANGVRRVWIGQNGLLSTPAVSAVIRERVGADGSRATGAFILTASHNPGGPHEDFGIKYNMENGGPAPEGITDKIYENTTTINEYLIASDLPDVDITTTGVTSFTGPEGPFDVEVFDSASDYIKLMKSIFDFESIRKLLSSPKFTFCYDALHGVGGAYAKSIFVDELGAQESSLLNCTPKEDFGGGHPDPNLTYAKELVARMGLGKSEPQDDPPEFGAASDGDADRNMILGKRFFVTPSDSVAIIAANAVEAIPYFSAGLKGVARSMPTSAALDVVAKHLNLKFFEVPTGWKFFGNLMDAGLCSVCGEESFGTGSDHIREKDGIWAVLAWLSILAYKNKDKLEDKLVTVEDIVRQHWATYGRHYYTRYDYENVDAGAAKELMAYLVKLQSSLSEVNQIIKGIRSDVSNVVHGDEFEYNDPVDGSISSHQGIRYLFEDGSRLIFRLSGTGSEGATIRLYIEQYEKDPSKIGRLSNEALAPLVEVALKLSKMEEFTGRSAPTVIT

SEQ ID NO: 1167 - protein, 337 aa, Glycine max
MPPEKKEIFKSLEGWASEWVLPLLKPVEQCWQPQNFLPDPSLPHEEFSHQVKELRERTKELPDEYFVVLVGDMVTEDALPTYQTMINNLDGVKDDSGTSPSPWAVWTRAWTAEENRHGDLLRTYLYLSGRVDMAKVEKTVHYLISAGMDPGTDNNPYLGFVYTSFQERATFVAHGNTARLAKEGGDPVLARLCGTIAADEKRHENAYSRIVEKLLEVDPTGAMVAIGNMMEKKITMPAHLMYDGDDPRLFEHYSAVAQRIGVYTANDYADILEFLVERWRLEKLEGLMAEGKRAQDFVCGLAPRIRRLQERADERARKMKKHHGVKFSWIFNKELLL

SEQ ID NO: 1168 - protein, 614 aa, Glycine max
MEPRKASPLSWVLIFFLSISLSGVKVLSEEQHHAKSQEGPVVERDQRRTLLVTEFGEITAIDIKEGQKELPYHLRFITLEPNSLFLPVLLHADMVFYVHTGSGKLTWANDDGTSTIRLREGDVCSLKEGSVFYIQSNLEAERRKLRIYAMFTNTDDNTYDPSIGAYSRINELVKGFDTKIMQAALKVPEDLIEAIINKTETPAIVHAVPEKRNILQELEASFLKNFLGIGSNSKKLKTYNIFDHDPDFKNPNGWSTAVTKKQLKSLKRTNIGFLMVNLAMGSILGPHWNPKATELVVGVDGGGMVRVVCGSSNEDETECQNMRFKVKEGDAFLVPRFHPMAQMSFNDGPFVFLGFSTSAKKNHPQFLAGKGSVLHILDKRILATSFGVSNRTIDQLLRSPEDSIIFGCSSCAEEEEKIMKDEEENRKREEEEKEKKKEEEEEKRKREEEEERKREEEEDEKKRRREEEEEEKKKEEEEEKRKREEEEAKRQQEEREKKREEEEARREKEREREEEAEREQEQAKREAEAAAQREQEQAKREQERRERRRQEEEDEEEPTRWERRGRREKGKSPEGVEWEQEEARRQQAESDRQVEEQSHRNSFEGRRALKIRNV

SEQ ID NO: 1169 - protein, 155 aa, Glycine max
MVVTFAPTGLTTEVKFVEMHHEALQEALPGDNVGFNVKNVAVKDLKRGFVASNSKDDPAKEAANFTSQFAELVTKIDRRSGKEIEKEPKFLKNGDAGYVKMIPTKPMVVETFSEYPPLGRFSVRDMRQTVAVGVIKSVEKKDPTGAKVTKAAEKK

SEQ ID NO: 1170 - protein, 161 aa, Glycine max
MSLIPNFFGGRRNNVFDPFSLDVWDPFKDFPFPNTLSSASFPEFSRENSAFVSTRVDWKETPEAHVFKADIPGLKKEEVKVQIEDDKVLQISGERNVEKEDKNDTWHRVERSSGKFMRRFRLPENAKVEQVKASMENGVLTVTVPKEEVKKPDVKAIEISG

SEQ ID NO: 1171 - protein, 132 aa, Glycine max; identical to SEQ ID NO: 625

SEQ ID NO: 1172 - protein, 350 aa, Glycine max
MVSSSQHILVTGGAGFIGTHTVVQLLKAGFSVSIIDNFDNSVMEAVDRVRQVVGPLLSQNLQFTQGDLRNRDDLEKLFSKTTFDAVIHFAGLKAVAESVAKPRRYFDFNLVGTINLYEFMAKYNCKKMVFSSSATVYGQPEKIPCEEDFKLQAMNPYGRTKLFLEEIARDIQKAEPEWKIILLRYFNPVGAHESGKLGEDPKGIPNNLMPYIQQVAVGRLTELNVYGHDYPTRDGSAIRDYIHVMDLADGHIAALRKLFTTENIGCTAYNLGTGRGTSVLEMVAAFEKASGKKIPVKLCPRRPGDATEVYASTERAEKELGWKANYGVEEMCRDQWNWAKNNPWGYAGKP

SEQ ID NO: 1173 - protein, 191 aa, Glycine max
MEGTNSSGDNVSAGVVQSRMRMKVMVAIDESEGSFYALKWALDNLFTTMATVGEASSPENDGMVFLVHVEPKVHNYVYPIGPGGAAFYPATVVVDSVKKAQQERSAAILSRALKMCHDKLVKGESIILHGDAREMICEAAEQMQINLLVLGSRGLGTLKRTFLGSVSDYCAHHAKTPILIVKPPSEHSKMQ

SEQ ID NO: 1174 - protein, 243 aa, Glycine max
MGEEVKVVVPESVLKKRKREEEWALAKKQELDAAKKKRAESRKLIYNRAKQYAKEYDHQEKELIRLKREAKLKGGFYVDPEAKLLFIIRIRGINAMDPKSRKILQLLRLRQIFNGVFLKVNKATVNMLHRVEPYVTYGYPNLKSVRELIYKRGYGKLMKQRTALTDNSIIEQALGKYGIISTEDLIHEIITVGPHFKEANNFLWPFKLKAPLGGLKKKRNHYVEGGDAGNRENYINELIRRMN

SEQ ID NO: 1175 - protein, 149 aa, Glycine max
MAEQTFIMIKPDGVQRGLIGEIISRFERKGFYLKGLKLVTVDRPFAEKHYADLSAKPFFSGLVDYIVSGPVVAMIWEGKNVVTTGRKIIGATNPAQSEPGTIRGDFAIDIGRNVIHGSDSVESANKEIALWFPEGPANWQSSQHSWIYE

SEQ ID NO: 1176 - protein, 405 aa, Glycine max
MAAAARPLVTVQALDSDMATDASATVPIPDVMKSSIRPDIVNFVHSNISKNSRQPYAVSRRAGHQTSAESWGTGRAVSRIPRVPGGGTHRAGQGAFGNMCRGGRMFAPTKIWRRWHRKINVNQKRYAVVSAIAASAIPSLVLARGHRIESVPELPLVVSDSAESVEKTKEAIKVLKQIGAFPDAEKAKDSRSIRPGKGKMRNRRYISRRGPLIVYGTEGAKAVKAFRNVPGVEVANVERLNLLKLAPGGHLGRFVVWTKSAFEKLDSIYGSFDKPSEKKKGYLLPRPKMVNSDLARIINSDEVQSVVRPIKKDVKKATLKKNPLKNLNSMLKLNPYAKTAKRMALLAEAQRVKAKKEKLDKKRKTVSKEEASAIKSAGKAWYHTMVSDSDYTEFDNFSKWLGVSQ

SEQ ID NO: 1177 - protein, 261 aa, Glycine max
MGRVIRAQRKGAGSVFKSHTHHRKGPARFRSLDFGERNGYLKGVVTDIIHDPGRGAPLAKVAFRHPFRYKKQMELFVAAEGLYTGQFIYCGKKATLVVGNVLPLRSIPEGAVICNVEHHVGDRGVFARASGDYAIVISHNPDNDTSRIKLPSGSKKIVPSGCRAMIGQVAGGGRTEKPLLKAGNAYHKFRVKRNCWPKVRGVAMNPVEHPHGGGNHQHIGHASTVRRDAPPGQKVGLIAARRTGRLRGQAAATAAKADKTT

SEQ ID NO: 1178 - protein, 978 aa, Glycine max
MASSATMRFSATSTGAEAALPRRNSVAGFIGVAARSSAKSRLRFIGRNANLSLRRRMSSFPVVKCVSGSEAKAQDPVAKQQEATTSLSSFSPDASSIASSIKYHAEFTPLFSPENFDLPQAFLATAQSVRDALIINWNATYDYYEKLNVKQAYYLSMEFLQGRALLNAIGNLELTGPHAEALSKLGHKLENVAYQEPDAALGNGGLGRLASCFLDSLATLNYPAWGYGLRYKYGLFKQRITKDGQEEVADDWLEMGNPWEIIRNDVSYPVKFYGKVVSGSDGKKHWIGGEDIKAVAHDVPIPGYKTKTTINLRLWSTKAASEEFDLSAFNAGRHTEASEALANAEKICYILYPGDESIEGKILRLKQQYTLCSASLQDIIARFERRSGTNVNWEEFPEKVAVQMNDTHPTLCIPELMRILIDVKGLSWKDAWNITQRTVAYTNHTVLPEALEKWSLDLMQKLLPRHIEIIEMIDEELIRTIIAEYGTENSDLLEKKLKEMRILENVELPAEFADIVVKSKEAIDIPSEELQSSEQAEVEERKDDEVEAVAKKNGTDESSIEDEKEELPEPVPEPPKLVRMANLCVVGGHAVNGVAEIHSEIVKDEVFNAFYKLWPEKFQNKTNGVTPRRWIRFCNPDLSKIITEWIGTEDWVLNTGKLAELRKFVDNEDLQVQWREAKRSNKVKVAAFIREKTGYSVSPDAMFDIQVKRIHEYKRQLLNIFGIVYRYKKMKEMSAAERKANFVPRVCIFGGKAFATYVQAKRIVKFITDVGATVNHDPEIGDLLKVVFVPDYNVSVAEMLIPASELSQHISTAGMEASGTSNMKFAMNGCILIGTLDGANVEIREEVGADNFFLFGAKAHEIAGLRKERAEGKFVPDPRFEEVKEFVRSGVFGSYNYDELMGSLEGNEGFGRADYFLVGKDFPSYIECQEKVDEAYRNQTKWTRMSILNTAGSYKFSSDRTIHEYAREIWNIEPVQLP

SEQ ID NO: 1179 - protein, 331 aa, Glycine max
MALNNGVPATGTGLIVSFGEMLIDFVPTVSGVSLAEAPGFLKAPGGAPANVAIAVSRLGGKAAFVGKLGDDEFGHMLAGILKENGVRADGINFDQGARTALAFVTLRADGEREFMFYRNPSADMLLKPEELNLELIRSAKVFHYGSISLIVEPCRSAHLKAMEVAKESGCLLSYDPNLRLPLWPSAEEARKQILSIWEKADLIKVSDAELEFLTGSDKIDDESALSLWHPNLKLLLVTLGEHGSRYYTKSFKGSVDAFHVNTVDTTGAGDSFVGALLAKIVDDQSILEDEPRLREVLKFANACGAITTTQKGAIPALPKEEAALKLIKGGS

SEQ ID NO: 1180 - protein, 439 aa, Glycine max
MASVSKLSTPNPLASLSEALRPRDSRFLTFKPSSIAFNHKTNLSASLRSIHSLPLKTSLRIKCSQTDGNGSPAKRTVLHDLYEKEGQSPWYDNLCRPVTDLLPLIASGVRGVTSNPAIFQKAISSSNAYNDQFRELVQTGKDIESAYWELVVKDIQDACRLFEPIYDQTDGGDGYVSVEVSPRLADDTEGTIEAAKWLHKVVDRPNVYIKIPATEACVPSIKEVIANGISVNVTLIFSLARYEAVIDAYLDGLEASELNDLSRVTSVASFFVSRVDTLIDKALEKIGTPVALNLRGKAAVAQAALAYQLYQRKFSGPRWEALVKKGAKKQRLLWASTSVKNPAYSDTLYVAPLIGPDTVSTMPDQALQAFIDHGTVSRTIDSNASEAEGIYNALQKLGIDWSFVGSQLELEGVDSFKKSFDSLLDSLQEKANSLKLVSH

SEQ ID NO: 1181 - protein, 413 aa, Glycine max
MAWVLSSLKFEVVWCNSSFSSCLVQNRSSSLPSTDHSISLNTRSIYYKIHPLLPLSATTITIFIMHKSSSDSTLGPGGLDLSQAFFRPINNAAPPSPTKRHNKISVIGAGNVGMAIAQTILTQDLTDELVLVDTNSDKLRGEMLDLQHAAAFLPRTKIHASADSSVTAGSDLCIVTAGARQISGESRLNLLQRNLSLFRAIIPPLVRYSPDTTLLIVSNPVDVLTYVAWKLSGFPSNRVIGSGTNLDSSRFRFLIADHLDVNAQDVQAYIVGEHGDSSVALWSSISIGGVPVLSFLENQQIVYEKETLENIHKSVIDSAYEVIKLKGYTSWAIGYSVANLARSFIRNQRKIHPVSVLAKGFYGIDGEVFLSLPAMIGRGGILGVTNVHLNEEETQRLRDSAKTILEVQTQLGI

SEQ ID NO: 1182 - protein, 411 aa, Glycine max
MALRLNPIPTQTFSLPQMASLRSPRFRMASTLRSGSKEVENIKKPFTPPREVHVQVTHSMPPQKIEIFQSLEDWAEENILAHLKPVEKCWQPQDFLPDPSSDGFEEQVKELRERAKELPDDYFVVLVGDMITEEALPTYQTMLNTLDGVRDETGASLTSWAIWTRAWTAEENRHGDLLNKYLYLSGRVDMKQIEKTIQYLIGSGMDPRTENSPYLGFIYTSFQERATFISHGNTARLAKEHGDIKLAQICGMIASDEKRHETAYTKIVEKLFESDPDGTVMAFADMMRKKIAMPAHLMYDGRDDNLFDNYSSVAQRIGVYTAKDYADILEFLVGRWKVEQLTGLSGEGRKAQEYICGLPPRIRRLEERAQARVKESSTLKFSWIHDRESTTLNAPREEHGEIFRQYRSEKC

SEQ ID NO: 1183 - protein, 420 aa, Glycine max
MAFRVRSPDLRSLFLLSLLSIASANVFFEERFDDGWENRWVKSDWKKDENVAGEWNHTSGQWNGDANDKGIQTSEDYRFYAISAEYPEFSNKGKTLVFQFSVKHEQKLDCGGGYMKLLSGDVDQKKFGGDTPYSIMFGPDICGYSTKKVHAILTYNNTNHLIKKDVPCETDQLTHVYTFILRPDATYSILIDNVEKQTGSLYSDWDLLPPKTIKDPEAKKPEDWDDKEYIPDPEDKKPEGYDDIPKELPDPEAKKPEDWDDEEDGEWTPPTIANPEYKGPWKAEKIKNPNYKGKWKAPLIDNPDFKDDPDLYVFPNLKYVGIELWQVKSGTLFDNVLITDDPEYAKQLVEETWGKHKDAEKAAFEEAEKKREEEESKDDPVDSDADEEEEDADEAGNDSDAESKTEAGEDTKEEGVHDEL

SEQ ID NO: 1184 - protein, 147 aa, Glycine max
MAELHYQPQHQYPLRYPNDPHQQTRSSTHQVVKAATAVTAGGSLLILASLILAATVIALTIVTPLFVIFSPVLVPAVITVALLSLGFLASSGFGVAAITVLAWIYRYVTGKQPPGADQLDSARHKIMDKAREIKDYGQQQISGVQAS

SEQ ID NO: 1185 - protein, 157 aa, Glycine max
MSIIPNLFGGRRSNVFDPFSLDVWDPFEGFPFSTGHVPSSGGESSAIANTRVDWKETPAAHVFNVDLPGLKKEEVKVEVEDGRVLQISGERTKEQEQKDDRWHRVERSTGKFMRRFRLPENAKMDQVKAAMENGVLTVTVPKEEDKKPQVKSIQISA

SEQ ID NO: 1186 - protein, 275 aa, Glycine max
MAERGGGERGGDRGGFGRGFGGRGRGGDRGRGRRRGPRREEEEKWVPVTKLGRLVKEGRIRSLEQIYLHSLPIKEHQIIDTLVGPTLKDEVMKITPVQKQTRAGQRTRFKAFVVVGDNNGHVGLGVKCSKEVATAIRGAIILAKLSVIPVRRGYWGNKIGKPHTVPCKVTGKCGSVTVRMVPAPRGSGIVAARVPKKVLQFAGIDDVFTSSRGSTKTLGNFVKATFDCLMKTYGFLTPEFWKETRFSKSPFQEYTDLLAKPTGKTLILEEERVDA

SEQ ID NO: 1187 - protein, 421 aa, Glycine max
MEVLLFAVMAGLAPEGTQFDGRQYDAKMSELLSTDGQEFFTSYDEVYDSFDAMGLQENLLRGIYAYGFERPSAIQQRGIVPFCKGLDVIQQAQSGTGKTATFCSGILQQLDYGLVQCQALVLAPTRELAQQIEKVMRALGDYLGVKVHACVGGTSVREDQRILQAGVHTVVGTPGRVFDMLRRQSLRPDCIKMFVLDEADEMLSRGFKDQIYDIFQLLPSKIQVGVFSATMPPEALEITRKFMNKPVRILVKRDELTLEGIKQFYVNVDKEEWKLETLCDLYETLAITQSVIFVNTRRKVDWLTDKMRSNDHTVSATHGDMDQNTRDIIMREFRSGSSRVLITTDLLARGIDVQQVSLVINYDLPTQPENYLHRIGRSGRFGRKGVAINFVTTDDSRMLSDIQKFYNVTVEELPSNVADLL

SEQ ID NO: 1188 - protein, 389 aa, Glycine max
MSHRKFEHPRHGSLGFLPRKRASRHRGKVKAFPKDNPSQPCGLTAFVGYKAGMTHIVREVEKPGSKLHKKETCEAVTIIETPPLVVVGVVGYVKTPRGLRTLNTVWAQHLSEEVKRRFYKNWCKSKKKAFTKYSKKYETEEGKKDIESQLEKLKKYATVIRVLAHTQIRKLKGLKQKKAHLMEIQVNGGTVDQKVDYAYSFFEKQIPVDAVFHKDEMIDIVGVTKGKGYEGVVTRWGVTRLPRKTHRGLRKVACIGAWHPARVSFTVARAGQNGYHHRTELNKKIYKVAKADHESHSAITEFDRTEKDITPMGGFPHYGVVKDDYIMVKGCCVGPKKRVITLRRSLLKQTSRVALEEIKLKFIDTSSKFGHGRFQTTQEKQKFYGRLKA

SEQ ID NO: 1189 - protein, 241 aa, Glycine max
MVSVSLLLFLSFFAFFAPSESHDKVSLELYYESLCPYSANFIVNHLPKIFTPDLAPIVHLKLVPWGNAKLRANATFDCQHGPYECLLNTVEACAIHIWPQLSKHFPFIYCVEDLVFQSKREEWESCFEKLDLDSEPINQCYNSEHGKQLELQYAAETSALEPPHKYVPWVVVDGEPLYEDYENFLSYLCKAYKGTVTPQSCTQASYLREVNAKPKHSVCYKDSGIMLTWEKVRSTIASWMH

SEQ ID NO: 1190 - protein, 298 aa, Glycine max
MVYVKAQKSKAYFKRYQVKFKRRREGKTDYRARIRLINQDKNKYNTPKYRFVVRFSNKDIVAQIISASIAGDLVLATAYSHELPRYGLEVGLTNYAAAYCTGLLLARRVLKTLEMDEEYEGNVEATGEDYSVEPAESRRPFRALLDVGLVRTTTGNRVFGALKGALDGGLDIPHSDKRFAGFDKEKKELDAEVHRKYVFGGHVAAYMKILAEDEPEKYQSHFSEYIKRGIEADGIEALYKKVHAAIRADPTLRKSDKEPPKEHKRYNMKKLTYEERKAKLIARVAAINSAADSDEDDE

SEQ ID NO: 1191 - protein, 156 aa, Glycine max
MADAHRTTAPPPSLSAAFLRKLQDRGPNSTQLACILTLLLTASVLLLLTGLTVAGAVLGLIFFLPLIIVSSPVWVPAGTFLFIVTAAFLSVCGFGVALVAVLSWMYHYFRGLHPPGSDRVDYARSRIYDTASHVKDYAREYGGYLQSKVKDAAPGA

SEQ ID NO: 1192 - protein, 309 aa, Glycine max
MAQQEVVEGFKFEQRHGKERVRVARVWKTRQGQHFIVEWRVGITLFSDCVNSYLRDDNSDIVATDTMKNTVYAKAKECSDILSAEEFAILLAKHFVSFYQKVTGAIVNIVEKPWERVTVDGQPHEHGFKLGSEKHTTEAIVQKSGSLQLTSGIEGLSVLKTTQSGFVNFIRDKYTALPDTRERMVATEVTALWRYSYESLYSLPQKPLYFTEKYQEVKKVLADTFFGPPKGGVYSPSVQNTLYLMAKATLNRFPDIAYVSLKLPNLHFIPVNISNQDGPIVKFEDDVYLPTDEPHGSIQASLSRLWSKL

SEQ ID NO: 1193 - protein, 159 aa, Glycine max
MAEQTEKAFLKQPKVFLSTKKTGKGKRPGKGGNRFWKSIGLGFKTPREAIEGTYIDKKCPFTGNVSIRGRILAGTCHSAKMNRTIIVRRNYLHFIKKYQRYEKRHSNIPAHISPAFRVKEGDHVIIGQCRPLSKTVRFNVLKVIPAGSSSGAKKAFTGM

SEQ ID NO: 1194 - protein, 229 aa, Glycine max; identical to SEQ ID NO: 755

SEQ ID NO: 1195 - protein, 130 aa, Glycine max
MVRVSVLNDALKSMYNAEKRGKRQVMIRPSSKVIIKFLLVMQKHGYIGEFEYVDDHRAGKIVVELNGRLNKCGVISPRFDVGVKEIEGWTARLLPSRQFGYIVLTTSAGIMDHEEARRKNVGGKVLGFFY

SEQ ID NO: 1196 - protein, 238 aa, Glycine max
MKRTPILFPLFFLLCAFTSYLPSATADDDHVYDTDGDKLQYGVNYFVLPVIRGNGGGIQVAKAGNETCPLTVVQSGNELSEGLPIKIASRSAGVAFITQGQLFKSIQFGVFPSTLRPGCPPSPIPSKWDPPSKWTIVEGLPERGLAVKLVGYQNRVSGWFSIVKVADDASSSSVGYKLVFCLWPEEEVMIHLCKNVGIRTDGKGIRRLVLSENTPLVVQFQKFRSALALNNHVLSASE

SEQ ID NO: 1197 - protein, 181 aa, Glycine max
MVKYSREPDNPTKSCKARGADLRVHFKNTRETAFAIRKLPLVKAKRYLEDVLAHKQAIPFRRFCRGVGRTAQAKNRHSNGQGRWPVKSAKFILDLLKNAESNAEVKGLDVDALYISHIQVNQAQKQRRRTYRAHGRINPYMSSPCHIELILSEKEEPVKKEPETKLATSKKSQALRSGTSS

SEQ ID NO: 1198 - protein, 181 aa, Glycine max
MASEKKLSNPMREIKVQKLVLNISVGESGDRLTRAAKVLEQLSGQAPVFSKARYTVRSFGIRRNEKIACYVTVRGDKAMQLLESGLKVKEYELLRRNFSDTGCFGFGIQEHIDLGIKYDPSTGIYGMDFFVVLERPGYRVGRRRRCKSRVGIQHRVTKEDAMKWFQVKYEGVILNKSQAIV

SEQ ID NO: 1199 - protein, 167 aa, Glycine max; identical to SEQ ID NO: 502

SEQ ID NO: 1200 - protein, 223 aa, Glycine max
MAVTFSDLHTEEGIKSLDQFLSGKTYISGDQLTKDDIKVYAAVVEKPGDTFPNAAKWYDAVSSQLAPSFPGHAQGVRFSGAAAPAEAAPAKAAATAEEDDDDLDLFGDETEEDKKAAEEREAAKKPAKKKESGKSSVLLDVKPWDDETDMKKLEETVRSIEMPGLLWGASKLVPVGYGIKKLQIMMTIVDDLVSVDTLVEERLTVEPCNEYIQSCDIVAFNKI

SEQ ID NO: 1201 - protein, 152 aa, Glycine max
MSLVANEDFQHILRVLNTNVDGKQKIMFAMTSIKGIGRRFANIACKKADVDMNKRAGELSAAELDSVMTVVANPRQFKIPDWFLNRKKDYKDGKYSQVVSNALDMKLRDDLERLKKIRNHRGLRHYWGLRVRGQHTKTTGRRGKTVGVSKKR

SEQ ID NO: 1202 - protein, 355 aa, Glycine max
MDFLNFMLNLLVPPGSMLTLAFSWPALCFLNVCEWLYNSIYGEDIDNKVVIITGASSGIGEQIAYEYALRRANLTLVARREHRLRGIAENAKRLGARHVMIMAADVVKEEDCRRFVNETINVFGRVDHLVNTVSLGHTFCFEEVTDTSVFPVLLDINFWGNVYPTFVALPYLHQSNGRIIINASVESWLPMPRMSLYAAAKAALVNFYETLRFELKDEVGITIATHGWIGSEMTRGKFMLEEGAEMQWKEEREVHVMGGPVEEFARLIVSGACRGDAYVKFPSWYDVFLLYRVFAPRVLNWAFRFLISPQGTRRASSYVGTGKHIEAVGMVRPMAMLEGTSPTHTGQLISQHKLD

SEQ ID NO: 1203 - protein, 202 aa, Glycine max
MNPEYDYLFKLLLIGDSGVGKSCLLLRFADDSYLDSYISTIGVDFKIRTVEQDGKTIKLQIWDTAGQERFRTITSSYYRGAHGIIVVYDVTDQESFNNVKQWLNEIDRYASENVNKLLVGNKCDLTANKVVSYETAKAFADEIGIPFMETSAKNATNVEQAFMAMAAEIKNRMASQPVNNARPPTVQIRGQPVNQKAGCCST

SEQ ID NO: 1204 - protein, 146 aa, Glycine max
MKFNPRVSSSRRKSRKAHFTAPSSVRRVLMSAPLSTDLRSKYNVRSIPVRKDDEVQVVRGTYKGREGKVVQVYRRKWVIHIERITREKVNGSTVNVGIHPSKVVVTKLRMDKDRKSLLDRKAKGRAAADKEKGTKFAPEDVMQTVD

SEQ ID NO: 1205 - protein, 317 aa, Glycine max
MATLTVPPVPPSPRDDAMQLYRAFKGFGCDTSAVINILAHRDATQRAYIQQEYRSMYSEELSKRLASELSGKLETAVLLWLHDPAGRDATIIRKSLTADNRSIEGATEVICSHTPSQLQYLKQIYHSMFGVYLEHDIQTNTSPGDHQKLLLAYISTPRHEGPEVNREIAQKDAKALYKAGEKKLGTDEKTFIHIFSERSAAHLAAVSSYYHDMYGHSLKKAVKNETSGAFEHALLTIIQCAVNPGKYFAKVLRKAMKGLGTDDSTLIRVIVTRTEVDMQYIKAAYLKKHKKTLNDEVHSETSGHYRTFLLSLLGPNH

SEQ ID NO: 1206 - protein, 192 aa, Glycine max
MKTILSSETMNIPDGVSIKVHAKVIEVEGPRGKLVRDFHHLNLDFQLITDDGGKRKLKIDSWFGSRKTSAAIRTALSHVENLITGVTKGYRYKMRFVYAHFPINASIGNNSKSIEIRNFLGEKKVRKVDMLEGVSVVRSEKVKDELVLDGNDIELVSRSCALINQKCHVKNKDIRKFLDGIYVSEKGTILEE

SEQ ID NO: 1207 - protein, 439 aa, Glycine max
MKTTLFSLSPLFLFLLFSLVEGLTPKCDTQDHGSTLEVFHVFSPCSPFRPPKPLSWAESVLQLQAKDQARLQFLASMVAGRSVVPIASGRQIIQSPTYIVRAKIGSPPQTLLLAMDTSNDAAWIPCTACDGCTSTLFAPEKSTTFKNVSCGSPQCNQVPNPSCGTSACTFNLTYGSSSIAANVVQDTVTLATDPIPDYTFGCVAKTTGASAPPQGLLGLGRGPLSLLSQTQNLYQSTFSYCLPSFKSLNFSGSLRLGPVAQPIRIKYTPLLKNPRRSSLYYVNLVAIRVGRKVVDIPPEALAFNAATGAGTVFDSGTVFTRLVAPAYTAVRDEFQRRVAIAAKANLTVTSLGGFDTCYTVPIVAPTITFMFSGMNVTLPEDNILIHSTAGSTTCLAMASAPDNVNSVLNVIANMQQQNHRVLYDVPNSRLGVARELCTK

SEQ ID NO: 1208 - protein, 990 aa, Glycine max
MASTASGATGWYRGRVKAVPSGDCLVIVAISSTKPGPLPEKTITLSSLIAPRLARRGGVDEPFAWESREFLRKLCIGKEVTFRVDYNVPSISRDFGTVFVGDKNVAMLVVSQGWVKVREQGQQKGEVSPYLAELLRLEEQAKQEGLGRWSKVPGAAEASIRNLPPSALGDPSNFDAMTFLNAKKGLPMEAVVEQVRDGSTLRIYLLPEFQFVQVFVAGIQSPQMGRRAAPESVVEPELTSDDTNGDVPGEPRAPLTSAQRLAVSTSAAETAADPFAHDAKFFTEMRVLNREVRLVLEGVDKFSNLIGSVYYPDGESAKDLALELVENGYAKYVDWSANMMEEEAKQKLKTAELQAKKDRLRMWTNYVPPPSNSKAIHNQNFSGKVVEVVSGDCIVVADDSIPYGSPLAERRVNLSSIRCPKMGNPRRDEKPAPYAREAKEFLRTRLIGRQVNVQMEYSRKVSPTDGSVVPSAADSRVMDFGSVFLLSGAKVDNDDAPSSAPPAGSQQNGVNVAELIVGRGFGTVIRHRDFEERSNYYDSLLAAESRAISGRKGTHSAKDPPVMHITDLTMASAKKARDFLPFLHRSRRVPAVVEYVLSGHRFKLLIPKETCSIAFSFSGVRCPGRDEPYSDEAIALMRRKIMQRDVEIEVETVDRTGTFLGSLWESRTNVAITLLEAGLAKLHTSFGSDRIPDFHLLDQAEQSAKRQKLKIWENFVEGEEVSNGAAVENKQQEVLKVIVTEVLGGGKFYVQTVGDQKIASIQQQLASLNLKDAPVLGAFNPKKGDIVLCYFHADKSWYRAMVVNTPRGPVESPNDLFEVFYIDYGNQEVVPYSQLRPVDPSVSAAPGLAQLCSLAYIKIPNLEEDFGQEAAEYLSELTLNSGKEFRAKVEEKDTSGGKVKGQGTGTVLAVTLVAVDAEISVNAAMLQEGLARTEKRNRWDRKDRQTALDNLENFQEEAKTSRRGMWQYGDIQSDDEDTAPPPRKAAGGRK

SEQ ID NO: 1209 - protein, 488 aa, Glycine max
MEREIEHCDKVMSQSSMDACPKSGPGYASPLAAISGPRETLLYVTAIYSGTGRDKPDFLATVDVDPSSPTYSKVIHRLPVPYLGDELHHFGWNSCSSCYGDPTAVRRYLILPSLVSGRIYVVDTKANPRSPSLHKVVEPEDIISKTGLAYAHTSHCLASGDVLISFLGDKDGNAEGSGFLLLDHEFNLKGRWEKPGHSPSFGYDFWYQPQHKTMISSSWGAPAAFTKGFNLQHVSDGLYGRHLHVYSWPGGELRQTLDLGESGLLPLEVRFLHDPSKDTGFVGCALSSNMVRFFKTEDESWSHEVAISVKPLKVQNWILPEMPGLITDFLISLDDRFLYFVNWLHGDIRQYNIEDPKNPVRTGQVWVGGLLQKGSPIVAITEDGNTWHSDVPDILGNKLRAGPQMIQLSLDGKRLYVTNSLFSAWDKQFYPELVEKGSHMLQIDVDTENGGLKINPNFFVDFGAEPGGSCLAHEMRYPGGDCTSDIWI

SEQ ID NO: 1210 - protein, 545 aa, Glycine max
MAVVAQTPDIAGERQSGQDVRTQNVVACQAVANIVKSSLGPVGLDKMLVDDIGDVTITNDGATILKMLEVEHPAAKVLVELAELQDREVGDGTTSVVIVAAELLKRANDLVRNKIHPTSIISGYRLAMREACKYVEEKLAVKVEKLGKDSLINCAKTSMSSKLIAGDSDFFAVLVVDAVQAVKMTNARGEVKYPIKGINILKAHGKSARDSFLMNGYALNTGRAAQGMPLRVAPARIACLDFNLQKTKMQLGVQVLVTDPRELEKIRQREADMTKERIEKLLKAGANVILTTKGIDDMALKYFVEAGAIAVRRVRKEDMRHVAKATGATLVSTFADMEGEETFEPSFLGYADEVVEERISDDAVVMIKGTKTTSAVTLILRGANDHMLDEMDRALHDALSIVKRTLESNTVVAGGGAVEAALSVYLEYLATTLGSREQLAIAEFAESLLIIPKVLSVNAAKDATELVAKLRAYHHSAQTKADKKHLSSMGLDLSQGKIRNNLEAGVIEPAMSKVKIIQFATEAAITILRIDDMIKLVKDESQNED

SEQ ID NO: 1211 - protein, 74 aa, Glycine max; identical to SEQ ID NO: 597

SEQ ID NO: 1212 - protein, 345 aa, Glycine max
MMKPSMLRSLHSAATRGASHLSRRGYASEPVPERKVAVLGAAGGIGQPLSLLMKLNPLVSSLSLYDIAGTPGVAADVSHINTGSEVVGYQGDEELGKALEGADVVIIPAGVPRKPGMTRDDLFNINAGIVKTLCTAIAKYCPHALVNMISNPVNSTVPIAAEVFKKAGTYDEKRLFGVTTLDVVRAKTFYAGKANVPVAGVNVPVVGGHAGITILPLFSQATPKANLDDDVIKALTKRTQDGGTEVVEAKAGKGSATLSMAYAGALFADACLKGLNGVPDVVECSFVQSTVTELPYFASKVRLGKNGVEEVLGLGPLSDFEQQGLESLKPELKSSIEKGIKFANQ

SEQ ID NO: 1213 - protein, 218 aa, Glycine max
MPGLTIGDTIPDLQVETNQGKIKLHQFCADGWTILFSHPGDFTPVCTTELGKMAQYAKEFYQRGVKLLGLSCDDVQSHNEWIKDIEAYTPGAKVNYPIIADPKREIIKQLNMVDPDEKDSTGNLPSRALHIVGPDLKIKLSFLYPATTGRNMDEVLRVIESLQKASKFKVATPANWKPGDPVVITPDVTNEQAKEMFPQGFESVKLPSKKEYLRLTKV

SEQ ID NO: 1214 - protein, 287 aa, Glycine max
MAEATQSNAELLEWPKKDKRRFLHVVYRVGDLDRTIKFYTECFGMKLLRKRDIPEEKYANAFLGFGPEQSHFVVELTYNYGVTSYDIGTGFGHFAIATPDVYKLVEDIRAKGGNITREPGPVKGGKSVIAFVKDPDGYAFELIQRSSTPEPLCQVMLRVGDLERSIKFYEKTLGLRVVKKTDRPEYKYTIAMLGYAEEHETTVLELTYNYGVTEYTKGNAYAQVAIGTDDVYKSAEVVNIVTQELGGKITRQPGPVPGLNTKITSFLDPDGWKTVLVDNQDFLKELE

SEQ ID NO: 1215 - protein, 526 aa, Glycine max
MHSSPLLLEEPIRMASILEPSKPTFFPAMTKIVGTLGLKSRSVDTISRCLDAGMSVARFDFSWGDPEYHQETLENLRVAIKSTKKLCAVMLDTVGPELQIENKTDHPITLEADTLVVLTPDQTKEAGSNLLPVNFNGLSKAVKKGDTIFIGKYLFTGSETASLWLEVSEVKGEDVTCLVKNTATLSGSLFTAHVSQIHIDLPTLADKDKEVISTWGVRNNIDFLSLYTRHVEDIRHAREFLSKLGDLKQTHIYAKIENIEGLKHFDEILREADGIILARGNLGIELPPEKVFLFQKAAIYKCNMVGKPVVVTRVVDSMTDNLRPTRAEATDVANAVLDGSDAILLGAETLRGQYPVETISIVGKICAEAEKVHNQDLYFKKAVKYVGEPMSHLESIASSAVRAAIKVKASVIICFTSSGRAARLIAKYRPIMPVISVVIPQLKTNQLRWTFTGAFEARQSLIVRGLFPMLADPRHPAESKSGTNESILKVALDHGKAFGIIKPHDRVVVCQKVADSSVVKILELED

SEQ ID NO: 1216 - protein, 437 aa, Glycine max
MALRHLRIFPHTLPLTLTPKPKLNNSNRFSFFTSSLSLSSTTLMATAHKVLVPIADGTEPMEAVIIIDVLRRSGADVTVASSSANLAVQALHGVKIIADASVSDVAATAFDLVALPGGLQGDENLRDCKVLEGFVKKHVEDGRLYAAVCAAPAVVLGPWGLLNGKKATCYPALMEKLAAYVAATSESRVQVDGTVVTSRAPGTTMEFAIALIEQLIGKEKAYEVAGPLVMRSNHDDEHTFKEFNSVQWTSDNPPKILVPIANGSEEMEAVIIIDILRRAKAKVVVASVEDKLEIVASRKVKLEADMLLDEATKLSYDLIVLPGGLGGAQTFANSETLVSLLKKQRESNKYYGAICASPALVLEPHGLLKGKKATAFPVMCDKLSDQSEVENRVVVDGNLITSRGPGTSIEFALAIVEKLFGRKLALELANAVVFARP

SEQ ID NO: 1217 - protein, 847 aa, Glycine max
MRKWTVASALLLLSLLFLFADQGRKFQANAEGDSDELVDPPKVEDKIGAVPHGLSTDSDVVKREAESISKRSLRSNAEKFEFQAEVSRLMDIIINSLYSNKDIFLRELISNASDALDKIRFLSLTDKEVLGEGDNTKLDIQIKLDKEKKILSIRDRGIGMTKEDLIKNLGTIAKSGTSAFVEKMQTSGDLNLIGQFGVGFYSVYLVADYVEVISKNNDDKQYVWESKADGAFAISEDTWNEPLGRGTEIRLHLKEEAGEYLEESKLKELVKRYSEFINFPIYIWASKEVDVEVPADEDDSSDEEDSSESSSKEESEDEDADKSEDEEKKPKTKTVKETTYEWELLNDVKAIWLRNPKEVTEEEYTKFYHSLAKDFSDEKPLAWSHFTAEGDVEFKAVLFVPPKAPQDLYESYYNANKSNLKLYVRRVFISDEFNELLPKYLNFLLGLVDSDTLPLNVSREMLQQHSSLKTIKKKLIRKALDMIRRIADEDPDESTDKEKKEDASSDNDEKKGQYSKFWNEFGKSIKLGIIEDATNRNRLAKLLRFESTKSEGKLTSLDQYISRMKTGQKDIFYITGTSKEQLENSPFLERLKKKNFEVIFFTDPVDEYLMQYLMDYEDKKFQNVSKEGLKLGKDSKDKELKESFKDLTKWWKTALSKDNVDDVKISNRLDNTPCVVVTSKFGWSANMERIMQSQTLSDASKQAYMRGKRVLEINPRHPIIKELRERVVKNPEVHSRLLEHFLRHLFPQLKWGLSVNTICFTFQDEGVKHTAQLMYQTALFESGFLLDDPKDFASRIYDSVKTSLDISPEATVEEEDDTEVEAESDAKEDSKPETDAVNDDNDVKDEL

SEQ ID NO: 1218 - protein, 241 aa, Glycine max
MTSISSTPNSTIVTLLHSHPATCSNRTVTSASRATINISLSSSATPSKTLIPLSSSSSVVRFSILFSATMPNPKVFFDMTIGGQPAGRIVMELYADVTPSTAENFRALCTGEKGAGRSGKPLHYKGSSFHRVIPNFMCQGGDFTAGNGTGGESIYGAKFADENFVKKHTGPGILSMANAGPGTNGSQFFICTTKTEWLDGKHVVFGQVVEGMDVVKEIEKVGSSSGRTAKPVVVADCGQLS

SEQ ID NO: 1219 - protein, 417 aa, Glycine max
MLALPFPISTHFCTKKHLLHLCNQRKIKSTQEVKLGGEINMQRSESMRLKEKKVKDLMVDKKRLVEVPYMASLAHTMTTLVANKVVAVPVAAPPGQWIGAGGSMIVESDKQTGTVRKHYIGMVTMLDIVVHIAGDNHLSGDDDDITKDLDQRMSGPVSSIIGHSFEGLSLWTLNPNTSLLDCMEVLSKGVHRAMVPVDGQAENVAAAGVELVESAWSYQMLTQMDVLRFLHDRAGEGDGELQSILSRSVQDLLAVTEQIYAITDRTKLVDAIKCLKAAMLNAVPIVRASDVDQDDHKQHINGRCRKLIGTFSSTDLRGCHIATLKSWLGISALAFTEDVASSPLYTESESDTQINRRELVTCFAESPLSEVIEKAVTRHVHRVWMVDHQGLLVGVVSLTDVIRVIRHSLLSSDSDDL

SEQ ID NO: 1220 - protein, 619 aa, Glycine max
MATLTASSNLVSRNSHVHHGPTTASYESKAVAMGLRSLKQTNTHNGLRILNPVDELLNRTPIKTNAVQAMRKGPQGKNARPKGMITCGMTFIIIGTEVAPWCKTGGLGDVLGGLPPALAGFGHRVMTIVPRYDQYKDAWDTSVVIEVKVGDRTEKVRFFHCYKRGVDRVFVDHPWFLEKVWGKTGQKLYGPTTGNDYEDNQLRFSLFCQAALEAPRVLSLNSSKYFSGPYGEDVIFVANDWHTALIPCYLKSMYQSRGIYTNARVVFCIHNIAYQGRFAFADFSLLNLPDQFKSSFDFIDGHVKPVVGRKINWLKAGLIESWFVITVSPNYAKELVSGPDKGVELDNIIRKIDDDGRLVGIVNGMDVQEWNPTTDKYIAVKYDVSTVLEAKALLKEALQAEVGLPVDRNIPLIGFIGRLEEQKGSDILAEAIPQFIKQNVQLVALGTGKKQMEKQLEELEISYPDKARGVAKFNVPLAHMIIAGADFILVPSRFEPCGLIQLQAMRYGSVPIVASTGGLVDTVKEGFTGFQMGAFNVECDAVDPADVDAISKTVKRALAVYGTPAFTEIIKNCMAQDLSWKGPAKEWEEVLLSLGVPGSEPGSDGEEIAPQAKENVATP

SEQ ID NO: 1221 - protein, 247 aa, Glycine max
MKFNIASPTTGCQKKLEIDDDQKLRAFWDKRISQEVSGDALGEEFKGYVFKITGGCDKQGFPMKQGVLTPGRVRLLLHRGTPCFRGYGRRNGERRRKSVRGCIVSPDLSVLNLVIVKKGENDLPGLTDAEKPRMRGPKRASKIRKLFNLSKEDDVRKYVNTYRRTFTTKAGKKVSKAPKIQRLVTPLTLQRKRARIADKKKRIAKAKSEAAEYQKLLASRLKEQRDRRSESLAKRRSKLSSAAKAAV

SEQ ID NO: 1222 - protein, 150 aa, Glycine max
MSRRKVREPKEENVTLGPAVRDGEHVFGVARIFASFNDTFIHVTDLSGRETLVRITGGMKVKADRDESSPYAAMLAAQDVAARCKELGITALHIKLRATGGNKTKTPGPGAQSALRALARSGMKIGRIEDVTPIPSDSTRRKSGRRGRRL

SEQ ID NO: 1223 - protein, 143 aa, Glycine max
MATARTVKDVSPHEFVKAYSSHLKRSGKMELPEWTDIVKTARFKELAPYDPDWYYVRAASMARKIYLRGGLGVGAFQRIYGGSKRNGSRPPHFCKSSGAVARHILQQLQNMSIIELDTKGGRKITSSGRRDLDQVAGRIVVAP

SEQ ID NO: 1224 - protein, 216 aa, Glycine max
MSKLQSDALREAISGIMADSKEKNRKFVETIELQIGLKNYDPQKDKRFSGSVKLPHIPRPKMKICMLGDAQHVEEAEKIGLDWMDVEALKKLNKNKKLVKKLAKKYHAFLASEAVIKQIPRLLGPGLNKAGKFPTLVTHQETLESKVNESKAMVKFQLKKVLCMGVAVGNVSMEEKQIFQNVQLSVNFLVSLLKKNWQNVRCLYLKSTMGKCYRVF

SEQ ID NO: 1225 - protein, 149 aa, Glycine max; identical to SEQ ID NO: 618

SEQ ID NO: 1226 - protein, 162 aa, Glycine max
MAPIAVGDVIPDGILAYLDEENKPQTVSIHSLAAGKKVIIFGVPGAFTPTCSLKHVPGFIERAEELKGKGVDEIICISVNDPFVMNSWAKTFPENKHVKFLADGAAKYTNALGLELDLTDKGLGVRSKRFALLVEDLKVKVANVESGGEFTISSAEEIIKAL

SEQ ID NO: 1227 - protein, 155 aa, Glycine max
MADVEVDVAAAAAAGQPKKRTFKKFSFRGVDLDALLDMSTDELVKMFSARARRRFQRGLTRKPMALIKKLRKAKREAPPGEKPEPVRTHLRNMIIVPEMIGSIIGVYNGKTFNQVEIKPEMIGHYLAEFSISYKPVKHGRPGIGATHSSRFIPLK

SEQ ID NO: 1228 - protein, 129 aa, Glycine max
MEGGLKGSSLQDMKLLFVEMGVGYDLHGQDITAAAMRACRDAISANSIPAFRKGSIPGVTSDHMKLHVKLGVPHPLQQNLNKDKIKSVFPYGQIMNFEVVDGGLVCSTEEMAEKNDDCYIVNAAVYVGY

SEQ ID NO: 1229 - protein, 123 aa, Glycine max
MATYAAMKPNKPGLEESQEQIHKIRITLSSKHVKNLEKVCGDLVRGAKDKRLRVKGPVRMPTKVLHITTRKSPCGEGTNTWDRFELRVHKRVIDLYSSPDVVKQITSITIEPGVEVEVTIADA

SEQ ID NO: 1230 - protein, 191 aa, Glycine max
MYTSRKKIHKDKDAEPTEFEESVGQALFDLENTNQELKSDLKDLYINSAVQVDVSGNRKAVVIHVPYRLRKGFRKIHVRLVRELEKKFSGKDVILVATRRILRPPKKGSAAQRPRSRTLTAVHEAMLEDVVLPAEIVGKRVRFRIDGSKIMKVYLDPKERNNTEYKLETFAAVYRKLSGKDVVFEYPVSEA

SEQ ID NO: 1231 - protein, 157 aa, Glycine max
MAVIFSSAIPGGAAPAAIEQVQCFGRKKTAVAVTYCKRGRGLIKINGCPIELVEPEILRFKAFEPILLLGRHRFAGVDMRIRVKGGGHTSQIYAIRQSIAKALVAYYQKYVDEQSKKEIKDILVRYDRTLLVADPRRCEPKKFGGRGARARFQKSYR

SEQ ID NO: 1232 - protein, 348 aa, Glycine max
MATDSSNGNGHHQTTTKQPPLPSPLRFSKFFQSNMRILVTGGAGFIGSHLVDRLMENEKNEVIVADNYFTGSKDNLKKWIGHPRFELIRHDVTEPLLIEVDQIYHLACPASPIFYKYNPVKTIKTNVIGTLNMLGLAKRVGARILLTSTSEVYGDPLVHPQPESYWGNVNPIGVRSCYDEGKRVAETLMFDYHRQHGIEIRIARIFNTYGPRMNIDDGRVVSNFIAQALRGEPLTVQCPGTQTRSFCYVSDLVDGLIRLMEGSNTGPINLGNPGEFTMTELAETVKELINPGVEIKMVENTPDDPRQRKPDITKAKELLGWEPKVKLRDGLPRMEEDFRLRLGVGKKN

SEQ ID NO: 1233 - protein, 261 aa, Glycine max
MAVGKNKRISKGKKGGKKKAADPFAKKDWYDIKAPSLFQVKNVGKTLVSRTQGTKIASEGLKHRVFEVSLADLQGDEDHAFKKIRLRAEDVQGKNVLTNFWGMDFTTDKLRSLVRKWQTLIEAHVDVKTTDNYTLRMFCIGFTKRRANQVKRTCYAQSSQIRQIRRKMREIMTNQATSCDLKELVRKFIPEIIGKEIEKATSSIYPLQNVFVRKVKILKAPKFDLGKLMEVHGDYSEDVGAKVDRPADEIVAEEPTEIVGA

SEQ ID NO: 1234 - protein, 166 aa, Glycine max
MPPKFDPSQIVDVFVRVTGGEVGAASSLAPKIGPLGLSPKKIGEDIAKETAKDWKGLRVTVKLTVQNRQAKVTVVPSAAALVIKALKEPERDRKKTKNIKHNGNISLDDVIEIARVMRPRSMAKDLSGSIKEILGTCVSVGCTVDGKDPKDLQQEITDGDVEVPLD

SEQ ID NO: 1235 - protein, 181 aa, Glycine max
MIIPEKNRKEICKYLFQEGVCFAKKDFNLAKHPEIDVPNLQVIKLMQSFKSREYVRETFAWMHYYWFLTNDGIEFLRTYLNLPSEIVPATLKKQAKPAGRPFGGPPGDRPRGPPRFDGERRFGGDRDGYRGGPRGPGGDFGDKGGAPADYRPSFGGGPGGRPGFGRGSGGYGAPTSSNIPS

SEQ ID NO: 1236 - protein, 395 aa, Glycine max
MASASATLLKSSPVLDKCEWVKGQTLRQPLVRCNPSSASALTIKAASYADELVKTAKTVASPGRGILAMDESNATCGKRLASIGLENTEANRQAYRTLLVTVPGLGEYISGAILFEETLYQSTVDGRKIVDVLVDQNIVPGIKVDKGLVPLAGSNDESWCQGLDGLASRSAAYYQQGARFAKWRTVVSIPNGPSALAVKEAAWGLARYAAISQENGLVPIVEPEILLDGEHGIDRTFEVAQKVWSEVFFYLAENNVLLEGILLKPSMVTPGAESKDKATPLQVADYTLKLLHRRIPPAVPGIMFLSGGQSEVEATLNLNAMNQSPNPWHVSFSYARALQNTCLKTWGGLPENVKAAQDALLFRAKSNSLAQLGKYTAEGESEEATRGMFVKGYSY

SEQ ID NO: 1237 - protein, 579 aa, Glycine max
MGERKGIPIALGLLAMLLFFIASSSSSHLVRASDDADDAIFYESFDEDFDGRWIVSDKEDYNGVWKHAKSDGHDDYGLLVSEQARKYAIVKKLDEPVSLKDGTVVLQFETRLQNGLECGGAYIKYLRPQESGWKPKEFDNESPYSIMFGPDKCGATNKVHFIFKHKNPKSGEYVEHHLKYPPSVPSDKLTHVYTAILKPDNELQILIDGEEKKKANFLSSEDFEPPLIPSKTIPDPDDKKPEDWDERAKIPDPSAVKPDDWDEDAPMEILDEEAEKPEGWLDDEPEEIDDPEATKPEDWDDEEDGEWEAPKIENPKCEAAPGCGEWKRPMKRNPAYKGKWSAPYIDNPNYKGIWKPREIPNPEYFELEKPDFEPIAALGIEIWTMQDGILFDNILIANDDKVAESYRETTWKPKFTIEKEKQKAEDEAATGSDGIAGFQKKVFDLLYKIADIPFLSDHKSKIYDLIEKAEKQPNLTIGILVAVVVVFVSIFFRLIFGGKKPVSSDFFSLRSFIVFLSWNYYSVLFYLNLITKSLLVQAKVEKKPERTEASNNQGGAENEENKEKEEASNAPRRRPRRED

SEQ ID NO: 1238 - protein, 476 aa, Glycine max
MAQLKASPACSTRATAPSFHTTGHLYHHFWKAKPSSFKELGLRTSVGANKLQVIKAAARSDTEVVSETTKAGGLRGKLNKVVLAYSGGLDTSVIVPWLRENYGCEVVCFTADVGQGIKELEGLEQKAKASGACQLVVKDLKEEFVKDYIFPCLRAGAVYERKYLLGTSMARPVIAKAMVDVAKEVGADAVSHGCTGKGNDQVRFELTFFALNPKLNVVAPWREWDITGREDAIEYAKKHSIPVPVTKKSIYSRDRNLWHLSHEGDILEDPSNEPKKDMYMMSVDPEDAPDQAEYVEIGLESGLPVSVNGKSLSPASLLAELNEIGGRHGIGRIDMVENRLVGMKSRGVYETPGGTILFAAARELESLTLDRETIQVKDSLALKYAELVYAGRWFDPLRESMDAFMQKITETTTGSVTLKLYKGSVTVTSRTSPFSLYREDISSFESGQIYDQADAAGFIRLYGLPVRVRAMLEQGI

SEQ ID NO: 1239 - protein, 181 aa, Glycine max
MAEVRSQQQQPQHVQVHATTTHTPQHHGGEGGSGILNLIPEMSLTGSQLLALLAGVPLGAMLLLLSGISLIASLLGLAVATPLFIFFSPLLVPAAFAIGMAVTAVLAAGACGLAGLVLFSWVVNYLRQMPRGTTMMTVLPEQAKRHVADMAEYVGQKTKEVGQDIQTRAHHAQGTTRMTVH

SEQ ID NO: 1240 - protein, 233 aa, Glycine max
MDQKVDFSAPHSMGTTIIGVTYNGGVVLGADSRTSTGVYVANRASDKITQLTDNVYVCRSGSAADSQIVSDYVRYFLHQHTIQLGQPATVKVAANLVRLLAYNNKNFLQTGLIVGGWDKYEGGQIYGVPLGGTIVQQPFAIGGSGSSYLYGFFDQAWKEGMTKDEAEDLVKKAVSLAIARDGASGGVVRTVIINSEGVTRNFYPGDQLPLWHEEMEAHNSLLDILGVPEPMSM

SEQ ID NO: 1241 - protein, 545 aa, Glycine max
MASNDSDSQMKIVHGDAGYILEDVPHFADYIPNLPVFSLSLSLFRSSSITYANCIALTHSLADRLCTTFFFLQTYPNPLRSNPAYSVVKQYFVHMDDTVPQKVVVHKDSPRGVHFRRAGPRQKVYFKSDEVHACIVTCGGLCPGLNTVIREIVCGLSYMYGVNKVLGIDGGYRGFYSKNTITLTPKVVNDIHKRGGTILGTSRGGHDTGKIVDSIQDRGINQVYIIGGDGTQRGATVIYEEVRRRGLKVAIAGIPKTIDNDIPVIDKSFGFDTAVEEAQRAINAAHVEAESIENGIGVVKLMGRYSGFIAMYATLASRDVDCCLIPESPFYLEGKGGLFEFIEKRLKENGHMVIVIAEGAGQDLLTESMQAMDQKDASGNKLLQDVGLWISHKIKDHFARKDKMPINLKYIDPTYMIRAIPSNASDNVYCTLLAQSAVHGAMAGYTGFTVGLVNGRQTYIPFIRINERQNKVVITDRMWARLLSSTNQPSFLSPKDLEEAKKAESPTQLLEENNCNDVGDAEKEQPPKDEQESGNHTDNGIKTQN

SEQ ID NO: 1242 - protein, 454 aa, Glycine max
MHGHQPLYPPTESPTMDVKFGTTLIVIFSVMWLMRVNAIDPCASQPDNSDLNVIPIYSKCSPFKPPKADTWDNRIINMASKDPVRVKYLSTLVSQKTVSTAPIASGQAFNIGNYVVRVKLGTPGQLLFMVLDTSTDEAFVPCSGCTGCSDTTFSPKASTSYGPLDCSVPQCGQVRGLSCPATGTGACSFNQSYAGSSFSATLVQDALRLATDVIPYYSFGCVNAITGASVPAQGLLGLGRGPLSLLSQSGSNYSGIFSYCLPSFKSYYFSGSLKLGPVGQPKSIRTTPLLRSPHRPSLYYVNFTGISVGRVLVPFPSEYLGFNPNTGSGTIIDSGTVITRFVEPVYNAVREEFRKQVGGTTFTSIGAFDTCFVKTYETLAPPITLHFEGLDLKLPLENSLIHSSAGSLACLAMAAAPDNVNSVLNVIANFQQQNLRILFDIVNNKVGIAREVCN

SEQ ID NO: 1243 - protein, 623 aa, Glycine max
MPAVYGARLTTFEDSEKESEYGYVRKVSGPVVVADGMAGAAMYELVRVGHDNLIGEIIRLEGDSATIQVYEETAGLMVNDPVLRTHKPLSVELGPGILGNIFDGIQRPLKTIAKRSGDVYIPRGVSVPALDKDTLWEFQPKKIGEGDLLTGGDLYATVFENSLMQHHIALPPDNMGKITYIAPPGQYSLQDTVLELEFQGVKKKFTMLQTWPVRTPRPVASKLAADTPLLTGQRVLDALFPSVLGGTCAIPGAFGCGKTVISQALSKYSNSDAVVYVGCGERGNEMAEVLMDFPQLTMTLPDGREESVMKRTTLVANTSNMPVAAREASIYTGITLAEYFRDMGYNVSMMADSTSRWAEALREISGRLAEMPADSGYPAYLAARLASFYERAGKVKCLGGPERTGSVTIVGAVSPPGGDFSDPVTSATLSIVQVFWGLDKKLAQRKHFPSVNWLISYSKYSTALETFYEQFDPDFINIRTKAREVLQREDDLNEIVQLVGKDALAEGDKITLETAKLLREDYLAQNAFTPYDKFCPFYKSVWMMRNIIHFYNLANQAVERGAGSDGQKISYTLIKHRMGDLFYRLVSQKFEDPAEGEAALVAKFQKLHEDLTNGFRNLEDETR

SEQ ID NO: 1244 - protein, 421 aa, Glycine max
MAVLQSFVSVHPDSHFPIQNLPYGVFKPQSASPPRPGVAIGDFVLDLSEISSAGLFDGPLLKNSDAFLQPNLNKFVSLGRPAWKEARATLQKLLSATEPTLRDNAVLRQKALVPMSSVELLLPVAVGDYTDFFTSLHHTKNCGIIFRGPQTPVLDNWYRLPVAYHGRASSVVISGTDIVRPRGQAHPVGSSTPYFGPSLKLDFELEMATIVGPGNELGKPVDINNAKDHIFGLVLMNDWSARDIQAWEYIPLGPFLGKSFGTTISPWIVTLEALEPFASEAPKQDPSPLPYLTEKEPKIYDISLEAHIKPAGHEDSGVVSRTNLKHLYWTLTQQLAHHTINGCNLRPGDLLGTGTVSGPEPESRACLLELTWNGQNTVSVNELNRKFLEDGDEVILTGYCKGNGYSVGFGTCSGKIVPAAP

SEQ ID NO: 1245 - protein, 181 aa, Glycine max
MNLNTSSNLETRSLLDELCNFHKKGLFDLGHPLLNRILETFVKAAGIGAVQAVSREAYFTAIEGTGTDNSGGLPPEISSAKKNRLPSLKGETNNKSLEAMVKNTGKESLQWGVAAGLYAGLTYGLKEARGAHDWKNSAVAGAITGATLALTLEDSTHEQIVQCAITGAAISTAANLLTGIF

SEQ ID NO: 1246 - protein, 352 aa, Glycine max
MSRFRRFELIEQPPFFHSCYSFPSFVLQDSLSLDLDLLPLPSHFDAFADLVHAPSFAYRRVERHLENELRLQSLSDRVAELESRFDRVLGGDRKYTWTAEIKGAEKNGFDRKYKWVAEVAEEEDKKKKKNKKKQVKVLKDKSARWTLQLENEDAEEEEEKKKKLLKGVARNVKWTAEITGKGENSGSSRKYTFQVQSGDAEKKEKKNKGNGNGLRIVEIQEPIGHRDVVLRQAFAKRFGAVQNERGKKKDLSPQDAALLIQISFRAYLIRRSKALRALRELAIAKSKLKEIRAQFNNFSYRRHVARDAEERQRFSEKIIVLLLTVDAIEVVISIFGSFFVEQIELFPQFLNC

SEQ ID NO: 1247 - protein, 449 aa, Glycine max
MASRQQKEDRAEAAAKVAAKELEQLNREKDRDFSVGVADQHQQEEHQLDQQKRGVIGSMFKAVQDTYENAKEAVVGKKEPSTTTNSYSTREVIHDVDIQPDDAAAAREVRDKSASKSPGIYNSATADNKTGSKVGEYADYGSQKAKETKDATKEKAGEYTDYASQKAKETKDKTMEKAGEYTDYASQKAKETKDKTMEKAGEYTDYASQKAKEAKDKTMEKGGEYKDYAAEKAKEGKDATVNKMGEYKDYTAEKAKEGKDTTLGKLGELKDSAADAAKRAVGYLSGKTEETKEKVSETAEATANKAAEMKEATREKAAGTAEAAKNKAAEVKDRAAETAEAAKNKTAETAEAAKQKTAQAKDNAKENVSGADEGARRKMEDLRLRGKGYGSHESAGGRGDKVVVKVEESRPGAIAETLKAADQIAGQTFNDVGRFDEEEGVVNVERRKK

SEQ ID NO: 1248 - protein, 213 aa, Glycine max
MALEVAVKAAVGAPNVLGDCPFSQRVLLTLEEKKIPYKLHLIDLSSKPEWFLGVNPEGKVPVVLFDGKWVADSDVIVGILEEKYPEPSLVTPPEFASVGSKIFGSFVSFLKSKDTNDGTEQTLVAELSALDEHLKAHGPYIAGEKVTAVDLSLAPKLYHLVVALSHFKNWNIPESLTHVHNYTKLLFSRESFEKTKPPKVEYVISGWAPKVNA

SEQ ID NO: 1249 - protein, 392 aa, Glycine max
MTTTSFSGLQFAMSRSCIPSSQKIADAGAVVLGGKSKIGSWNKLASACHIASVQPFGRGFTSSSIKSVKSVTKAMTESSAQSAVSGLPINLKGKRAFIAGVADDNGYGWAIAKSLAAAGAEILVGTWVPALNIFESSLRRGKFDESRVLPDGSLMEITKVYPLDAVFDNLDDVPEDIKANKRYAGSSKWTVQEVAESVKEDFGSIDILVHSLANGPEVTKPLLETSRKGYLAAISASSYSYVSLLKHFLPILNPGGSSISLTYIASERIIPGYGGGMSSAKAALESDTRVLAFEAGRKRKIRVNTISAGPLRSRAAKAIGFIDMMIDYSSANAPLQKELSAEEVGNTAAFLASPLASAITGTVLYVDNGLNAMGVGVDSPIFKDLDIPKDQH

SEQ ID NO: 1250 - protein, 137 aa, Glycine max
MGVVVIDGSTVRDFVNDEAAFAKSVDEQFGVLDLNNDGVLSRSELRTAFESMRLIETHFGIDVATPPDQLAKLYDSIFDKFDGDRSGAVDRREFRDEMRKIMLAIADGLGSFPIRMVLEDDPNSLLQKAADLEASKT

SEQ ID NO: 1251 - protein, 536 aa, Glycine max
MASSLRISRLISRSFSSTSFFSRGGNGFLGSRHCKYSTSSAIEEEPVKPSVQVEHTQLLIDGKFVDAASGKTFPTLDPRTGEVIAHVAEGHSEDVDRAVAAARKAFDHGPWPKMTAYERQRILLRAADLLEKHNDELAALETWDNGKPYEQAAKIEVPMLVRLIRYYAGWADKIHGLTVPADGPYHVQTLHEPIGVAGQIIPWNFPLLMFAWKVGPALACGNTIVLKTAEQTPLSALYAAKLFHEAGLPAGVLNVVSGFGPTAGAALASHMEVDKLAFTGSTDTGKVVLELAAKSNLKPVTLELGGKSPFIVCEDADVDQAVELAHFALFFNQGQCCCAGSRTFVHESVYDEFVEKAKARALKRVVGDPFKGGIEQGPQIDSDQFEKILRYIRSGVESGATLETGGDKLGNKGFYIQPTVFSNVKDGMLIARDEIFGPVQSILKFKDLGEVVQRANNTRYGLAAGVFTTNMDTAYTLTRALRVGTVWINCFDTFDAAIPFGGYKMSGQGREKGEYSLKNYLQVKAVVNPLKNPAWL

SEQ ID NO: 1252 - protein, 486 aa, Glycine max
MAQPTTRIGLAGLAVMGQNLALNIAEKGFPISVYNRTTSKVDETVERAKQEGNLPVYGYHDPEAFVHSIQKPRVIIMLVKAGAPVDQTIKTLSAYMEKGDCIIDGGNEWYENTERREKEVAELGLLYLGMGVSGGEEGARNGPSLMPGGSFEAFKYIEDILLKVAAQVPDSGPCVTYIGKGGSGNFVKMIHNGIEYGDMQLIAEAYDVLKSVGKLSNEELQSVFSEWNKGELLSFLIEITADIFGIKDDKGDGYLVDKVLDKTGMKGTGKWTVQQAAELSIAAPTIEASLDARFLSGLKEERVEAAKVFKSGGIGDIVTDQPVDKQKLIDDVRKALYAAKICSYAQGMNLIRAKSIEKGWDLKLGELARIWKGGCIIRAIFLDRIKQAYERNPNLANLLVDPEFAKEIIDYQSAWRRVVCLAINSGISTPGMSASLAYFDTYRRERLPANLVQAQRDYFGAHTYERVDIEGSYHTEWFKLAKQSRN

SEQ ID NO: 1253 - protein, 333 aa, Glycine max
MASERQALMLILLTTFFFTIKPSQASTTGGITIYWGQNIDDGTLTSTCDTGNFEIVNLAFLNAFGCGITPSWNFAGHCGDWNPCSILEPQIQYCQQKGVKVFLSLGGAKGTYSLCSPEDAKEVANYLYQNFLSGKPGPLGSVTLEGIDFDIELGSNLYWGDLAKELDALRHQNDHYFYLSAAPQCFMPDYHLDNAIKTGLFDHVNVQFYNNPPCQYSPGNTQLLFNSWDDWTSNVLPNNSVFFGLPASPDAAPSGGYIPPQVLISEVLPYVKQASNYGGVMLWDRYHDVLNYHSDQIKDYVPKYAMRFVTAVSDAIYESVSAATHRILQKKPY

SEQ ID NO: 1254 - protein, 166 aa, Glycine max
MAEAQLRDQHGNPVPLTDQYGNPVILTDERGNPVQLTGVATTATGTAGSGFGSYGTGAYGGGASATTVADLLATQPRSGREARELRRSSSSSSSSSEDDGQGGRRKKGVKDKIKEKLPGVGGGNNNKEHAHTTTAPTTATNHPADQHEKKGIMERIKEKLPGHHTH

SEQ ID NO: 1255 - protein, 341 aa, Glycine max
MCEHLLVSLSCYIWVRTQRIVEFNEMEQIKHRTVEVNGIKMHVAEKGEGPVVLFLHGFPELWYSWRHQILSLSSLGYRAVAPDLRGYGDTEAPPSISSYNCFHIVGDLVALIDSLGVQQVFLVAHDWGAIIGWYLCMFRPDKVKAYVCLSVPLLRRDPNIRTVDGMRALYGDDYYVCRFQKPGEMEAQMAEVGTEYVLENILTTRNPGPPILPKGRFQFNPEMPNTLPSWLTEEDLAYYVSKFEKTGFTGPLNYYRNFNLNWELTAPWTGGQIKVPVKYITGELDMVYNSLNLKEYIHGGGFKQDVPNLEQVIVQKGVAHFNNQEAAEEIDNYIYDFINKF

SEQ ID NO: 1256 - protein, 416 aa, Saccharomyces cerevisiae
  strain ATCC 204508 / S288c
MSLSSKLSVQDLDLKDKRVFIRVDFNVPLDGKKITSNQRIVAALPTIKYVLEHHPRYVVLASHLGRPNGERNEKYSLAPVAKELQSLLGKDVTFLNDCVGPEVEAAVKASAPGSVILLENLRYHIEEEGSRKVDGQKVKASKEDVQKFRHELSSLADVYINDAFGTAHRAHSSMVGFDLPQRAAGFLLEKELKYFGKALENPTRPFLAILGGAKVADKIQLIDNLLDKVDSIIIGGGMAFTFKKVLENTEIGDSIFDKAGAEIVPKLMEKAKAKGVEVVLPVDFIIADAFSADANTKTVTDKEGIPAGWQGLDNGPESRKLFAATVAKAKTIVWNGPPGVFEFEKFAAGTKALLDEVVKSSAAGNTVIIGGGDTATVAKKYGVTDKISHVSTGGGASLELLEGKELPGVAFLSEKK

SEQ ID NO: 1257 - protein, 332 aa, Saccharomyces cerevisiae
  strain ATCC 204508 / S288c
MVRVAINGFGRIGRLVMRIALSRPNVEVVALNDPFITNDYAAYMFKYDSTHGRYAGEVSHDDKHIIVDGKKIATYQERDPANLPWGSSNVDIAIDSTGVFKELDTAQKHIDAGAKKVVITAPSSTAPMFVMGVNEEKYTSDLKIVSNASCTTNCLAPLAKVINDAFGIEEGLMTTVHSLTATQKTVDGPSHKDWRGGRTASGNIIPSSTGAAKAVGKVLPELQGKLTGMAFRVPTVDVSVVDLTVKLNKETTYDEIKKVVKAAAEGKLKGVLGYTEDAVVSSDFLGDSHSSIFDASAGIQLSPKFVKLVSWYDNEYGYSTRVVDLVEHVAKA

SEQ ID NO: 1258 - protein, 500 aa, Saccharomyces cerevisiae
  strain ATCC 204508 / S288c
MSRLERLTSLNVVAGSDLRRTSIIGTIGPKTNNPETLVALRKAGLNIVRMNFSHGSYEYHKSVIDNARKSEELYPGRPLAIALDTKGPEIRTGTTTNDVDYPIPPNHEMIFTTDDKYAKACDDKIMYVDYKNITKVISAGRIIYVDDGVLSFQVLEVVDDKTLKVKALNAGKICSHKGVNLPGTDVDLPALSEKDKEDLRFGVKNGVHMVFASFIRTANDVLTIREVLGEQGKDVKIIVKIENQQGVNNFDEILKVTDGVMVARGDLGIEIPAPEVLAVQKKLIAKSNLAGKPVICATQMLESMTYNPRPTRAEVSDVGNAILDGADCVMLSGETAKGNYPINAVTTMAETAVIAEQAIAYLPNYDDMRNCTPKPTSTTETVAASAVAAVFEQKAKAIIVLSTSGTTPRLVSKYRPNCPIILVTRCPRAARFSHLYRGVFPFVFEKEPVSDWTDDVEARINFGIEKAKEFGILKKGDTYVSIQGFKAGAGHSNTLQVSTV

SEQ ID NO: 1259 - protein, 332 aa, Saccharomyces cerevisiae
  strain ATCC 204508 / S288c
MVRVAINGFGRIGRLVMRIALQRKNVEVVALNDPFISNDYSAYMFKYDSTHGRYAGEVSHDDKHIIVDGHKIATFQERDPANLPWASLNIDIAIDSTGVFKELDTAQKHIDAGAKKVVITAPSSTAPMFVMGVNEEKYTSDLKIVSNASCTTNCLAPLAKVINDAFGIEEGLMTTVHSMTATQKTVDGPSHKDWRGGRTASGNIIPSSTGAAKAVGKVLPELQGKLTGMAFRVPTVDVSVVDLTVKLNKETTYDEIKKVVKAAAEGKLKGVLGYTEDAVVSSDFLGDSNSSIFDAAAGIQLSPKFVKLVSWYDNEYGYSTRVVDLVEHVAKA

SEQ ID NO: 1260 - protein, 642 aa, Saccharomyces cerevisiae [sequence omitted]

SEQ ID NO: 1261 - protein, 332 aa, Saccharomyces cerevisiae
  strain ATCC 204508 / S288c
MIRIAINGFGRIGRLVLRLALQRKDIEVVAVNDPFISNDYAAYMVKYDSTHGRYKGTVSHDDKHIIIDGVKIATYQERDPANLPWGSLKIDVAVDSTGVFKELDTAQKHIDAGAKKVVITAPSSSAPMFVVGVNHTKYTPDKKIVSNASCTTNCLAPLAKVINDAFGIEEGLMTTVHSMTATQKTVDGPSHKDWRGGRTASGNIIPSSTGAAKAVGKVLPELQGKLTGMAFRVPTVDVSVVDLTVKLEKEATYDQIKKAVKAAAEGPMKGVLGYTEDAVVSSDFLGDTHASIFDASAGIQLSPKFVKLISWYDNEYGYSARVVDLIEYVAKA

SEQ ID NO: 1262 - protein, 639 aa, Saccharomyces cerevisiae
  strain ATCC 204508 / S288c
MSKAVGIDLGTTYSCVAHFSNDRVDIIANDQGNRTTPSFVGFTDTERLIGDAAKNQAAMNPANTVFDAKRLIGRNFNDPEVQGDMKHFPFKLIDVDGKPQIQVEFKGETKNFTPEQISSMVLGKMKETAESYLGAKVNDAVVTVPAYFNDSQRQATKDAGTIAGLNVLRIINEPTAAAIAYGLDKKGKEEHVLIFDLGGGTFDVSLLSIEDGIFEVKATAGDTHLGGEDFDNRLVNHFIQEFKRKNKKDLSTNQRALRRLRTACERAKRTLSSSAQTSVEIDSLFEGIDFYTSITRARFEELCADLFRSTLDPVEKVLRDAKLDKSQVDEIVLVGGSTRIPKVQKLVTDYFNGKEPNRSINPDEAVAYGAAVQAAILTGDESSKTQDLLLLDVAPLSLGIETAGGVMTKLIPRNSTIPTKKSEVFSTYADNQPGVLIQVFEGERAKTKDNNLLGKFELSGIPPAPRGVPQIEVTFDVDSNGILNVSAVEKGTGKSNKITITNDKGRLSKEDIEKMVAEAEKFKEEDEKESQRIASKNQLESIAYSLKNTISEAGDKLEQADKDAVTKKAEETIAWLDSNTTATKEEFDDQLKELQEVANPIMSKLYQAGGAPEGAAPGGFPGGAPPAPEAEGPTVEEVD

SEQ ID NO: 1263 - protein, 248 aa, Saccharomyces cerevisiae
  strain ATCC 204508 / S288c
MARTFFVGGNFKLNGSKQSIKEIVERLNTASIPENVEVVICPPATYLDYSVSLVKKPQVTVGAQNAYLKASGAFTGENSVDQIKDVGAKWVILGHSERRSYFHEDDKFIADKTKFALGQGVGVILCIGETLEEKKAGKTLDVVERQLNAVLEEVKDWTNVVVAYEPVWAIGTGLAATPEDAQDIHASIRKFLASKLGDKAASELRILYGGSANGSNAVTFKDKADVDGFLVGGASLKPEFVDIINSRN

SEQ ID NO: 1264 - protein, 458 aa, Saccharomyces cerevisiae
  strain ATCC 204508 / S288c
MGKEKSHINVVVIGHVDSGKSTTTGHLIYKCGGIDKRTIEKFEKEAAELGKGSFKYAWVLDKLKAERERGITIDIALWKFETPKYQVTVIDAPGHRDFIKNMITGTSQADCAILIIAGGVGEFEAGISKDGQTREHALLAFTLGVRQLIVAVNKMDSVKWDESRFQEIVKETSNFIKKVGYNPKTVPFVPISGWNGDNMIEATTNAPWYKGWEKETKAGVVKGKTLLEAIDAIEQPSRPTDKPLRLPLQDVYKIGGIGTVPVGRVETGVIKPGMVVTFAPAGVTTEVKSVEMHHEQLEQGVPGDNVGFNVKNVSVKEIRRGNVCGDAKNDPPKGCASFNATVIVLNHPGQISAGYSPVLDCHTAHIACRFDELLEKNDRRSGKKLEDHPKFLKSGDAALVKFVPSKPMCVEAFSEYPPLGRFAVRDMRQTVAVGVIKSVDKTEKAAKVTKAAQKAAKK

SEQ ID NO: 1265 - protein, 563 aa, Saccharomyces cerevisiae
  strain ATCC 204508 / S288c
MSEITLGKYLFERLKQVNVNTVFGLPGDFNLSLLDKIYEVEGMRWAGNANELNAAYAADGYARIKGMSCIITTFGVGELSALNGIAGSYAEHVGVLHVVGVPSISAQAKQLLLHHTLGNGDFTVFHRMSANISETTAMITDIATAPAEIDRCIRTTYVTQRPVYLGLPANLVDLNVPAKLLQTPIDMSLKPNDAESEKEVIDTILALVKDAKNPVILADACCSRHDVKAETKKLIDLTQFPAFVTPMGKGSIDEQHPRYGGVYVGTLSKPEVKEAVESADLILSVGALLSDFNTGSFSYSYKTKNIVEFHSDHMKIRNATFPGVQMKFVLQKLLTTIADAAKGYKPVAVPARTPANAAVPASTPLKQEWMWNQLGNFLQEGDVVIAETGTSAFGINQTTFPNNTYGISQVLWGSIGFTTGATLGAAFAAEEIDPKKRVILFIGDGSLQLTVQEISTMIRWGLKPYLFVLNNDGYTIEKLIHGPKAQYNEIQGWDHLSLLPTFGAKDYETHRVATTGEWDKLTQDKSFNDNSKIRMIEIMLPVFDAPQNLVEQAKLTAATNAKQ

SEQ ID NO: 1266 - protein, 109 aa, Saccharomyces cerevisiae; identical to SEQ ID NO: 633
  strain ATCC 204508 / S288c

SEQ ID NO: 1267 - protein, 359 aa, Saccharomyces cerevisiae
  strain ATCC 204508 / S288c
MGVEQILKRKTGVIVGEDVHNLFTYAKEHKFAIPAINVTSSSTAVAALEAARDSKSPIILQTSNGGAAYFAGKGISNEGQNASIKGAIAAAHYIRSIAPAYGIPVVLHSDHCAKKLLPWFDGMLEADEAYFKEHGEPLFSSHMLDLSEETDEENISTCVKYFKRMAAMDQWLEMEIGITGGEEDGVNNENADKEDLYTKPEQVYNVYKALHPISPNFSIAAAFGNCHGLYAGDIALRPEILAEHQKYTREQVGCKEEKPLFLVFHGGSGSTVQEFHTGIDNGVVKVNLDTDCQYAYLTGIRDYVLNKKDYIMSPVGNPEGPEKPNKKFFDPRVWVREGEKTMGAKITKSLETFRTTNTL

SEQ ID NO: 1268 - protein, 767 aa, Saccharomyces cerevisiae
  strain ATCC 204508 / S288c
MVQSAVLGFPRIGPNRELKKATEGYWNGKITVDELFKVGKDLRTQNWKLQKEAGVDIIPSNDFSFYDQVLDLSLLFNVIPDRYTKYDLSPIDTLFAMGRGLQRKATETEKAVDVTALEMVKWFDSNYHYVRPTFSKTTQFKLNGQKPVDEFLEAKELGIHTRPVLLGPVSYLFLGKADKDSLDLEPLSLLEQLLPLYTEILSKLASAGATEVQIDEPVLVLDLPANAQAAIKKAYTYFGEQSNLPKITLATYFGTVVPNLDAIKGLPVAALHVDFVRAPEQFDEVVAAIGNKQTLSVGIVDGRNIWKNDFKKSSAIVNKAIEKLGADRVVVATSSSLLHTPVDLNNETKLDAEIKGFFSFATQKLDEVVVITKNVSGQDVAAALEANAKSVESRGKSKFIHDAAVKARVASIDEKMSTRAAPFEQRLPEQQKVFNLPLFPTTTIGSFPQTKDIRINRNKFNKGTISAEEYEKFINSEIEKVIRFQEEIGLDVLVHGEPERNDMVQYFGEQINGYAFTVNGWVQSYGSRYVRPPIIVGDLSRPKAMSVKESVYAQSITSKPVKGMLTGPITCLRWSFPRDDVDQKTQAMQLALALRDEVNDLEAAGIKVIQVDEPALREGLPLREGTERSAYYTWAAEAFRVATSGVANKTQIHSHFCYSDLDPNHIKALDADVVSIEFSKKDDANYIAEFKNYPNHIGLGLFDIHSPRIPSKDEFIAKISTILKSYPAEKFWVNPDCGLKTRGWEETRLSLTHMVEAAKYFREQYKN

SEQ ID NO: 1269 - protein, 908 aa, Saccharomyces cerevisiae
  strain ATCC 204508 / S288c
MNDQTQFTERALTILTLAQKLASDHQHPQLQPIHILAAFIETPEDGSVPYLQNLIEKGRYDYDLFKKVVNRNLVRIPQQQPAPAEITPSYALGKVLQDAAKIQKQQKDSFIAQDHILFALFNDSSIQQIFKEAQVDIEAIKQQALELRGNTRIDSRGADTNTPLEYLSKYAIDMTEQARQGKLDPVIGREEEIRSTIRVLARRIKSNPCLIGEPGIGKTAIIEGVAQRIIDDDVPTILQGAKLFSLDLAALTAGAKYKGDFEERFKGVLKEIEESKTLIVLFIDEIHMLMGNGKDDAANILKPALSRGQLKVIGATTNNEYRSIVEKDGAFERRFQKIEVAEPSVRQTVAILRGLQPKYEIHHGVRILDSALVTAAQLAKRYLPYRRLPDSALDLVDISCAGVAVARDSKPEELDSKERQLQLIQVEIKALERDEDADSTTKDRLKLARQKEASLQEELEPLRQRYNEEKHGHEELTQAKKKLDELENKALDAERRYDTATAADLRYFAIPDIKKQIEKLEDQVAEEERRAGANSMIQNVVDSDTISETAARLTGIPVKKLSESENEKLIHMERDLSSEVVGQMDAIKAVSNAVRLSRSGLANPRQPASFLFLGLSGSGKTELAKKVAGFLFNDEDMMIRVDCSELSEKYAVSKLLGTTAGYVGYDEGGFLTNQLQYKPYSVLLFDEVEKAHPDVLTVMLQMLDDGRITSGQGKTIDCSNCIVIMTSNLGAEFINSQQGSKIQESTKNLVMGAVRQHFRPEFLNRISSIVIFNKLSRKAIHKIVDIRLKEIEERFEQNDKHYKLNLTQEAKDFLAKYGYSDDMGARPLNRLIQNEILNKLALRILKNEIKDKETVNVVLKKGKSRDENVPEEAEECLEVLPNHEATIGADTLGDDDNEDSMEIDDDLD

SEQ ID NO: 1270 - protein, 705 aa, Saccharomyces cerevisiae
  strain ATCC 204508 / S288c
MAGETFEFQAEITQLMSLIINTVYSNKEIFLRELISNASDALDKIRYQALSDPKQLETEPDLFIRITPKPEEKVLEIRDSGIGMTKAELINNLGTIAKSGTKAFMEALSAGADVSMIGQFGVGFYSLFLVADRVQVISKNNEDEQYIWESNAGGSFTVTLDEVNERIGRGTVLRLFLKDDQLEYLEEKRIKEVIKRHSEFVAYPIQLLVTKEVEKEVPIPEEEKKDEEKKDEDDKKPKLEEVDEEEEEKKPKTKKVKEEVQELEELNKTKPLWTRNPSDITQEEYNAFYKSISNDWEDPLYVKHFSVEGQLEFRAILFIPKRAPFDLFESKKKKNNIKLYVRRVFITDEAEDLIPEWLSFVKGVVDSEDLPLNLSREMLQQNKIMKVIRKNIVKKLIEAFNEIAEDSEQFDKFYSAFAKNIKLGVHEDTQNRAALAKLLRYNSTKSVDELTSLTDYVTRMPEHQKNIYYITGESLKAVEKSPFLDALKAKNFEVLFLTDPIDEYAFTQLKEFEGKTLVDITKDFELEETDEEKAEREKEIKEYEPLTKALKDILGDQVEKVVVSYKLLDAPAAIRTGQFGWSANMERIMKAQALRDSSMSSYMSSKKTFEISPKSPIIKELKKRVDEGGAQDKTVKDLTNLLFETALLTSGFSLEEPTSFASRINRLISLGLNIDEDEETETAPEASTEAPVEEVPADTEMEEVD

SEQ ID NO: 1271 - protein, 842 aa, Saccharomyces cerevisiae
  strain ATCC 204508 / S288c
MVAFTVDQMRSLMDKVTNVRNMSVIAHVDHGKSTLTDSLVQRAGIISAAKAGEARFTDTRKDEQERGITIKSTAISLYSEMSDEDVKEIKQKTDGNSFLINLIDSPGHVDFSSEVTAALRVTDGALVVVDTIEGVCVQTETVLRQALGERIKPVVVINKVDRALLELQVSKEDLYQTFARTVESVNVIVSTYADEVLGDVQVYPARGTVAFGSGLHGWAFTIRQFATRYAKKFGVDKAKMMDRLWGDSFFNPKTKKWTNKDTDAEGKPLERAFNMFILDPIFRLFTAIMNFKKDEIPVLLEKLEIVLKGDEKDLEGKALLKVVMRKFLPAADALLEMIVLHLPSPVTAQAYRAEQLYEGPADDANCIAIKNCDPKADLMLYVSKMVPTSDKGRFYAFGRVFAGTVKSGQKVRIQGPNYVPGKKDDLFIKAIQRVVLMMGRFVEPIDDCPAGNIIGLVGIDQFLLKTGTLTTSETAHNMKVMKFSVSPVVQVAVEVKNANDLPKLVEGLKRLSKSDPCVLTYMSESGEHIVAGTGELHLEICLQDLEHDHAGVPLKISPPVVAYRETVESESSQTALSKSPNKHNRIYLKAEPIDEEVSLAIENGIINPRDDFKARARIMADDYGWDVTDARKIWCFGPDGNGPNLVIDQTKAVQYLHEIKDSVVAAFQWATKEGPIFGEEMRSVRVNILDVTLHADAIHRGGGQIIPTMRRATYAGFLLADPKIQEPVFLVEIQCPEQAVGGIYSVLNKKRGQVVSEEQRPGTPLFTVKAYLPVNESFGFTGELRQATGGQAFPQMVFDHWSTLGSDPLDPTSKAGEIVLAARKRHGMKEEVPGWQEYYDKL

SEQ ID NO: 1272 - protein, 1046 aa, Saccharomyces cerevisiae
  strain ATCC 204508 / S288c
MNMNESISKDGQGEEEQNNFSFGGKPGSYDSNSDSAQRKKSFSTTKPTEYNLPKEQPESTSKNLETKAKNILLPWRKKHNKDSETPHEDTEADANRRANVTSDVNPVSADTKSSSGPNATITTHGYSYVKTTTPAATSEQSKVKTSPPTSHEHSNIKASPTAHRHSKGDAGHPSIATTHNHSTSKAATSPVTHTHGHSSATTSPVTHTHGHASVKTTSPTNTHEHSKANTGPSATATTHGHINVKTTHPVSHGHSGSSTGPKSTAAAQDHSSTKTNPSVTHGHTSVKDNSSATKGYSNTDSNSDRDVIPGSFRGMTGTDVNPVDPSVYTSTGPKSNVSSGMNAVDPSVYTDTSSKSADRRKYSGNTATGPPQDTIKEIAQNVKMDESEQTGLKNDQVSGSDAIQQQTMEPEPKAAVGTSGFVSQQPSYHDSNKNIQHPEKNKVDNKNISERAAEKFNIERDDILESADDYQQKNIKSKTDSNWGPIEYSSSAGKNKNLQDVVIPSSMKEKFDSGTSGSQNMPKAGTELGHMKYNDNGRDNLQYVAGSQAGSQNTNNNIDMSPRHEAEWSGLSNDATTRNNVVSPAMKDEDMNEDSTKPHQYGLDYLDDVEDYHENDIDDYSNAKKNDLYSKKAYQGKPSDYNYEQREKIPGTFEPDTLSKSVQKQDEDPLSPRQTTNRAGMETARDESLGNYEYSNTSGNKKLSDLSKNKSGPTPTRSNFIDQIEPRRAKTTQDIASDAKDFTNNPETGTTGNVDTTGRMGAKSKTFSSNPFDDSKNTDTHLENANVAAFDNSRSGDTTYSKSGDAETAAYDNIKNADPTYAKSQDITGMTHDQEPSSEQKASYGSGGNSQNQEYSSDDNIDVNKNAKVLEEDAPGYKREVDLKNKRRTDLGGADASNAYAAEVGNFPSLIDPHVPTYGFKDTNTSSSQKPSEGTYPETTSYSIHNETTSQGRKVSVGSMGSGKSKHHHNHHRHSRQNSSKGSDYDYNNSTHSAEHTPRHHQYGSDEGEQDYHDDEQGEEQAGKQSFMGRVRKSISGGTFGFRSEI

SEQ ID NO: 1273 - protein, 273 aa, Saccharomyces cerevisiae
  strain ATCC 204508 / S288c
MSQTREDSVYLAKLAEQAERYEEMVENMKAVASSGQELSVEERNLLSVAYKNVIGARRASWRIVSSIEQKEESKEKSEHQVELIRSYRSKIETELTKISDDILSVLDSHLIPSATTGESKVFYYKMKGDYHRYLAEFSSGDAREKATNSSLEAYKTASEIATTELPPTHPIRLGLALNFSVFYYEIQNSPDKACHLAKQAFDDAIAELDTLSEESYKDSTLIMQLLRDNLTLWTSDISESGQEDQQQQQQQQQQQQQQQQQAPAEQTQGEPTK

SEQ ID NO: 1274 - protein, 709 aa, Saccharomyces cerevisiae [sequence omitted]

SEQ ID NO: 1275 - protein, 168 aa, Saccharomyces cerevisiae; identical to SEQ ID NO: 515
  strain ATCC 204508 / S288c

SEQ ID NO: 1276 - protein, 519 aa, Saccharomyces cerevisiae
  strain ATCC 204508 / S288c
MFSRSTLCLKTSASSIGRLQLRYFSHLPMTVPIKLPNGLEYEQPTGLFINNKFVPSKQNKTFEVINPSTEEEICHIYEGREDDVEEAVQAADRAFSNGSWNGIDPIDRGKALYRLAELIEQDKDVIASIETLDNGKAISSSRGDVDLVINYLKSSAGFADKIDGRMIDTGRTHFSYTKRQPLGVCGQIIPWNFPLLMWAWKIAPALVTGNTVVLKTAESTPLSALYVSKYIPQAGIPPGVINIVSGFGKIVGEAITNHPKIKKVAFTGSTATGRHIYQSAAAGLKKVTLELGGKSPNIVFADAELKKAVQNIILGIYYNSGEVCCAGSRVYVEESIYDKFIEEFKAASESIKVGDPFDESTFQGAQTSQMQLNKILKYVDIGKNEGATLITGGERLGSKGYFIKPTVFGDVKEDMRIVKEEIFGPVVTVTKFKSADEVINMANDSEYGLAAGIHTSNINTALKVADRVNAGTVWINTYNDFHHAVPFGGFNASGLGREMSVDALQNYLQVKAVRAKLDE

SEQ ID NO: 1277 - protein, 247 aa, Saccharomyces cerevisiae
  strain ATCC 204508 / S288c
MPKLVLVRHGQSEWNEKNLFTGWVDVKLSAKGQQEAARAGELLKEKKVYPDVLYTSKLSRAIQTANIALEKADRLWIPVNRSWRLNERHYGDLQGKDKAETLKKFGEEKFNTYRRSFDVPPPPIDASSPFSQKGDERYKYVDPNVLPETESLALVIDRLLPYWQDVIAKDLLSGKTVMIAAHGNSLRGLVKHLEGISDADIAKLNIPTGIPLVFELDENLKPSKPSYYLDPEAAAAGAAAVANQGKK

SEQ ID NO: 1278 - protein, 387 aa, Saccharomyces cerevisiae
  strain ATCC 204508 / S288c
MSHRKYEAPRHGHLGFLPRKRAASIRARVKAFPKDDRSKPVALTSFLGYKAGMTTIVRDLDRPGSKFHKREVVEAVTVVDTPPVVVVGVVGYVETPRGLRSLTTVWAEHLSDEVKRRFYKNWYKSKKKAFTKYSAKYAQDGAGIERELARIKKYASVVRVLVHTQIRKTPLAQKKAHLAEIQLNGGSISEKVDWAREHFEKTVAVDSVFEQNEMIDAIAVTKGHGFEGVTHRWGTKKLPRKTHRGLRKVACIGAWHPAHVMWSVARAGQRGYHSRTSINHKIYRVGKGDDEANGATSFDRTKKTITPMGGFVHYGEIKNDFIMVKGCIPGNRKRIVTLRKSLYTNTSRKALEEVSLKWIDTASKFGKGRFQTPAEKHAFMGTLKKDL

SEQ ID NO: 1279 - protein, 444 aa, Saccharomyces cerevisiae
  strain ATCC 204508 / S288c
MPSHFDTVQLHAGQENPGDNAHRSRAVPIYATTSYVFENSKHGSQLFGLEVPGYVYSRFQNPTSNVLEERIAALEGGAAALAVSSGQAAQTLAIQGLAHTGDNIVSTSYLYGGTYNQFKISFKRFGIEARFVEGDNPEEFEKVFDERTKAVYLETIGNPKYNVPDFEKIVAIAHKHGIPVVVDNTFGAGGYFCQPIKYGADIVTHSATKWIGGHGTTIGGIIVDSGKFPWKDYPEKFPQFSQPAEGYHGTIYNEAYGNLAYIVHVRTELLRDLGPLMNPFASFLLLQGVETLSLRAERHGENALKLAKWLEQSPYVSWVSYPGLASHSHHENAKKYLSNGFGGVLSFGVKDLPNADKETDPFKLSGAQVVDNLKLASNLANVGDAKTLVIAPYFTTHKQLNDKEKLASGVTKDLIRVSVGIEFIDDIIADFQQSFETVFAGQKP

SEQ ID NO: 1280 - protein, 500 aa, Saccharomyces cerevisiae
  strain ATCC 204508 / S288c
MSFDDLHKATERAVIQAVDQICDDFEVTPEKLDELTAYFIEQMEKGLAPPKEGHTLASDKGLPMIPAFVTGSPNGTERGVLLAADLGGTNFRICSVNLHGDHTFSMEQMKSKIPDDLLDDENVTSDDLFGFLARRTLAFMKKYHPDELAKGKDAKPMKLGFTFSYPVDQTSLNSGTLIRWTKGFRIADTVGKDVVQLYQEQLSAQGMPMIKVVALTNDTVGTYLSHCYTSDNTDSMTSGEISEPVIGCIFGTGTNGCYMEEINKITKLPQELRDKLIKEGKTHMIINVEWGSFDNELKHLPTTKYDVVIDQKLSTNPGFHLFEKRVSGMFLGEVLRNILVDLHSQGLLLQQYRSKEQLPRHLTTPFQLSSEVLSHIEIDDSTGLRETELSLLQSLRLPTTPTERVQIQKLVRAISRRSAYLAAVPLAAILIKTNALNKRYHGEVEIGCDGSVVEYYPGFRSMLRHALALSPLGAEGERKVHLKIAKDGSGVGAALCALVA

SEQ ID NO: 1281 - protein, 584 aa, Saccharomyces cerevisiae
  strain ATCC 204508 / S288c
MTISDHPETEPKWWKEATIYQIYPASFKDSNNDGWGDLKGITSKLQYIKDLGVDAIWVCPFYDSPQQDMGYDISNYEKVWPTYGTNEDCFELIDKTHKLGMKFITDLVINHCSTEHEWFKESRSSKTNPKRDWFFWRPPKGYDAEGKPIPPNNWKSFFGGSAWTFDETTNEFYLRLFASRQVDLNWENEDCRRAIFESAVGFWLDHGVDGFRIDTAGLYSKRPGLPDSPIFDKTSKLQHPNWGSHNGPRIHEYHQELHRFMKNRVKDGREIMTVGEVAHGSDNALYTSAARYEVSEVFSFTHVELGTSPFFRYNIVPFTLKQWKEAIASNFLFINGTDSWATTYIENHDQARSITRFADDSPKYRKISGKLLTLLECSLTGTLYVYQGQEIGQINFKEWPIEKYEDVDVKNNYEIIKKSFGKNSKEMKDFFKGIALLSRDHSRTPMPWTKDKPNAGFTGPDVKPWFFLNESFEQGINVEQESRDDDSVLNFWKRALQARKKYKELMIYGYDFQFIDLDSDQIFSFTKEYEDKTLFAALNFSGEEIEFSLPREGASLSFILGNYDDTDVSSRVLKPWEGRIYLVK

SEQ ID NO: 1282 - protein, 341 aa, Saccharomyces cerevisiae
  strain ATCC 204508 / S288c
MHRTYSLRNQRAPTAAELQAPPPPPSSTKSKFFGKASIASSFRKNAAGNFGPELARKLSQLVKTEKGVLRAMEVVASERREAAKQLSLWGADNDDDVSDVTDKLGVLIYELGELQDQFIDKYDQYRVTLKSIRNIEASVQPSRDRKEKITDEIAHLKYKDPQSTKIPVLEQELVRAEAESLVAEAQLSNITREKLKAAYSYMFDSLRELSEKFALIAGYGKALLELLDDSPVTPGEARPAYDGYEASRQIIMDAESALESWTLDMAAVKPTLSFHQTVDDVYEDEDGEEEEEPEIQNGDIPGQVVEEEEVEWTTEVPVDDEAHEADHHVSQNGHTSGSENI

SEQ ID NO: 1283 - protein, 545 aa, Saccharomyces cerevisiae
  strain ATCC 204508 / S288c
MLARTAAIRSLSRTLINSTKAARPAAAALASTRRLASTKAQPTEVSSILEERIKGVSDEANLNETGRVLAVGDGIARVFGLNNIQAEELVEFSSGVKGMALNLEPGQVGIVLFGSDRLVKEGELVKRTGNIVDVPVGPGLLGRVVDALGNPIDGKGPIDAAGRSRAQVKAPGILPRRSVHEPVQTGLKAVDALVPIGRGQRELIIGDRQTGKTAVALDTILNQKRWNNGSDESKKLYCVYVAVGQKRSTVAQLVQTLEQHDAMKYSIIVAATASEAAPLQYLAPFTAASIGEWFRDNGKHALIVYDDLSKQAVAYRQLSLLLRRPPGREAYPGDVFYLHSRLLERAAKLSEKEGSGSLTALPVIETQGGDVSAYIPTNVISITDGQIFLEAELFYKGIRPAINVGLSVSRVGSAAQVKALKQVAGSLKLFLAQYREVAAFAQFGSDLDASTKQTLVRGERLTQLLKQNQYSPLATEEQVPLIYAGVNGHLDGIELSRIGEFESSFLSYLKSNHNELLTEIREKGELSKELLASLKSATESFVATF

SEQ ID NO: 1284 - protein, 613 aa, Saccharomyces cerevisiae
  strain ATCC 204508 / S288c
MAEGVFQGAIGIDLGTTYSCVATYESSVEIIANEQGNRVTPSFVAFTPEERLIGDAAKNQAALNPRNTVFDAKRLIGRRFDDESVQKDMKTWPFKVIDVDGNPVIEVQYLEETKTFSPQEISAMVLTKMKEIAEAKIGKKVEKAVITVPAYFNDAQRQATKDAGAISGLNVLRIINEPTAAAIAYGLGAGKSEKERHVLIFDLGGGTFDVSLLHIAGGVYTVKSTSGNTHLGGQDFDTNLLEHFKAEFKKKTGLDISDDARALRRLRTAAERAKRTLSSVTQTTVEVDSLFDGEDFESSLTRARFEDLNAALFKSTLEPVEQVLKDAKISKSQIDEVVLVGGSTRIPKVQKLLSDFFDGKQLEKSINPDEAVAYGAAVQGAILTGQSTSDETKDLLLLDVAPLSLGVGMQGDMFGIVVPRNTTVPTIKRRTFTTCADNQTTVQFPVYQGERVNCKENTLLGEFDLKNIPMMPAGEPVLEAIFEVDANGILKVTAVEKSTGKSSNITISNAVGRLSSEEIEKMVNQAEEFKAADEAFAKKHEARQRLESYVASIEQTVTDPVLSSKLKRGSKSKIEAALSDALAALQIEDPSADELRKAEVGLKRVVTKAMSSR

SEQ ID NO: 1285 - protein, 199 aa, Saccharomyces cerevisiae
  strain ATCC 204508 / S288c
MDKIREKLSNLKLEAESWQEKYEELKEKNKDLEQENVEKENQIKSLTVKNQQLEDEIEKLEAGLSDSKQTEQDNVEKENQIKSLTVKNHQLEEEIEKLEAELAESKQLSEDSHHLQSNNDNFSKKNQQLEEDLEESDTKLKETTEKLRESDLKADQLERRVAALEEQREEWERKNEELTVKYEDAKKELDEIAASLENL

SEQ ID NO: 1286 - protein, 375 aa, Saccharomyces cerevisiae
  strain ATCC 204508 / S288c
MDSEVAALVIDNGSGMCKAGFAGDDAPRAVFPSIVGRPRHQGIMVGMGQKDSYVGDEAQSKRGILTLRYPIEHGIVTNWDDMEKIWHHTFYNELRVAPEEHPVLLTEAPMNPKSNREKMTQIMFETFNVPAFYVSIQAVLSLYSSGRTTGIVLDSGDGVTHVVPIYAGFSLPHAILRIDLAGRDLTDYLMKILSERGYSFSTTAEREIVRDIKEKLCYVALDFEQEMQTAAQSSSIEKSYELPDGQVITIGNERFRAPEALFHPSVLGLESAGIDQTTYNSIMKCDVDVRKELYGNIVMSGGTTMFPGIAERMQKEITALAPSSMKVKIIAPPERKYSVWIGGSILASLTTFQQMWISKQEYDESGPSIVHHKCF

SEQ ID NO: 1287 - protein, 554 aa, Saccharomyces cerevisiae; identical to SEQ ID NO: 724
  strain ATCC 204508 / S288c

SEQ ID NO: 1288 - protein, 649 aa, Saccharomyces cerevisiae
  strain ATCC 204508 / S288c
MSRAVGIDLGTTYSCVAHFSNDRVEIIANDQGNRTTPSYVAFTDTERLIGDAAKNQAAINPHNTVFDAKRLIGRKFDDPEVTTDAKHFPFKVISRDGKPVVQVEYKGETKTFTPEEISSMVLSKMKETAENYLGTTVNDAVVTVPAYFNDSQRQATKDAGTIAGMNVLRIINEPTAAAIAYGLDKKGRAEHNVLIFDLGGGTFDVSLLSIDEGVFEVKATAGDTHLGGEDFDNRLVNHLATEFKRKTKKDISNNQRSLRRLRTAAERAKRALSSSSQTSIEIDSLFEGMDFYTSLTRARFEELCADLFRSTLEPVEKVLKDSKLDKSQIDEIVLVGGSTRIPKIQKLVSDFFNGKEPNRSINPDEAVAYGAAVQAAILTGDQSTKTQDLLLLDVAPLSLGIETAGGIMTKLIPRNSTIPTKKSETFSTYADNQPGVLIQVFEGERTRTKDNNLLGKFELSGIPPAPRGVPQIDVTFDIDANGILNVSALEKGTGKSNKITITNDKGRLSKDDIDRMVSEAEKYRADDEREAERVQAKNQLESYAFTLKNTINEASFKEKVGEDDAKRLETASQETIDWLDASQAASTDEYKDRQKELEGIANPIMTKFYGAGAGAGPGAGESGGFPGSMPNSGATGGGEDTGPTVEEVD

SEQ ID NO: 1289 - protein, 778 aa, Saccharomyces cerevisiae
  strain ATCC 204508 / S288c
MLSARSAIKRPIVRGLATVSNLTRDSKVNQNLLEDHSFINYKQNVETLDIVRKRLNRPFTYAEKILYGHLDDPHGQDIQRGVSYLKLRPDRVACQDATAQMAILQFMSAGLPQVAKPVTVHCDHLIQAQVGGEKDLKRAIDLNKEVYDFLASATAKYNMGFWKPGSGIIHQIVLENYAFPGALIIGTDSHTPNAGGLGQLAIGVGGADAVDVMAGRPWELKAPKILGVKLTGKMNGWTSPKDIILKLAGITTVKGGTGKIVEYFGDGVDTFSATGMGTICNMGAEIGATTSVFPFNKSMIEYLEATGRGKIADFAKLYHKDLLSADKDAEYDEVVEIDLNTLEPYINGPFTPDLATPVSKMKEVAVANNWPLDVRVGLIGSCTNSSYEDMSRSASIVKDAAAHGLKSKTIFTVTPGSEQIRATIERDGQLETFKEFGGIVLANACGPCIGQWDRRDIKKGDKNTIVSSYNRNFTSRNDGNPQTHAFVASPELVTAFAIAGDLRFNPLTDKLKDKDGNEFMLKPPHGDGLPQRGYDAGENTYQAPPADRSTVEVKVSPTSDRLQLLKPFKPWDGKDAKDMPILIKAVGKTTTDHISMAGPWLKYRGHLENISNNYMIGAINAENKKANCVKNVYTGEYKGVPDTARDYRDQGIKWVVIGDENFGEGSSREHAALEPRFLGGFAIITKSFARIHETNLKKQGLLPLNFKNPADYDKINPDDRIDILGLAELAPGKPVTMRVHPKNGKPWDAVLTHTFNDEQIEWFKYGSALNKIKADEKK

SEQ ID NO: 1290 - protein, 1071 aa, Saccharomyces cerevisiae
  strain ATCC 204508 / S288c
MAGAIENARKEIKRISLEDHAESEYGAIYSVSGPVVIAENMIGCAMYELVKVGHDNLVGEVIRIDGDKATIQVYEETAGLTVGDPVLRTGKPLSVELGPGLMETIYDGIQRPLKAIKEESQSIYIPRGIDTPALDRTIKWQFTPGKFQVGDHISGGDIYGSVFENSLISSHKILLPPRSRGTITWIAPAGEYTLDEKILEVEFDGKKSDFTLYHTWPVRVPRPVTEKLSADYPLLTGQRVLDALFPCVQGGTTCIPGAFGCGKTVISQSLSKYSNSDAIIYVGCFAKGTNVLMADGSIECIENIEVGNKVMGKDGRPREVIKLPRGRETMYSVVQKSQHRAHKSDSSREVPELLKFTCNATHELVVRTPRSVRRLSRTIKGVEYFEVITFEMGQKKAPDGRIVELVKEVSKSYPISEGPERANELVESYRKASNKAYFEWTIEARDLSLLGSHVRKATYQTYAPILYENDHFFDYMQKSKFHLTIEGPKVLAYLLGLWIGDGLSDRATFSVDSRDTSLMERVTEYAEKLNLCAEYKDRKEPQVAKTVNLYSKVVRGNGIRNNLNTENPLWDAIVGLGFLKDGVKNIPSFLSTDNIGTRETFLAGLIDSDGYVTDEHGIKATIKTIHTSVRDGLVSLARSLGLVVSVNAEPAKVDMNGTKHKISYAIYMSGGDVLLNVLSKCAGSKKFRPAPAAAFARECRGFYFELQELKEDDYYGITLSDDSDHQFLLANQVVVHNCGERGNEMAEVLMEFPELYTEMSGTKEPIMKRTTLVANTSNMPVAAREASIYTGITLAEYFRDQGKNVSMIADSSSRWAEALREISGRLGEMPADQGFPAYLGAKLASFYERAGKAVALGSPDRTGSVSIVAAVSPAGGDFSDPVTTATLGITQVFWGLDKKLAQRKHFPSINTSVSYSKYTNVLNKFYDSNYPEFPVLRDRMKEILSNAEELEQVVQLVGKSALSDSDKITLDVATLIKEDFLQQNGYSTYDAFCPIWKTFDMMRAFISYHDEAQKAVANGANWSKLADSTGDVKHAVSSSKFFEPSRGEKEVHGEFEKLLSTMQERFAESTD

SEQ ID NO: 1291 - protein, 572 aa, Saccharomyces cerevisiae
  strain ATCC 204508 / S288c
MLRSSVVRSRATLRPLLRRAYSSHKELKFGVEGRASLLKGVETLAEAVAATLGPKGRNVLIEQPFGPPKITKDGVTVAKSIVLKDKFENMGAKLLQEVASKTNEAAGDGTTSATVLGRAIFTESVKNVAAGCNPMDLRRGSQVAVEKVIEFLSANKKEITTSEEIAQVATISANGDSHVGKLLASAMEKVGKEGVITIREGRTLEDELEVTEGMRFDRGFISPYFITDPKSSKVEFEKPLLLLSEKKISSIQDILPALEISNQSRRPLLIIAEDVDGEALAACILNKLRGQVKVCAVKAPGFGDNRKNTIGDIAVLTGGTVFTEELDLKPEQCTIENLGSCDSITVTKEDTVILNGSGPKEAIQERIEQIKGSIDITTTNSYEKEKLQERLAKLSGGVAVIRVGGASEVEVGEKKDRYDDALNATRAAVEEGILPGGGTALVKASRVLDEVVVDNFDQKLGVDIIRKAITRPAKQIIENAGEEGSVIIGKLIDEYGDDFAKGYDASKSEYTDMLATGIIDPFKVVRSGLVDASGVASLLATTEVAIVDAPEPPAAAGAGGMPGGMPGMPGMM

SEQ ID NO: 1292 - protein, 563 aa, Saccharomyces cerevisiae
  strain ATCC 204508 / S288c
MSEITLGKYLFERLSQVNCNTVFGLPGDFNLSLLDKLYEVKGMRWAGNANELNAAYAADGYARIKGMSCIITTFGVGELSALNGIAGSYAEHVGVLHVVGVPSISSQAKQLLLHHTLGNGDFTVFHRMSANISETTAMITDIANAPAEIDRCIRTTYTTQRPVYLGLPANLVDLNVPAKLLETPIDLSLKPNDAEAEAEVVRTVVELIKDAKNPVILADACASRHDVKAETKKLMDLTQFPVYVTPMGKGAIDEQHPRYGGVYVGTLSRPEVKKAVESADLILSIGALLSDFNTGSFSYSYKTKNIVEFHSDHIKIRNATFPGVQMKFALQKLLDAIPEVVKDYKPVAVPARVPITKSTPANTPMKQEWMWNHLGNFLREGDIVIAETGTSAFGINQTTFPTDVYAIVQVLWGSIGFTVGALLGATMAAEELDPKKRVILFIGDGSLQLTVQEISTMIRWGLKPYIFVLNNNGYTIEKLIHGPHAEYNEIQGWDHLALLPTFGARNYETHRVATTGEWEKLTQDKDFQDNSKIRMIEVMLPVFDAPQNLVKQAQLTAATNAKQ

SEQ ID NO: 1293 - protein, 562 aa, Saccharomyces cerevisiae
  strain ATCC 204508 / S288c
MNVFGKKEEKQEKVYSLQNGFPYSHHPYASQYSRPDGPILLQDFHLLENIASFDRERVPERVVHAKGGGCRLEFELTDSLSDITYAAPYQNVGYKCPGLVRFSTVGGESGTPDTARDPRGVSFKFYTEWGNHDWVFNNTPVFFLRDAIKFPVFIHSQKRDPQSHLNQFQDTTIYWDYLTLNPESIHQITYMFGDRGTPASWASMNAYSGHSFIMVNKEGKDTYVQFHVLSDTGFETLTGDKAAELSGSHPDYNQAKLFTQLQNGEKPKFNCYVQTMTPEQATKFRYSVNDLTKIWPHKEFPLRKFGTITLTENVDNYFQEIEQVAFSPTNTCIPGIKPSNDSVLQARLFSYPDTQRHRLGANYQQLPVNRPRNLGCPYSKGDSQYTAEQCPFKAVNFQRDGPMSYYNFGPEPNYISSLPNQTLKFKNEDNDEVSDKFKGIVLDEVTEVSVRKQEQDQIRNEHIVDAKINQYYYVYGISPLDFEQPRALYEKVYNDEQKKLFVHNVVCHACKIKDPKVKKRVTQYFGLLNEDLGKVIAECLGVPWEPVDLEGYAKTWSIASAN

SEQ ID NO: 1294 - protein, 391 aa, Saccharomyces cerevisiae
  strain ATCC 204508 / S288c
MSAAADRLNLTSGHLNAGRKRSSSSVSLKAAEKPFKVTVIGSGNWGTTIAKVVAENCKGYPEVFAPIVQMWVFEEEINGEKLTEIINTRHQNVKYLPGITLPDNLVANPDLIDSVKDVDIIVFNIPHQFLPRICSQLKGHVDSHVRAISCLKGFEVGAKGVQLLSSYITEELGIQCGALSGANIATEVAQEHWSETTVAYHIPKDFRGEGKDVDHKVLKALFHRPYFHVSVIEDVAGISICGALKNVVALGCGFVEGLGWGNNASAAIQRVGLGEIIRFGQMFFPESREETYYQESAGVADLITTCAGGRNVKVARLMATSGKDAWECEKELLNGQSAQGLITCKEVHEWLETCGSVEDFPLFEAVYQIVYNNYPMKNLPDMIEELDLHED

SEQ ID NO: 1295 - protein, 485 aa, Saccharomyces cerevisiae
  strain ATCC 204508 / S288c
MVHLGPKKPQARKGSMADVPKELMDEIHQLEDMFTVDSETLRKVVKHFIDELNKGLTKKGGNIPMIPGWVMEFPTGKESGNYLAIDLGGTNLRVVLVKLSGNHTFDTTQSKYKLPHDMRTTKHQEELWSFIADSLKDFMVEQELLNTKDTLPLGFTFSYPASQNKINEGILQRWTKGFDIPNVEGHDVVPLLQNEISKRELPIEIVALINDTVGTLIASYYTDPETKMGVIFGTGVNGAFYDVVSDIEKLEGKLADDIPSNSPMAINCEYGSFDNEHLVLPRTKYDVAVDEQSPRPGQQAFEKMTSGYYLGELLRLVLLELNEKGLMLKDQDLSKLKQPYIMDTSYPARIEDDPFENLEDTDDIFQKDFGVKTTLPERKLIRRLCELIGTRAARLAVCGIAAICQKRGYKTGHIAADGSVYNKYPGFKEAAAKGLRDIYGWTGDASKDPITIVPAEDGSGAGAAVIAALSEKRIAEGKSLGIIGA

SEQ ID NO: 1296 - protein, 959 aa, Saccharomyces cerevisiae
  strain ATCC 204508 / S288c
MTVTTPFVNGTSYCTVTAYSVQSYKAAIDFYTKFLSLENRSSPDENSTLLSNDSISLKILLRPDEKINKNVEAHLKELNSITKTQDWRSHATQSLVFNTSDILAVKDTLNAMNAPLQGYPTELFPMQLYTLDPLGNVVGVTSTKNAVSTKPTPPPAPEASAESGLSSKVHSYTDLAYRMKTTDTYPSLPKPLNRPQKAIAVMTSGGDAPGMNSNVRAIVRSAIFKGCRAFVVMEGYEGLVRGGPEYIKEFHWEDVRGWSAEGGTNIGTARCMEFKKREGRLLGAQHLIEAGVDALIVCGGDGSLTGADLFRSEWPSLIEELLKTNRISNEQYERMKHLNICGTVGSIDNDMSTTDATIGAYSALDRICKAIDYVEATANSHSRAFVVEVMGRNCGWLALLAGIATSADYIFIPEKPATSSEWQDQMCDIVSKHRSRGKRTTIVVVAEGAIAADLTPISPSDVHKVLVDRLGLDTRITTLGHVQRGGTAVAYDRILATLQGLEAVNAVLESTPDTPSPLIAVNENKIVRKPLMESVKLTKAVAEAIQAKDFKRAMSLRDTEFIEHLNNFMAINSADHNEPKLPKDKRLKIAIVNVGAPAGGINSAVYSMATYCMSQGHRPYAIYNGWSGLARHESVRSLNWKDMLGWQSRGGSEIGTNRVTPEEADLGMIAYYFQKYEFDGLIIVGGFEAFESLHQLERARESYPAFRIPMVLIPATLSNNVPGTEYSLGSDTALNALMEYCDVVKQSASSTRGRAFVVDCQGGNSGYLATYASLAVGAQVSYVPEEGISLEQLSEDIEYLAQSFEKAEGRGRFGKLILKSTNASKALSATKLAEVITAEADGRFDAKPAYPGHVQQGGLPSPIDRTRATRMAIKAVGFIKDNQAAIAEARAAEENFNADDKTISDTAAVVGVKGSHVVYNSIRQLYDYETEVSMRMPKVIHWQATRLIADHLVGRKRVD

SEQ ID NO: 1297 - protein, 261 aa, Saccharomyces cerevisiae
  strain ATCC 204508 / S288c
MARGPKKHLKRLAAPHHWLLDKLSGCYAPRPSAGPHKLRESLPLIVFLRNRLKYALNGREVKAILMQRHVKVDGKVRTDTTYPAGFMDVITLDATNENFRLVYDVKGRFAVHRITDEEASYKLGKVKKVQLGKKGVPYVVTHDGRTIRYPDPNIKVNDTVKIDLASGKITDFIKFDAGKLVYVTGGRNLGRIGTIVHKERHDGGFDLVHIKDSLDNTFVTRLNNVFVIGEQGKPYISLPKGKGIKLSIAEERDRRRAQQGL

SEQ ID NO: 1298 - protein, 339 aa, Saccharomyces cerevisiae
  strain ATCC 204508 / S288c
MHRTYSLRNSRAPTASQLQNPPPPPSTTKGRFFGKGGLAYSFRRSAAGAFGPELSRKLSQLVKIEKNVLRSMELTANERRDAAKQLSIWGLENDDDVSDITDKLGVLIYEVSELDDQFIDRYDQYRLTLKSIRDIEGSVQPSRDRKDKITDKIAYLKYKDPQSPKIEVLEQELVRAEAESLVAEAQLSNITRSKLRAAFNYQFDSIIEHSEKIALIAGYGKALLELLDDSPVTPGETRPAYDGYEASKQIIIDAESALNEWTLDSAQVKPTLSFKQDYEDFEPEEGEEEEEEDGQGRWSEDEQEDGQIEEPEQEEEGAVEEHEQVGHQQSESLPQQTTA

SEQ ID NO: 1299 - protein, 511 aa, Saccharomyces cerevisiae
  strain ATCC 204508 / S288c
MVLPRLYTATSRAAFKAAKQSAPLLSTSWKRCMASAAQSTPITGKVTAVIGAIVDVHFEQSELPAILNALEIKTPQGKLVLEVAQHLGENTVRTIAMDGTEGLVRGEKVLDTGGPISVPVGRETLGRIINVIGEPIDERGPIKSKLRKPIHADPPSFAEQSTSAEILETGIKVVDLLAPYARGGKIGLFGGAGVGKTVFIQELINNIAKAHGGFSVFTGVGERTREGNDLYREMKETGVINLEGESKVALVFGQMNEPPGARARVALTGLTIAEYFRDEEGQDVLLFIDNIFRFTQAGSEVSALLGRIPSAVGYQPTLATDMGLLQERITTTKKGSVTSVQAVYVPADDLTDPAPATTFAHLDATTVLSRGISELGIYPAVDPLDSKSRLLDAAVVGQEHYDVASKVQETLQTYKSLQDIIAILGMDELSEQDKLTVERARKIQRFLSQPFAVAEVFTGIPGKLVRLKDTVASFKAVLEGKYDNIPEHAFYMVGGIEDVVAKAEKLAAEAN

SEQ ID NO: 1300 - protein, 987 aa, Saccharomyces cerevisiae
  strain ATCC 204508 / S288c
MQSQDSCYGVAFRSIITNDEALFKKTIHFYHTLGFATVKDFNKFKHGENSLLSSGTSQDSLREVWLESFKLSEVDASGFRIPQQEATNKAQSQGALLKIRLVMSAPIDETFDTNETATITYFSTDLNKIVEKFPKQAEKLSDTLVFLKDPMGNNITFSGLANATDSAPTSKDAFLEATSEDEIISRASSDASDLLRQTLGSSQKKKKIAVMTSGGDSPGMNAAVRAVVRTGIHFGCDVFAVYEGYEGLLRGGKYLKKMAWEDVRGWLSEGGTLIGTARSMEFRKREGRRQAAGNLISQGIDALVVCGGDGSLTGADLFRHEWPSLVDELVAEGRFTKEEVAPYKNLSIVGLVGSIDNDMSGTDSTIGAYSALERICEMVDYIDATAKSHSRAFVVEVMGRHCGWLALMAGIATGADYIFIPERAVPHGKWQDELKEVCQRHRSKGRRNNTIIVAEGALDDQLNPVTANDVKDALIELGLDTKVTILGHVQRGGTAVAHDRWLATLQGVDAVKAVLEFTPETPSPLIGILENKIIRMPLVESVKLTKSVATAIENKDFDKAISLRDTEFIELYENFLSTTVKDDGSELLPVSDRLNIGIVHVGAPSAALNAATRAATLYCLSHGHKPYAIMNGFSGLIQTGEVKELSWIDVENWHNLGGSEIGTNRSVASEDLGTIAYYFQKNKLDGLIILGGFEGFRSLKQLRDGRTQHPIFNIPMCLIPATVSNNVPGTEYSLGVDTCLNALVNYTDDIKQSASATRRRVFVCEVQGGHSGYIASFTGLITGAVSVYTPEKKIDLASIREDITLLKENFRHDKGENRNGKLLVRNEQASSVYSTQLLADIISEASKGKFGVRTAIPGHVQQGGVPSSKDRVTASRFAVKCIKFIEQWNKKNEASPNTDAKVLRFKFDTHGEKVPTVEHEDDSAAVICVNGSHVSFKPIANLWENETNVELRKGFEVHWAEYNKIGDILSGRLKLRAEVAALAAENK

SEQ ID NO: 1301 - protein, 1044 aa, Saccharomyces cerevisiae
  strain ATCC 204508 / S288c
MSDSQQSIKVLEELFQKLSVATADNRHEIASEVASFLNGNIIEHDVPEHFFGELAKGIKDKKTAANAMQAVAHIANQSNLSPSVEPYIVQLVPAICTNAGNKDKEIQSVASETLISIVNAVNPVAIKALLPHLTNAIVETNKWQEKIAILAAISAMVDAAKDQVALRMPELIPVLSETMWDTKKEVKAAATAAMTKATETVDNKDIERFIPSLIQCIADPTEVPETVHLLGATTFVAEVTPATLSIMVPLLSRGLNERETGIKRKSAVIIDNMCKLVEDPQVIAPFLGKLLPGLKSNFATIADPEAREVTLRALKTLRRVGNVGEDDAIPEVSHAGDVSTTLQVVNELLKDETVAPRFKIVVEYIAAIGADLIDERIIDQQAWFTHITPYMTIFLHEKKAKDILDEFRKRAVDNIPVGPNFDDEEDEGEDLCNCEFSLAYGAKILLNKTQLRLKRARRYGICGPNGCGKSTLMRAIANGQVDGFPTQEECRTVYVEHDIDGTHSDTSVLDFVFESGVGTKEAIKDKLIEFGFTDEMIAMPISALSGGWKMKLALARAVLRNADILLLDEPTNHLDTVNVAWLVNYLNTCGITSITISHDSVFLDNVCEYIINYEGLKLRKYKGNFTEFVKKCPAAKAYEELSNTDLEFKFPEPGYLEGVKTKQKAIVKVTNMEFQYPGTSKPQITDINFQCSLSSRIAVIGPNGAGKSTLINVLTGELLPTSGEVYTHENCRIAYIKQHAFAHIESHLDKTPSEYIQWRFQTGEDRETMDRANRQINENDAEAMNKIFKIEGTPRRIAGIHSRRKFKNTYEYECSFLLGENIGMKSERWVPMMSVDNAWIPRGELVESHSKMVAEVDMKEALASGQFRPLTRKEIEEHCSMLGLDPEIVSHSRIRGLSGGQKVKLVLAAGTWQRPHLIVLDEPTNYLDRDSLGALSKALKEFEGGVIIITHSAEFTKNLTEEVWAVKDGRMTPSGHNWVSGQGAGPRIEKKEDEEDKFDAMGNKIAGGKKKKKLSSAELRKKKKERMKKKKELGDAYVSSDEEF

SEQ ID NO: 1302 - protein, 1178 aa, Saccharomyces cerevisiae
  strain ATCC 204508 / S288c
MSQRKFAGLRDNFNLLGEKNKILVANRGEIPIRIFRTAHELSMQTVAIYSHEDRLSTHKQKADEAYVIGEVGQYTPVGAYLAIDEIISIAQKHQVDFIHPGYGFLSENSEFADKVVKAGITWIGPPAEVIDSVGDKVSARNLAAKANVPTVPGTPGPIETVEEALDFVNEYGYPVIIKAAFGGGGRGMRVVREGDDVADAFQRATSEARTAFGNGTCFVERFLDKPKHIEVQLLADNHGNVVHLFERDCSVQRRHQKVVEVAPAKTLPREVRDAILTDAVKLAKECGYRNAGTAEFLVDNQNRHYFIEINPRIQVEHTITEEITGIDIVAAQIQIAAGASLPQLGLFQDKITTRGFAIQCRITTEDPAKNFQPDTGRIEVYRSAGGNGVRLDGGNAYAGTIISPHYDSMLVKCSCSGSTYEIVRRKMIRALIEFRIRGVKTNIPFLLTLLTNPVFIEGTYWTTFIDDTPQLFQMVSSQNRAQKLLHYLADVAVNGSSIKGQIGLPKLKSNPSVPHLHDAQGNVINVTKSAPPSGWRQVLLEKGPAEFARQVRQFNGTLLMDTTWRDAHQSLLATRVRTHDLATIAPTTAHALAGRFALECWGGATFDVAMRFLHEDPWERLRKLRSLVPNIPFQMLLRGANGVAYSSLPDNAIDHFVKQAKDNGVDIFRVFDALNDLEQLKVGVDAVKKAGGVVEATVCFSGDMLQPGKKYNLDYYLEIAEKIVQMGTHILGIKDMAGTMKPAAAKLLIGSLRAKYPDLPIHVHTHDSAGTAVASMTACALAGADVVDVAINSMSGLTSQPSINALLASLEGNIDTGINVEHVRELDAYWAEMRLLYSCFEADLKGPDPEVYQHEIPGGQLTNLLFQAQQLGLGEQWAETKRAYREANYLLGDIVKVTPTSKVVGDLAQFMVSNKLTSDDVRRLANSLDFPDSVMDFFEGLIGQPYGGFPEPFRSDVLRNKRRKLTCRPGLELEPFDLEKIREDLQNRFGDVDECDVASYNMYPRVYEDFQKMRETYGDLSVLPTRSFLSPLETDEEIEVVIEQGKTLIIKLQAVGDLNKKTGEREVYFDLNGEMRKIRVADRSQKVETVTKSKADMHDPLHIGAPMAGVIVEVKVHKGSLIKKGQPVAVLSAMKMEMIISSPSDGQVKEVFVSDGENVDSSDLLVLLEDQVPVETKA

SEQ ID NO: 1303 - protein, 157 aa, Saccharomyces cerevisiae
  strain ATCC 204508 / S288c
MSDEEHTFETADAGSSATYPMQCSALRKNGFVVIKSRPCKIVDMSTSKTGKHGHAKVHLVAIDIFTGKKLEDLSPSTHNMEVPVVKRNEYQLLDIDDGFLSLMNMDGDTKDDVKAPEGELGDSLQTAFDEGKDLMVTIISAMGEEAAISFKEAARTD

SEQ ID NO: 1304 - protein, 221 aa, Saccharomyces cerevisiae
  strain ATCC 204508 / S288c
MARRPARCYRYQKNKPYPKSRYNRAVPDSKIRIYDLGKKKATVDEFPLCVHLVSNELEQLSSEALEAARICANKYMTTVSGRDAFHLRVRVHPFHVLRINKMLSCAGADRLQQGMRGAWGKPHGLAARVDIGQIIFSVRTKDSNKDVVVEGLRRARYKFPGQQKIILSKKWGFTNLDRPEYLKKREAGEVKDDGAFVKFLSKKGSLENNIREFPEYFAAQA

SEQ ID NO: 1305 - protein, 348 aa, Saccharomyces cerevisiae
  strain ATCC 204508 / S288c
MSIPETQKAIIFYESNGKLEHKDIPVPKPKPNELLINVKYSGVCHTDLHAWHGDWPLPTKLPLVGGHEGAGVVVGMGENVKGWKIGDYAGIKWLNGSCMACEYCELGNESNCPHADLSGYTHDGSFQEYATADAVQAAHIPQGTDLAEVAPILCAGITVYKALKSANLRAGHWAAISGAAGGLGSLAVQYAKAMGYRVLGIDGGPGKEELFTSLGGEVFIDFTKEKDIVSAVVKATNGGAHGIINVSVSEAAIEASTRYCRANGTVVLVGLPAGAKCSSDVFNHVVKSISIVGSYVGNRADTREALDFFARGLVKSPIKVVGLSSLPEIYEKMEKGQIAGRYVVDTSK

SEQ ID NO: 1306 - protein, 395 aa, Saccharomyces cerevisiae
  strain ATCC 204508 / S288c
MSEGITDIEESQIQTNYDKVVYKFDDMELDENLLRGVFGYGFEEPSAIQQRAIMPIIEGHDVLAQAQSGTGKTGTFSIAALQRIDTSVKAPQALMLAPTRELALQIQKVVMALAFHMDIKVHACIGGTSFVEDAEGLRDAQIVVGTPGRVFDNIQRRRFRTDKIKMFILDEADEMLSSGFKEQIYQIFTLLPPTTQVVLLSATMPNDVLEVTTKFMRNPVRILVKKDELTLEGIKQFYVNVEEEEYKYECLTDLYDSISVTQAVIFCNTRRKVEELTTKLRNDKFTVSAIYSDLPQQERDTIMKEFRSGSSRILISTDLLARGIDVQQVSLVINYDLPANKENYIHRIGRGGRFGRKGVAINFVTNEDVGAMRELEKFYSTQIEELPSDIATLLN

SEQ ID NO: 1307 - protein, 430 aa, Saccharomyces cerevisiae
  strain ATCC 204508 / S288c
MGLFDKVKQFANSNNNNNDSGNNNQGDYVTKAENMIGEDRVNQFKSKIGEDRFDKMESKVRQQFSNTSINDNDSNNNDSYGSNNNDSYGSNNNDSYGSNNNDSYGSNNNDSYGSNNDDSYGSSNKKKSSYGSNNDDSYGSSNNNDSYGSNNNDSYGSNNNDSYGSNNDDSYGSSNKNKSSYGSNNDDSYGSNNDDSYGSSNKKKSSYGSSNNDSYGSNNDDSYGSNNNDSYGSNNDDSYGSSNKKKSSYGSNNDDSYGSSNNNDSYGSNNDDSYGSSNKNKSSYGSSSNDDSYGSSNNDDSYGSSNKKKSSYGSNNDDSYGSNNDDSYGSSNKKKSSYGSSNNDSYGSNNDDSYGSSNKKKSSYGSNNDDSYGSSNNNDSYGSNNDDSYGSSNRNKNSYGSSNYGSSNNDDSYGSSNRGGRNQYGGDDDY

SEQ ID NO: 1308 - protein, 437 aa, Saccharomyces cerevisiae
  strain ATCC 204508 / S288c
MPKKVWKSSTPSTYEHISSLRPKFVSRVDNVLHQRKSLTFSNVVVPDKKNNTLTSSVIYSQGSDIYEIDFAVPLQEAASEPVKDYGDAFEGIENTSLSPKFVYQGETVSKMAYLDKTGETTLLSMSKNGSLAWFKEGIKVPIHIVQELMGPATSYASIHSLTRPGDLPEKDFSLAISDFGISNDTETIVKSQSNGDEEDSILKIIDNAGKPGEILRTVHVPGTTVTHTVRFFDNHIFASCSDDNILRFWDTRTSDKPIWVLGEPKNGKLTSFDCSQVSNNLFVTGFSTGIIKLWDARAAEAATTDLTYRQNGEDPIQNEIANFYHAGGDSVVDVQFSATSSSEFFTVGGTGNIYHWNTDYSLSKYNPDDTIAPPQDATEESQTKSLRFLHKGGSRRSPKQIGRRNTAAWHPVIENLVGTVDDDSLVSIYKPYTEESE

SEQ ID NO: 1309 - protein, 440 aa, Saccharomyces cerevisiae
  strain ATCC 204508 / S288c
MSENNEFQSVTESTTAPTTSNPYGPNPADYLSNVKNFQLIDSTLREGEQFANAFFDTEKKIEIARALDDFGVDYIELTSPVASEQSRKDCEAICKLGLKAKILTHIRCHMDDARVAVETGVDGVDVVIGTSKFLRQYSHGKDMNYIAKSAVEVIEFVKSKGIEIRFSSEDSFRSDLVDLLNIYKTVDKIGVNRVGIADTVGCANPRQVYELIRTLKSVVSCDIECHFHNDTGCAIANAYTALEGGARLIDVSVLGIGERNGITPLGGLMARMIVAAPDYVRSKYKLHKIRDIENLVADAVEVNIPFNNPITGFCAFTHKAGIHAKAILANPSTYEILDPHDFGMKRYIHFANRLTGWNAIKSRVDQLNLNLTDDQIKEVTAKIKKLGDVRPLNIDDVDSIIKDFHAELSTPLLKPVNKGTDDDNIDISNGHVSKKAKVTK

SEQ ID NO: 1310 - protein, 454 aa, Saccharomyces cerevisiae
  strain ATCC 204508 / S288c
MSEPEFQQAYEEVVSSLEDSTLFEQHPEYRKVLPIVSVPERIIQFRVTWENDKGEQEVAQGYRVQYNSAKGPYKGGLRFHPSVNLSILKFLGFEQIFKNSLTGLDMGGGKGGLCVDLKGRSNNEIRRICYAFMRELSRHIGQDTDVPAGDIGVGGREIGYLFGAYRSYKNSWEGVLTGKGLNWGGSLIRPEATGYGLVYYTQAMIDYATNGKESFEGKRVTISGSGNVAQYAALKVIELGGTVVSLSDSKGCIISETGITSEQVADISSAKVNFKSLEQIVNEYSTFSENKVQYIAGARPWTHVQKVDIALPCATQNEVSGEEAKALVAQGVKFIAEGSNMGSTPEAIAVFETARSTATGPSEAVWYGPPKAANLGGVAVSGLEMAQNSQRITWTSERVDQELKRIMINCFNECIDYAKKYTKDGKVLPSLVKGANIASFIKVSDAMFDQGDVF

SEQ ID NO: 1311 - protein, 469 aa, Saccharomyces cerevisiae
  strain ATCC 204508 / S288c
MPYTLSDAHHKLITSHLVDTDPEVDSIIKDEIERQKHSIDLIASENFTSTSVFDALGTPLSNKYSEGYPGARYYGGNEHIDRMEILCQQRALKAFHVTPDKWGVNVQTLSGSPANLQVYQAIMKPHERLMGLYLPDGGHLSHGYATENRKISAVSTYFESFPYRVNPETGIIDYDTLEKNAILYRPKVLVAGTSAYCRLIDYKRMREIADKCGAYLMVDMAHISGLIAAGVIPSPFEYADIVTTTTHKSLRGPRGAMIFFRRGVRSINPKTGKEVLYDLENPINFSVFPGHQGGPHNHTIAALATALKQAATPEFKEYQTQVLKNAKALESEFKNLGYRLVSNGTDSHMVLVSLREKGVDGARVEYICEKINIALNKNSIPGDKSALVPGGVRIGAPAMTTRGMGEEDFHRIVQYINKAVEFAQQVQQSLPKDACRLKDFKAKVDEGSDVLNTWKKEIYDWAGEYPLAV

SEQ ID NO: 1312 - protein, 479 aa, Saccharomyces cerevisiae
  strain ATCC 204508 / S288c
MSAILSTTSKSFLSRGSTRQCQNMQKALFALLNARHYSSASEQTLKERFAEIIPAKAEEIKKFKKEHGKTVIGEVLLEQAYGGMRGIKGLVWEGSVLDPEEGIRFRGRTIPEIQRELPKAEGSTEPLPEALFWLLLTGEIPTDAQVKALSADLAARSEIPEHVIQLLDSLPKDLHPMAQFSIAVTALESESKFAKAYAQGVSKKEYWSYTFEDSLDLLGKLPVIASKIYRNVFKDGKITSTDPNADYGKNLAQLLGYENKDFIDLMRLYLTIHSDHEGGNVSAHTTHLVGSALSSPYLSLAAGLNGLAGPLHGRANQEVLEWLFKLREEVKGDYSKETIEKYLWDTLNAGRVVPGYGHAVLRKTDPRYTAQREFALKHFPDYELFKLVSTIYEVAPGVLTKHGKTKNPWPNVDSHSGVLLQYYGLTEASFYTVLFGVARAIGVLPQLIIDRAVGAPIERPKSFSTEKYKELVKKIESKN

SEQ ID NO: 1313 - protein, 489 aa, Saccharomyces cerevisiae
  strain ATCC 204508 / S288c
MSADFGLIGLAVMGQNLILNAADHGFTVCAYNRTQSKVDHFLANEAKGKSIIGATSIEDFISKLKRPRKVMLLVKAGAPVDALINQIVPLLEKGDIIIDGGNSHFPDSNRRYEELKKKGILFVGSGVSGGEEGARYGPSLMPGGSEEAWPHIKNIFQSISAKSDGEPCCEWVGPAGAGHYVKMVHNGIEYGDMQLICEAYDIMKRLGGFTDKEISDVFAKWNNGVLDSFLVEITRDILKFDDVDGKPLVEKIMDTAGQKGTGKWTAINALDLGMPVTLIGEAVFARCLSALKNERIRASKVLPGPEVPKDAVKDREQFVDDLEQALYASKIISYAQGFMLIREAAATYGWKLNNPAIALMWRGGCIIRSVFLGQITKAYREEPDLENLLFNKFFADAVTKAQSGWRKSIALATTYGIPTPAFSTALSFYDGYRSERLPANLLQAQRDYFGAHTFRVLPECASDNLPVDKDIHINWTGHGGNVSSSTYQA

SEQ ID NO: 1314 - protein, 563 aa, Saccharomyces cerevisiae
  strain ATCC 204508 / S288c
MSEITLGKYLFERLKQVNVNTIFGLPGDFNLSLLDKIYEVDGLRWAGNANELNAAYAADGYARIKGLSVLVTTFGVGELSALNGIAGSYAEHVGVLHVVGVPSISAQAKQLLLHHTLGNGDFTVFHRMSANISETTSMITDIATAPSEIDRLIRTTFITQRPSYLGLPANLVDLKVPGSLLEKPIDLSLKPNDPEAEKEVIDTVLELIQNSKNPVILSDACASRHNVKKETQKLIDLTQFPAFVTPLGKGSIDEQHPRYGGVYVGTLSKQDVKQAVESADLILSVGALLSDFNTGSFSYSYKTKNVVEFHSDYVKVKNATFLGVQMKFALQNLLKVIPDVVKGYKSVPVPTKTPANKGVPASTPLKQEWLWNELSKFLQEGDVIISETGTSAFGINQTIFPKDAYGISQVLWGSIGFTTGATLGAAFAAEEIDPNKRVILFIGDGSLQLTVQEISTMIRWGLKPYLFVLNNDGYTIEKLIHGPHAEYNEIQTWDHLALLPAFGAKKYENHKIATTGEWDALTTDSEFQKNSVIRLIELKLPVFDAPESLIKQAQLTAATNAKQ

SEQ ID NO: 1315 - protein, 681 aa, Saccharomyces cerevisiae
  strain ATCC 204508 / S288c
MAQFSDIDKLAVSTLRLLSVDQVESAQSGHPGAPLGLAPVAHVIFKQLRCNPNNEHWINRDRFVLSNGHSCALLYSMLHLLGYDYSIEDLRQFRQVNSRTPGHPEFHSAGVEITSGPLGQGISNAVGMAIAQANFAATYNEDGFPISDSYTFAIVGDGCLQEGVSSETSSLAGHLQLGNLITFYDSNSISIDGKTSYSFDEDVLKRYEAYGWEVMEVDKGDDDMESISSALEKAKLSKDKPTIIKVTTTIGFGSLQQGTAGVHGSALKADDVKQLKKRWGFDPNKSFVVPQEVYDYYKKTVVEPGQKLNEEWDRMFEEYKTKFPEKGKELQRRLNGELPEGWEKHLPKFTPDDDALATRKTSQQVLTNMVQVLPELIGGSADLTPSNLTRWEGAVDFQPPITQLGNYAGRYIRYGVREHGMGAIMNGISAFGANYKPYGGTFLNFVSYAAGAVRLAALSGNPVIWVATHDSIGLGEDGPTHQPIETLAHLRAIPNMHVWRPADGNETSAAYYSAIKSGRTPSVVALSRQNLPQLEHSSFEKALKGGYVIHDVENPDIILVSTGSEVSISIDAAKKLYDTKKIKARVVSLPDFYTFDRQSEEYRFSVLPDGVPIMSFEVLATSSWGKYAHQSFGLDEFGRSGKGPEIYKLFDFTADGVASRAEKTINYYKGKQLLSPMGRAF

SEQ ID NO: 1316 - protein, 2051 aa, Saccharomyces cerevisiae
  strain ATCC 204508 / S288c
MDAYSTRPLTLSHGSLEHVLLVPTASFFIASQLQEQFNKILPEPTEGFAADDEPTTPAELVGKFLGYVSSLVEPSKVGQFDQVLNLCLTEFENCYLEGNDIHALAAKLLQENDTTLVKTKELIKNYITARIMAKRPFDKKSNSALFRAVGEGNAQLVAIFGGQGNTDDYFEELRDLYQTYHVLVGDLIKFSAETLSELIRTTLDAEKVFTQGLNILEWLENPSNTPDKDYLLSIPISCPLIGVIQLAHYVVTAKLLGFTPGELRSYLKGATGHSQGLVTAVAIAETDSWESFFVSVRKAITVLFFIGVRCYEAYPNTSLPPSILEDSLENNEGVPSPMLSISNLTQEQVQDYVNKTNSHLPAGKQVEISLVNGAKNLVVSGPPQSLYGLNLTLRKAKAPSGLDQSRIPFSERKLKFSNRFLPVASPFHSHLLVPASDLINKDLVKNNVSFNAKDIQIPVYDTFDGSDLRVLSGSISERIVDCIIRLPVKWETTTQFKATHILDFGPGGASGLGVLTHRNKDGTGVRVIVAGTLDINPDDDYGFKQEIFDVTSNGLKKNPNWLEEYHPKLIKNKSGKIFVETKFSKLIGRPPLLVPGMTPCTVSPDFVAATTNAGYTIELAGGGYFSAAGMTAAIDSVVSQIEKGSTFGINLIYVNPFMLQWGIPLIKELRSKGYPIQFLTIGAGVPSLEVASEYIETLGLKYLGLKPGSIDAISQVINIAKAHPNFPIALQWTGGRGGGHHSFEDAHTPMLQMYSKIRRHPNIMLIFGSGFGSADDTYPYLTGEWSTKFDYPPMPFDGFLFGSRVMIAKEVKTSPDAKKCIAACTGVPDDKWEQTYKKPTGGIVTVRSEMGEPIHKIATRGVMLWKEFDETIFNLPKNKLVPTLEAKRDYIISRLNADFQKPWFATVNGQARDLATMTYEEVAKRLVELMFIRSTNSWFDVTWRTFTGDFLRRVEERFTKSKTLSLIQSYSLLDKPDEAIEKVFNAYPAAREQFLNAQDIDHFLSMCQNPMQKPVPFVPVLDRRFEIFFKKDSLWQSEHLEAVVDQDVQRTCILHGPVAAQFTKVIDEPIKSIMDGIHDGHIKKLLHQYYGDDESKIPAVEYFGGESPVDVQSQVDSSSVSEDSAVFKATSSTDEESWFKALAGSEINWRHASFLCSFITQDKMFVSNPIRKVFKPSQGMVVEISNGNTSSKTVVTLSEPVQGELKPTVILKLLKENIIQMEMIENRTMDGKPVSLPLLYNFNPDNGFAPISEVMEDRNQRIKEMYWKLWIDEPFNLDFDPRDVIKGKDFEITAKEVYDFTHAVGNNCEDFVSRPDRTMLAPMDFAIVVGWRAIIKAIFPNTVDGDLLKLVHLSNGYKMIPGAKPLQVGDVVSTTAVIESVVNQPTGKIVDVVGTLSRNGKPVMEVTSSFFYRGNYTDFENTFQKTVEPVYQMHIKTSKDIAVLRSKEWFQLDDEDFDLLNKTLTFETETEVTFKNANIFSSVKCFGPIKVELPTKETVEIGIVDYEAGASHGNPVVDFLKRNGSTLEQKVNLENPIPIAVLDSYTPSTNEPYARVSGDLNPIHVSRHFASYANLPGTITHGMFSSASVRALIENWAADSVSSRVRGYTCQFVDMVLPNTALKTSIQHVGMINGRKLIKFETRNEDDVVVLTGEAEIEQPVTTFVFTGQGSQEQGMGMDLYKTSKAAQDVWNRADNHFKDTYGFSILDIVINNPVNLTIHFGGEKGKRIRENYSAMIFETIVDGKLKTEKIFKEINEHSTSYTFRSEKGLLSATQFTQPALTLMEKAAFEDLKSKGLIPADATFAGHSLGEYAALASLADVMSIESLVEVVFYRGMTMQVAVPRDELGRSNYGMIAINPGRVAASFSQEALQYVVERVGKRTGWLVEIVNYNVENQQYVAAGDLRALDTVTNVLNFIKLQKIDIIELQKSLSLEEVEGHLFEIIDEASKKSAVKPRPLKLERGFACIPLVGISVPFHSTYLMNGVKPFKSFLKKNIIKENVKVARLAGKYIPNLTAKPFQVTKEYFQDVYDLTGSEPIKEIIDNWEKYEQS

SEQ ID NO: 1317 - protein, 156 aa, Saccharomyces cerevisiae
  strain ATCC 204508 / S288c
MSTELTVQSERAFQKQPHIFNNPKVKTSKRTKRWYKNAGLGFKTPKTAIEGSYIDKKCPFTGLVSIRGKILTGTVVSTKMHRTIVIRRAYLHYIPKYNRYEKRHKNVPVHVSPAFRVQVGDIVTVGQCRPISKTVRFNVVKVSAAAGKANKQFAKF

SEQ ID NO: 1318 - protein, 214 aa, Saccharomyces cerevisiae
  strain ATCC 204508 / S288c
MSFNSPFFDFFDNINNEVDAFNRLLGEGGLRGYAPRRQLANTPAKDSTGKEVARPNNYAGALYDPRDETLDDWFDNDLSLFPSGFGFPRSVAVPVDILDHDNNYELKVVVPGVKSKKDIDIEYHQNKNQILVSGEIPSTLNEESKDKVKVKESSSGKFKRVITLPDYPGVDADNIKADYANGVLTLTVPKLKPQKDGKNHVKKIEVSSQESWGN

SEQ ID NO: 1319 - protein, 225 aa, Saccharomyces cerevisiae
  strain ATCC 204508 / S288c
MSDTEAPVEVQEDFEVVEEFTPVVLATPIPEEVQQAQTEIKLFNKWSFEEVEVKDASLVDYVQVRQPIFVAHTAGRYANKRFRKAQCPIIERLTNSLMMNGRNNGKKLKAVRIIKHTLDIINVLTDQNPIQVVVDAITNTGPREDTTRVGGGGAARRQAVDVSPLRRVNQAIALLTIGAREAAFRNIKTIAETLAEELINAAKGSSTSYAIKKKDELERVAKSNR

SEQ ID NO: 1320 - protein, 219 aa, Saccharomyces cerevisiae
  strain ATCC 204508 / S288c
MSNEIELLQKQVSELQDLVKKQSLIISKTGERVLELQLDKQKHDVTDFDSKFSKSISKKSGSATQFDATDFATNEDLVELVKELQGELNFIEERSIRRLVNSLKKDDDDVIAPLPNADGDIPAISDGVFPKSLKEFKDIPDLKLVRLAKFYERLPPTLKEQEDFENFLEGKVEAFHINETTDEEISKELEKFSKDELDDAFNDVARYLGLSLRRGTEIW

SEQ ID NO: 1321 - protein, 255 aa, Saccharomyces cerevisiae
  strain ATCC 204508 / S288c
MAVGKNKRLSKGKKGQKKRVVDPFTRKEWFDIKAPSTFENRNVGKTLVNKSTGLKSASDALKGRVVEVCLADLQGSEDHSFRKIKLRVDEVQGKNLLTNFHGMDFTTDKLRSMVRKWQTLIEANVTVKTSDDYVLRIFAIAFTRKQANQVKRHSYAQSSHIRAIRKVISEILTKEVQGSTLAQLTSKLIPEVINKEIENATKDIFPLQNIHVRKVKLLKQPKFDVGALMALHGEGSGEEKGKKVTGFKDEVLETV

SEQ ID NO: 1322 - protein, 255 aa, Saccharomyces cerevisiae
  strain ATCC 204508 / S288c
MAVGKNKRLSRGKKGLKKKVVDPFTRKEWFDIKAPSTFENRNVGKTLVNKSTGLKNASDALKGRVVEVCLADLQGSEDHSFRKVKLRVDEVQGKNLLTNFHGMDFTTDKLRSMVRKWQTLIEANVTVKTSDDYVLRIFAIAFTRKQANQVKRHSYAQSSHIRAIRKVISEILTREVQNSTLAQLTSKLIPEVINKEIENATKDIFPLQNIHVRKVKLLKQPKFDVGALMALHGEGSGEEKGKKVSGFKDEVLETV

SEQ ID NO: 1323 - protein, 319 aa, Saccharomyces cerevisiae
  strain ATCC 204508 / S288c
MASNEVLVLRGTLEGHNGWVTSLATSAGQPNLLLSASRDKTLISWKLTGDDQKFGVPVRSFKGHSHIVQDCTLTADGAYALSASWDKTLRLWDVATGETYQRFVGHKSDVMSVDIDKKASMIISGSRDKTIKVWTIKGQCLATLLGHNDWVSQVRVVPNEKADDDSVTIISAGNDKMVKAWNLNQFQIEADFIGHNSNINTLTASPDGTLIASAGKDGEIMLWNLAAKKAMYTLSAQDEVFSLAFSPNRYWLAAATATGIKVFSLDPQYLVDDLRPEFAGYSKAAEPHAVSLAWSADGQTLFAGYTDNVIRVWQVMTAN

SEQ ID NO: 1324 - protein, 335 aa, Saccharomyces cerevisiae
  strain ATCC 204508 / S288c
MSEPAQKKQKVANNSLEQLKASGTVVVADTGDFGSIAKFQPQDSTTNPSLILAAAKQPTYAKLIDVAVEYGKKHGKTTEEQVENAVDRLLVEFGKEILKIVPGRVSTEVDARLSFDTQATIEKARHIIKLFEQEGVSKERVLIKIASTWEGIQAAKELEEKDGIHCNLTLLFSFVQAVACAEAQVTLISPFVGRILDWYKSSTGKDYKGEADPGVISVKKIYNYYKKYGYKTIVMGASFRSTDEIKNLAGVDYLTISPALLDKLMNSTEPFPRVLDPVSAKKEAGDKISYISDESKFRFDLNEDAMATEKLSEGIRKFSADIVTLFDLIEKKVTA

SEQ ID NO: 1325 - protein, 654 aa, Saccharomyces cerevisiae
  strain ATCC 204508 / S288c
MLAAKNILNRSSLSSSFRIATRLQSTKVQGSVIGIDLGTTNSAVAIMEGKVPKIIENAEGSRTTPSVVAFTKEGERLVGIPAKRQAVVNPENTLFATKRLIGRRFEDAEVQRDIKQVPYKIVKHSNGDAWVEARGQTYSPAQIGGFVLNKMKETAEAYLGKPVKNAVVTVPAYFNDSQRQATKDAGQIVGLNVLRVVNEPTAAALAYGLEKSDSKVVAVFDLGGGTFDISILDIDNGVFEVKSTNGDTHLGGEDFDIYLLREIVSRFKTETGIDLENDRMAIQRIREAAEKAKIELSSTVSTEINLPFITADASGPKHINMKFSRAQFETLTAPLVKRTVDPVKKALKDAGLSTSDISEVLLVGGMSRMPKVVETVKSLFGKDPSKAVNPDEAVAIGAAVQGAVLSGEVTDVLLLDVTPLSLGIETLGGVFTRLIPRNTTIPTKKSQIFSTAAAGQTSVEIRVFQGERELVRDNKLIGNFTLAGIPPAPKGVPQIEVTFDIDADGIINVSARDKATNKDSSITVAGSSGLSENEIEQMVNDAEKFKSQDEARKQAIETANKADQLANDTENSLKEFEGKVDKAEAQKVRDQITSLKELVARVQGGEEVNAEELKTKTEELQTSSMKLFEQLYKNDSNNNNNNNGNNAESGETKQ

SEQ ID NO: 1326 - protein, 896 aa, Saccharomyces cerevisiae
  strain ATCC 204508 / S288c
MTTTAQDNSPKKRQRIINCVTQLPYKIQLGESNDDWKISATTGNSALFSSLEYLQFDSTEYEQHVVGWTGEITRTERNLFTREAKEKPQDLDDDPLYLTKEQINGLTTTLQDHMKSDKEAKTDTTQTAPVTNNVHPVWLLRKNQSRWRNYAEKVIWPTFHYILNPSNEGEQEKNWWYDYVKFNEAYAQKIGEVYRKGDIIWIHDYYLLLLPQLLRMKFNDESIIIGYFHHAPWPSNEYFRCLPRRKQILDGLVGANRICFQNESFSRHFVSSCKRLLDATAKKSKNSSNSDQYQVSVYGGDVLVDSLPIGVNTTQILKDAFTKDIDSKVLSIKQAYQNKKIIIGRDRLDSVRGVVQKLRAFETFLAMYPEWRDQVVLIQVSSPTANRNSPQTIRLEQQVNELVNSINSEYGNLNFSPVQHYYMRIPKDVYLSLLRVADLCLITSVRDGMNTTALEYVTVKSHMSNFLCYGNPLILSEFSGSSNVLKDAIVVNPWDSVAVAKSINMALKLDKEEKSNLESKLWKEVPTIQDWTNKFLSSLKEQASSNDDMERKMTPALNRPVLLENYKQAKRRLFLFDYDGTLTPIVKDPAAAIPSARLYTILQKLCADPHNQIWIISGRDQKFLNKWLGGKLPQLGLSAEHGCFMKDVSCQDWVNLTEKVDMSWQVRVNEVMEEFTTRTPGSFIERKKVALTWHYRRTVPELGEFHAKELKEKLLSFTDDFDLEVMDGKANIEVRPRFVNKGEIVKRLVWHQHGKPQDMLKGISEKLPKDEMPDFVLCLGDDFTDEDMFRQLNTIETCWKEKYPDQKNQWGNYGFYPVTVGSASKKTVAKAHLTDPQQVLETLGLLVGDVSLFQSAGTVDLDSRGHVKNSESSLKSKLASKAYVMKRSASYTGAKV

SEQ ID NO: 1327 - protein, 176 aa, Saccharomyces cerevisiae
  strain ATCC 204508 / S288c
MSAQKAPKWYPSEDVAALKKTRKAARPQKLRASLVPGTVLILLAGRFRGKRVVYLKHLEDNTLLISGPFKVNGVPLRRVNARYVIATSTKVSVEGVNVEKFNVEYFAKEKLTKKEKKEANLFPEQQNKEIKAERVEDQKVVDKALIAEIKKTPLLKQYLSASFSLKNGDKPHMLKF

SEQ ID NO: 1328 - protein, 254 aa, Saccharomyces cerevisiae [sequence omitted]

SEQ ID NO: 1329 - protein, 240 aa, Saccharomyces cerevisiae
  strain ATCC 204508 / S288c
MVALISKKRKLVADGVFYAELNEFFTRELAEEGYSGVEVRVTPTKTEVIIRATRTQDVLGENGRRINELTLLVQKRFKYAPGTIVLYAERVQDRGLSAVAQAESMKFKLLNGLAIRRAAYGVVRYVMESGAKGCEVVVSGKLRAARAKAMKFADGFLIHSGQPVNDFIDTATRHVLMRQGVLGIKVKIMRDPAKSRTGPKALPDAVTIIEPKEEEPILAPSVKDYRPAEETEAQAEPVEA

SEQ ID NO: 1330 - protein, 312 aa, Saccharomyces cerevisiae
  strain ATCC 204508 / S288c
MGGIREKKAEYFAKLREYLEEYKSLFVVGVDNVSSQQMHEVRKELRGRAVVLMGKNTMVRRAIRGFLSDLPDFEKLLPFVKGNVGFVFTNEPLTEIKNVIVSNRVAAPARAGAVAPEDIWVRAVNTGMEPGKTSFFQALGVPTKIARGTIEIVSDVKVVDAGNKVGQSEASLLNLLNISPFTFGLTVVQVYDNGQVFPSSILDITDEELVSHFVSAVSTIASISLAIGYPTLPSVGHTLINNYKDLLAVAIAASYHYPEIEDLVDRIENPEKYAAAAPAATSAASGDAAPAEEAAAEEEEESDDDMGFGLFD

SEQ ID NO: 1331 - protein, 592 aa, Saccharomyces cerevisiae
  strain ATCC 204508 / S288c
MANYTKTAILSVYDKTGLLDLARGLIEKNVRILASGGTARMIRDAGFPIEDVSAITHAPEMLGGRVKTLHPAVHGGILARDIDSDEKDLKEQHIEKVDYVVCNLYPFKETVAKVGVTIPEAVEEIDIGGVTLLRAAAKNHARVTILSDPKDYSEFLSELSSNGEISQDLRNRLALKAFEHTADYDAAISDFFRKQYSEGQAQITLRYGANPHQKPAQAYVSQQDSLPFKVLCGSPGYINLLDALNSWPLVKELSASLNLPAAASFKHVSPAGAAVGIPLSDVEKQVYFVADIENLSPLACAYARARGADRMSSFGDWIALSNIVDVPTAKIISREVSDGVIAPGYEPEALAILSKKKGGKYCILQIDPNYVPEAVERRQVYGVTLEQKRNDAIINQSTFKEIVSQNKNLTEQAIIDLTVATIAIKYTQSNSVCYARNGMVVGLGAGQQSRIHCTRLAGDKADNWWFRQHPRVLEIKWAKGVKRPEKSNAIDLFVTGQIPTEEPELSEYQSKFEEIPKPFTPEERKEWLSKLTNVSLSSDAFFPFPDNVYRAVKSGVKYIAAPSGSVMDKVVFSAADSFDLVYVENPIRLFHH

SEQ ID NO: 1332 - protein, 87 aa, Saccharomyces cerevisiae
  strain ATCC 204508 / S288c
MENDKGQLVELYVPRKCSATNRIIKADDHASVQINVAKVDEEGRAIPGEYITYALSGYVRSRGESDDSLNRLAQNDGLLKNVWSYSR

SEQ ID NO: 1333 - protein, 136 aa, Saccharomyces cerevisiae
  strain ATCC 204508 / S288c
MAKFLKAGKVAVVVRGRYAGKKVVIVKPHDEGSKSHPFGHALVAGIERYPSKVTKKHGAKKVAKRTKIKPFIKVVNYNHLLPTRYTLDVEAFKSVVSTETFEQPSQREEAKKVVKKAFEERHQAGKNQWFFSKLRF

SEQ ID NO: 1334 - protein, 167 aa, Saccharomyces cerevisiae
  strain ATCC 204508 / S288c
MIIYKDIFSNDELLSDAYDAKLVDDVIYEADCAMVNVGGDNIDIGANPSAEGGDDDVEEGAEMVNNVVHSFRLQQTAFDKKSFLTYIKGYMKAVKAKLQETNPEEVPKFEKGAQTYVKKVIGSFKDWEFFTGESMDPDAMVVMLNYREDGTTPFVAIWKHGIVEEKI

SEQ ID NO: 1335 - protein, 199 aa, Saccharomyces cerevisiae
  strain ATCC 204508 / S288c
MAISKNLPILKNHFRKHWQERVKVHFDQAGKKVSRRNARATRAAKIAPRPLDLLRPVVRAPTVKYNRKVRAGRGFTLAEVKAAGLTAAYARTIGIAVDHRRQNRNQEIFDANVQRLKEYQSKIIVFPRNGKAPEAEQVLSAAATFPIAQPATDVEARAVQDNGESAFRTLRLARSEKKFRGIREKRAREKAEAEAEKKK

SEQ ID NO: 1336 - protein, 362 aa, Saccharomyces cerevisiae
  strain ATCC 204508 / S288c
MSRPQVTVHSLTGEATANALPLPAVFSAPIRPDIVHTVFTSVNKNKRQAYAVSEKAGHQTSAESWGTGRAVARIPRVGGGGTGRSGQGAFGNMCRGGRMFAPTKTWRKWNVKVNHNEKRYATASAIAATAVASLVLARGHRVEKIPEIPLVVSTDLESIQKTKEAVAALKAVGAHSDLLKVLKSKKLRAGKGKYRNRRWTQRRGPLVVYAEDNGIVKALRNVPGVETANVASLNLLQLAPGAHLGRFVIWTEAAFTKLDQVWGSETVASSKVGYTLPSHIISTSDVTRIINSSEIQSAIRPAGQATQKRTHVLKKNPLKNKQVLLRLNPYAKVFAAEKLGSKKAEKTGTKPAAVFTETLKHD

SEQ ID NO: 1337 - protein, 412 aa, Saccharomyces cerevisiae
  strain ATCC 204508 / S288c
MTKIKVANPIVEMDGDEQTRIIWHLIRDKLVLPYLDVDLKYYDLSVEYRDQTNDQVTVDSATATLKYGVAVKCATITPDEARVEEFHLKKMWKSPNGTIRNILGGTVFREPIIIPRIPRLVPQWEKPIIIGRHAFGDQYKATDVIVPEEGELRLVYKSKSGTHDVDLKVFDYPEHGGVAMMMYNTTDSIEGFAKASFELAIERKLPLYSTTKNTILKKYDGKFKDVFEAMYARSYKEKFESLGIWYEHRLIDDMVAQMLKSKGGYIIAMKNYDGDVESDIVAQGFGSLGLMTSVLITPDGKTFESEAAHGTVTRHFRQHQQGKETSTNSIASIFAWTRGIIQRGKLDNTPDVVKFGQILESATVNTVQEDGIMTKDLALILGKSERSAYVTTEEFIDAVESRLKKEFEAAAL

SEQ ID NO: 1338 - protein, 517 aa, Saccharomyces cerevisiae
  strain ATCC 204508 / S288c
MVLSDKELFAINKKAVEQGFNVKPRLNYNTVSGVNGPLVILEKVKFPRYNEIVNLTLPDGTVRQGQVLEIRGDRAIVQVFEGTSGIDVKKTTVEFTGESLRIPVSEDMLGRIFDGSGRPIDNGPKVFAEDYLDINGSPINPYARIYPEEMISTGVSAIDTMNSIARGQKIPIFSASGLPHNEIAAQICRQAGLVRPTKDVHDGHEENFSIVFAAMGVNLETARFFKQDFEENGSLERTSLFLNLANDPTIERIITPRLALTTAEYLAYQTERHVLTILTDMSSYADALREVSAAREEVPGRRGYPGYMYTDLSTIYERAGRVEGRNGSITQIPILTMPNDDITHPIPDLTGYITEGQIFVDRQLHNKGIYPPINVLPSLSRLMKSAIGEGMTRKDHGDVSNQLYAKYAIGKDAAAMKAVVGEEALSIEDKLSLEFLEKFEKTFITQGAYEDRTVFESLDQAWSLLRIYPKEMLNRISPKILDEFYDRARDDADEDEEDPDTRSSGKKKDASQEESLI

SEQ ID NO: 1339 - protein, 549 aa, Saccharomyces cerevisiae
  strain ATCC 204508 / S288c
MSPSKMNATVGSTSEVEQKIRQELALSDEVTTIRRNAPAAVLYEDGLKENKTVISSSGALIAYSGVKTGRSPKDKRIVEEPTSKDEIWWGPVNKPCSERTWSINRERAADYLRTRDHIYIVDAFAGWDPKYRIKVRVVCARAYHALFMTNMLIRPTEEELAHFGEPDFTVWNAGQFPANLHTQDMSSKSTIEINFKAMEMIILGTEYAGEMKKGIFTVMFYLMPVHHNVLTLHSSANQGIQNGDVTLFFGLSGTGKTTLSADPHRLLIGDDEHCWSDHGVFNIEGGCYAKCINLSAEKEPEIFDAIKFGSVLENVIYDEKSHVVDYDDSSITENTRCAYPIDYIPSAKIPCLADSHPKNIILLTCDASGVLPPVSKLTPEQVMYHFISGYTSKMAGTEQGVTEPEPTFSSCFGQPFLALHPIRYATMLATKMSQHKANAYLINTGWTGSSYVSGGKRCPLKYTRAILDSIHDGSLANETYETLPIFNLQVPTKVNGVPAELLNPAKNWSQGESKYRGAVTNLANLFVQNFKIYQDRATPDVLAAGPQFE

SEQ ID NO: 1340 - protein, 569 aa, Saccharomyces cerevisiae
  strain ATCC 204508 / S288c
MSFQIETVPTKPYEDQKPGTSGLRKKTKVFKDEPNYTENFIQSIMEAIPEGSKGATLVVGGDGRYYNDVILHKIAAIGAANGIKKLVIGQHGLLSTPAASHIMRTYEEKCTGGIILTASHNPGGPENDMGIKYNLSNGGPAPESVTNAIWEISKKLTSYKIIKDFPELDLGTIGKNKKYGPLLVDIIDITKDYVNFLKEIFDFDLIKKFIDNQRSTKNWKLLFDSMNGVTGPYGKAIFVDEFGLPADEVLQNWHPSPDFGGMHPDPNLTYASSLVKRVDREKIEFGAASDGDGDRNMIYGYGPSFVSPGDSVAIIAEYAAEIPYFAKQGIYGLARSFPTSGAIDRVAKAHGLNCYEVPTGWKFFCALFDAKKLSICGEESFGTGSNHVREKDGVWAIMAWLNILAIYNKHHPENEASIKTIQNEFWAKYGRTFFTRYDFEKVETEKANKIVDQLRAYVTKSGVVNSAFPADESLKVTDCGDFSYTDLDGSVSDHQGLYVKLSNGARFVLRLSGTGSSGATIRLYIEKYCDDKSQYQKTAEEYLKPIINSVIKFLNFKQVLGTEEPTVRT

SEQ ID NO: 1341 - protein, 680 aa, Saccharomyces cerevisiae
  strain ATCC 204508 / S288c
MTQFTDIDKLAVSTIRILAVDTVSKANSGHPGAPLGMAPAAHVLWSQMRMNPTNPDWINRDRFVLSNGHAVALLYSMLHLTGYDLSIEDLKQFRQLGSRTPGHPEFELPGVEVTTGPLGQGISNAVGMAMAQANLAATYNKPGFTLSDNYTYVFLGDGCLQEGISSEASSLAGHLKLGNLIAIYDDNKITIDGATSISFDEDVAKRYEAYGWEVLYVENGNEDLAGIAKAIAQAKLSKDKPTLIKMTTTIGYGSLHAGSHSVHGAPLKADDVKQLKSKFGFNPDKSFVVPQEVYDHYQKTILKPGVEANNKWNKLFSEYQKKFPELGAELARRLSGQLPANWESKLPTYTAKDSAVATRKLSETVLEDVYNQLPELIGGSADLTPSNLTRWKEALDFQPPSSGSGNYSGRYIRYGIREHAMGAIMNGISAFGANYKPYGGTFLNFVSYAAGAVRLSALSGHPVIWVATHDSIGVGEDGPTHQPIETLAHFRSLPNIQVWRPADGNEVSAAYKNSLESKHTPSIIALSRQNLPQLEGSSIESASKGGYVLQDVANPDIILVATGSEVSLSVEAAKTLAAKNIKARVVSLPDFFTFDKQPLEYRLSVLPDNVPIMSVEVLATTCWGKYAHQSFGIDRFGASGKAPEVFKFFGFTPEGVAERAQKTIAFYKGDKLISPLKKAF

SEQ ID NO: 1342 - protein, 143 aa, Saccharomyces cerevisiae
  strain ATCC 204508 / S288c
MSAVPSVQTFGKKKSATAVAHVKAGKGLIKVNGSPITLVEPEILRFKVYEPLLLVGLDKFSNIDIRVRVTGGGHVSQVYAIRQAIAKGLVAYHQKYVDEQSKNELKKAFTSYDRTLLIADSRRPEPKKFGGKGARSRFQKSYR

SEQ ID NO: 1343 - protein, 152 aa, Saccharomyces cerevisiae
  strain ATCC 204508 / S288c
MQIFVKTLTGKTITLEVESSDTIDNVKSKIQDKEGIPPDQQRLIFAGKQLEDGRTLSDYNIQKESTLHLVLRLRGGGKKRKKKVYTTPKKIKHKHKKVKLAVLSYYKVDAEGKVTKLRRECSNPTCGAGVFLANHKDRLYCGKCHSVYKVNA

SEQ ID NO: 1344 - protein, 172 aa, Saccharomyces cerevisiae
  strain ATCC 204508 / S288c
MAHFKEYQVIGRRLPTESVPEPKLFRMRIFASNEVIAKSRYWYFLQKLHKVKKASGEIVSINQINEAHPTKVKNFGVWVRYDSRSGTHNMYKEIRDVSRVAAVETLYQDMAARHRARFRSIHILKVAEIEKTADVKRQYVKQFLTKDLKFPLPHRVQKSTKTFSYKRPSTFY

SEQ ID NO: 1345 - protein, 196 aa, Saccharomyces cerevisiae
  strain ATCC 204508 / S288c
MVAQVQKQAPTFKKTAVVDGVFDEVSLDKYKGKYVVLAFIPLAFTFVCPTEIIAFSEAAKKFEEQGAQVLFASTDSEYSLLAWTNIPRKEGGLGPINIPLLADTNHSLSRDYGVLIEEEGVALRGLFIIDPKGVIRHITINDLPVGRNVDEALRLVEAFQWTDKNGTVLPCNWTPGAATIKPTVEDSKEYFEAANK

SEQ ID NO: 1346 - protein, 254 aa, Saccharomyces cerevisiae
  strain ATCC 204508 / S288c
MGRVIRNQRKGAGSIFTSHTRLRQGAAKLRTLDYAERHGYIRGIVKQIVHDSGRGAPLAKVVFRDPYKYRLREEIFIANEGVHTGQFIYAGKKASLNVGNVLPLGSVPEGTIVSNVEEKPGDRGALARASGNYVIIIGHNPDENKTRVRLPSGAKKVISSDARGVIGVIAGGGRVDKPLLKAGRAFHKYRLKRNSWPKTRGVAMNPVDHPHGGGNHQHIGKASTISRGAVSGQKAGLIAARRTGLLRGSQKTQD

SEQ ID NO: 1347 - protein, 252 aa, Saccharomyces cerevisiae
  strain ATCC 204508 / S288c
MSLPATFDLTPEDAQLLLAANTHLGARNVQVHQEPYVFNARPDGVHVINVGKTWEKLVLAARIIAAIPNPEDVVAISSRTYGQRAVLKFAAHTGATPIAGRFTPGSFTNYITRSFKEPRLVIVTDPRLDAQAIKEASYVNIPVIALTDLDSPSEFVDVAIPCNNRGKHSIGLIWYLLAREVLRLRGALVDRTQPWSIMPDLYFYRNPEEVEQVAEEAAAAEEGEEEEVKEEVTEGQAEATEWAEENADNVEW

SEQ ID NO: 1348 - protein, 359 aa, Saccharomyces cerevisiae
  strain ATCC 204508 / S288c
MSTKVVNVAVIGAGVVGSAFLDQLLAMKSTITYNLVLLAEAERSLISKDFSPLNVGSDWKAALAASTTKTLPLDDLIAHLKTSPKPVILVDNTSSAYIAGFYTKFVENGISIATPNKKAFSSDLATWKALFSNKPTNGFVYHEATVGAGLPIISFLREIIQTGDEVEKIEGIFSGTLSYIFNEFSTSQANDVKFSDVVKVAKKLGYTEPDPRDDLNGLDVARKVTIVGRISGVEVESPTSFPVQSLIPKPLESVKSADEFLEKLSDYDKDLTQLKKEAATENKVLRFIGKVDVATKSVSVGIEKYDYSHPFASLKGSDNVISIKTKRYTNPVVIQGAGAGAAVTAAGVLGDVIKIAQRL

SEQ ID NO: 1349 - protein, 376 aa, Saccharomyces cerevisiae
  strain ATCC 204508 / S288c
MSASIPETMKAVVIENGKAVVKQDIPIPELEEGFVLIKTVAVAGNPTDWKHIDFKIGPQGALLGCDAAGQIVKLGPNVDAARFAIGDYIYGVIHGASVRFPSNGAFAEYSAISSETAYKPAREFRLCGKDKLPEGPVKSLEGAVSLPVSLTTAGMILTHSFGLDMTWKPSKAQRDQPILFWGGATAVGQMLIQLAKKLNGFSKIIVVASRKHEKLLKEYGADELFDYHDADVIEQIKKKYNNIPYLVDCVSNTETIQQVYKCAADDLDATVVQLTVLTEKDIKEEDRRQNVSIEGTLLYLIGGNDVPFGTFTLPADPEYKEAAIKFIKFINPKINDGEIHHIPVKVYKNGLDDIPQLLDDIKHGRNSGEKLVAVLK

SEQ ID NO: 1350 - protein, 384 aa, Saccharomyces cerevisiae
  strain ATCC 204508 / S288c
MSKSKTFLFTSESVGEGHPDKICDQVSDAILDACLEQDPFSKVACETAAKTGMIMVFGEITTKARLDYQQIVRDTIKKIGYDDSAKGFDYKTCNVLVAIEQQSPDIAQGLHYEKSLEDLGAGDQGIMFGYATDETPEGLPLTILLAHKLNMAMADARRDGSLPWLRPDTKTQVTVEYEDDNGRWVPKRIDTVVISAQHADEISTADLRTQLQKDIVEKVIPKDMLDENTKYFIQPSGRFVIGGPQGDAGLTGRKIIVDAYGGASSVGGGAFSGKDYSKVDRSAAYAARWVAKSLVAAGLCKRVQVQFSYAIGIAEPLSLHVDTYGTATKSDDEIIEIIKKNFDLRPGVLVKELDLARPIYLPTASYGHFTNQEYSWEKPKKLEF

SEQ ID NO: 1351 - protein, 395 aa, Saccharomyces cerevisiae
  strain ATCC 204508 / S288c
MLRTQAARLICNSRVITAKRTFALATRAAAYSRPAARFVKPMITTRGLKQINFGGTVETVYERADWPREKLLDYFKNDTFALIGYGSQGYGQGLNLRDNGLNVIIGVRKDGASWKAAIEDGWVPGKNLFTVEDAIKRGSYVMNLLSDAAQSETWPAIKPLLTKGKTLYFSHGFSPVFKDLTHVEPPKDLDVILVAPKGSGRTVRSLFKEGRGINSSYAVWNDVTGKAHEKAQALAVAIGSGYVYQTTFEREVNSDLYGERGCLMGGIHGMFLAQYDVLRENGHSPSEAFNETVEEATQSLYPLIGKYGMDYMYDACSTTARRGALDWYPIFKNALKPVFQDLYESTKNGTETKRSLEFNSQPDYREKLEKELDTIRNMEIWKVGKEVRKLRPENQ

SEQ ID NO: 1352 - protein, 400 aa, Saccharomyces cerevisiae
  strain ATCC 204508 / S288c
MPFVKDFKPQALGDTNLFKPIKIGNNELLHRAVIPPLTRMRAQHPGNIPNRDWAVEYYAQRAQRPGTLIITEGTFPSPQSGGYDNAPGIWSEEQIKEWTKIFKAIHENKSFAWVQLWVLGWAAFPDTLARDGLRYDSASDNVYMNAEQEEKAKKANNPQHSITKDEIKQYVKEYVQAAKNSIAAGADGVEIHSANGYLLNQFLDPHSNNRTDEYGGSIENRARFTLEVVDAVVDAIGPEKVGLRLSPYGVFNSMSGGAETGIVAQYAYVLGELERRAKAGKRLAFVHLVEPRVTNPFLTEGEGEYNGGSNKFAYSIWKGPIIRAGNFALHPEVVREEVKDPRTLIGYGRFFISNPDLVDRLEKGLPLNKYDRDTFYKMSAEGYIDYPTYEEALKLGWDKN

SEQ ID NO: 1353 - protein, 449 aa, Saccharomyces cerevisiae
  strain ATCC 204508 / S288c
MSAPAQNYKIADISLAAFGRKEIELAEHEMPGLMAIRKAYGDVQPLKGARIAGCLHMTIQTAVLIETLVALGAEVTWSSCNIYSTQDHAAAAIAASGVPVFAWKGETEEEYLWCIEQQLFAFKDNKKLNLILDDGGDLTTLVHEKHPEMLEDCFGLSEETTTGVHHLYRMVKEGKLKVPAINVNDSVTKSKFDNLYGCRESLVDGIKRATDVMLAGKVAVVAGYGDVGKGCAAALRGMGARVLVTEIDPINALQAAMEGYQVVTMEDASHIGQVFVTTTGCRDIINGEHFINMPEDAIVCNIGHFDIEIDVAWLKANAKECINIKPQVDRYLLSSGRHVILLANGRLVNLGCATGHSSFVMSCSFSNQVLAQIALFKSNDKSFREKHIEFQKTGPFEVGVHVLPKILDEAVAKFHLGNLGVRLTKLSKVQSEYLGIPEEGPFKADHYRY

SEQ ID NO: 1354 - protein, 495 aa, Saccharomyces cerevisiae
  strain ATCC 204508 / S288c
MTTDNAKAQLTSSSGGNIIVVSNRLPVTITKNSSTGQYEYAMSSGGLVTALEGLKKTYTFKWFGWPGLEIPDDEKDQVRKDLLEKFNAVPIFLSDEIADLHYNGFSNSILWPLFHYHPGEINFDENAWLAYNEANQTFTNEIAKTMNHNDLIWVHDYHLMLVPEMLRVKIHEKQLQNVKVGWFLHTPFPSSEIYRILPVRQEILKGVLSCDLVGFHTYDYARHFLSSVQRVLNVNTLPNGVEYQGRFVNVGAFPIGIDVDKFTDGLKKESVQKRIQQLKETFKGCKIIVGVDRLDYIKGVPQKLHAMEVFLNEHPEWRGKVVLVQVAVPSRGDVEEYQYLRSVVNELVGRINGQFGTVEFVPIHFMHKSIPFEELISLYAVSDVCLVSSTRDGMNLVSYEYIACQEEKKGSLILSEFTGAAQSLNGAIIVNPWNTDDLSDAINEALTLPDVKKEVNWEKLYKYISKYTSAFWGENFVHELYSTSSSSTSSSATKN

SEQ ID NO: 1355 - protein, 522 aa, Saccharomyces cerevisiae
  strain ATCC 204508 / S288c
MKFSAGAVLSWSSLLLASSVFAQQEAVAPEDSAVVKLATDSFNEYIQSHDLVLAEFFAPWCGHCKNMAPEYVKAAETLVEKNITLAQIDCTENQDLCMEHNIPGFPSLKIFKNSDVNNSIDYEGPRTAEAIVQFMIKQSQPAVAVVADLPAYLANETFVTPVIVQSGKIDADFNATFYSMANKHFNDYDFVSAENADDDFKLSIYLPSAMDEPVVYNGKKADIADADVFEKWLQVEALPYFGEIDGSVFAQYVESGLPLGYLFYNDEEELEEYKPLFTELAKKNRGLMNFVSIDARKFGRHAGNLNMKEQFPLFAIHDMTEDLKYGLPQLSEEAFDELSDKIVLESKAIESLVKDFLKGDASPIVKSQEIFENQDSSVFQLVGKNHDEIVNDPKKDVLVLYYAPWCGHCKRLAPTYQELADTYANATSDVLIAKLDHTENDVRGVVIEGYPTIVLYPGGKKSESVVYQGSRSLDSLFDFIKENGHFDVDGKALYEEAQEKAAEEADADAELADEEDAIHDEL

SEQ ID NO: 1356 - protein, 557 aa, Saccharomyces cerevisiae
  strain ATCC 204508 / S288c
MSQDENIVKAVEESAEPAQVILGEDGKPLSKKALKKLQKEQEKQRKKEERALQLEAEREAREKKAAAEDTAKDNYGKLPLIQSRDSDRTGQKRVKFVDLDEAKDSDKEVLFRARVHNTRQQGATLAFLTLRQQASLIQGLVKANKEGTISKNMVKWAGSLNLESIVLVRGIVKKVDEPIKSATVQNLEIHITKIYTISETPEALPILLEDASRSEAEAEAAGLPVVNLDTRLDYRVIDLRTVTNQAIFRIQAGVCELFREYLATKKFTEVHTPKLLGAPSEGGSSVFEVTYFKGKAYLAQSPQFNKQQLIVADFERVYEIGPVFRAENSNTHRHMTEFTGLDMEMAFEEHYHEVLDTLSELFVFIFSELPKRFAHEIELVRKQYPVEEFKLPKDGKMVRLTYKEGIEMLRAAGKEIGDFEDLSTENEKFLGKLVRDKYDTDFYILDKFPLEIRPFYTMPDPANPKYSNSYDFFMRGEEILSGAQRIHDHALLQERMKAHGLSPEDPGLKDYCDGFSYGCPPHAGGGIGLERVVMFYLDLKNIRRASLFPRDPKRLRP

SEQ ID NO: 1357 - protein, 143 aa, Saccharomyces cerevisiae; identical to SEQ ID NO: 620
  strain ATCC 204508 / S288c

SEQ ID NO: 1358 - protein, 162 aa, Saccharomyces cerevisiae
  strain ATCC 204508 / S288c
MSQVYFDVEADGQPIGRVVFKLYNDIVPKTAENFRALCTGEKGFGYAGSPFHRVIPDFMLQGGDFTAGNGTGGKSIYGGKFPDENFKKHHDRPGLLSMANAGPNTNGSQFFITTVPCPWLDGKHVVFGEVVDGYDIVKKVESLGSPSGATKARIVVAKSGEL

SEQ ID NO: 1359 - protein, 189 aa, Saccharomyces cerevisiae
  strain ATCC 204508 / S288c
MANLRTQKRLAASVVGVGKRKVWLDPNETSEIAQANSRNAIRKLVKNGTIVKKAVTVHSKSRTRAHAQSKREGRHSGYGKRKGTREARLPSQVVWIRRLRVLRRLLAKYRDAGKIDKHLYHVLYKESKGNAFKHKRALVEHIIQAKADAQREKALNEEAEARRLKNRAARDRRAQRVAEKRDALLKEDA

SEQ ID NO: 1360 - protein, 200 aa, Saccharomyces cerevisiae
  strain ATCC 204508 / S288c
MGISRDSRHKRSATGAKRAQFRKKRKFELGRQPANTKIGAKRIHSVRTRGGNKKYRALRIETGNFSWASEGISKKTRIAGVVYHPSNNELVRTNTLTKAAIVQIDATPFRQWFEAHYGQTLGKKKNVKEEETVAKSKNAERKWAARAASAKIESSVESQFSAGRLYACISSRPGQSGRCDGYILEGEELAFYLRRLTAKK

SEQ ID NO: 1361 - protein, 190 aa, Saccharomyces cerevisiae
  strain ATCC 204508 / S288c
MSAPQAKILSQAPTELELQVAQAFVELENSSPELKAELRPLQFKSIREIDVAGGKKALAIFVPVPSLAGFHKVQTKLTRELEKKFQDRHVIFLAERRILPKPSRTSRQVQKRPRSRTLTAVHDKILEDLVFPTEIVGKRVRYLVGGNKIQKVLLDSKDVQQIDYKLESFQAVYNKLTGKQIVFEIPSETH

SEQ ID NO: 1362 - protein, 244 aa, Saccharomyces cerevisiae
  strain ATCC 204508 / S288c
MAAEKILTPESQLKKSKAQQKTAEQVAAERAARKAANKEKRAIILERNAAYQKEYETAERNIIQAKRDAKAAGSYYVEAQHKLVFVVRIKGINKIPPKPRKVLQLLRLTRINSGTFVKVTKATLELLKLIEPYVAYGYPSYSTIRQLVYKRGFGKINKQRVPLSDNAIIEANLGKYGILSIDDLIHEIITVGPHFKQANNFLWPFKLSNPSGGWGVPRKFKHFIQGGSFGNREEFINKLVKSMN

SEQ ID NO: 1363 - protein, 256 aa, Saccharomyces cerevisiae
  strain ATCC 204508 / S288c
MAPGKKVAPAPFGAKSTKSNKTRNPLTHSTPKNFGIGQAVQPKRNLSRYVKWPEYVRVQRQKKILSIRLKVPPTIAQFQYTLDRNTAAETFKLFNKYRPETAAEKKERLTKEAAAVAEGKSKQDASPKPYAVKYGLNHVVALIENKKAKLVLIANDVDPIELVVFLPALCKKMGVPYAIVKGKARLGTLVNQKTSAVAALTEVRAEDEAALAKLVSTIDANFADKYDEVKKHWGGGILGNKAQAKMDKRAKNSDSA

SEQ ID NO: 1364 - protein, 254 aa, Saccharomyces cerevisiae
  strain ATCC 204508 / S288c
MSIAEFAYKEKPETLVLFDVDGTLTPARLTVSEEVRKTLAKLRNKCCIGFVGGSDLSKQLEQLGPNVLDEFDYSFSENGLTAYRLGKELASQSFINWLGEEKYNKLAVFILRYLSEIDLPKRRGTFLEFRNGMINVSPIGRNASTEERNEFERYDKEHQIRAKFVEALKKEFPDYGLTFSIGGQISFDVFPAGWDKTYCLQHVEKDGFKEIHFFGDKTMVGGNDYEIFVDERTIGHSVQSPDDTVKILTELFNL

SEQ ID NO: 1365 - protein, 287 aa, Saccharomyces cerevisiae
  strain ATCC 204508 / S288c
MTYTTRQIGAKNTLEYKVYIEKDGKPVSAFHDIPLYADKENNIFNMVVEIPRWTNAKLEITKEETLNPIIQDTKKGKLRFVRNCFPHHGYIHNYGAFPQTWEDPNVSHPETKAVGDNDPIDVLEIGETIAYTGQVKQVKALGIMALLDEGETDWKVIAIDINDPLAPKLNDIEDVEKYFPGLLRATNEWFRIYKIPDGKPENQFAFSGEAKNKKYALDIIKETHDSWKQLIAGKSSDSKGIDLTNVTLPDTPTYSKAASDAIPPASPKADAPIDKSIDKWFFISGSV

SEQ ID NO: 1366 - protein, 318 aa, Saccharomyces cerevisiae
  strain ATCC 204508 / S288c
MSSNAQVKTPLPPAPAPKKESNFLIDFLMGGVSAAVAKTAASPIERVKLLIQNQDEMLKQGTLDRKYAGILDCFKRTATQEGVISFWRGNTANVIRYFPTQALNFAFKDKIKAMFGFKKEEGYAKWFAGNLASGGAAGALSLLFVYSLDYARTRLAADSKSSKKGGARQFNGLIDVYKKTLKSDGVAGLYRGFLPSVVGIVVYRGLYFGMYDSLKPLLLTGSLEGSFLASFLLGWVVTTGASTCSYPLDTVRRRMMMTSGQAVKYDGAFDCLRKIVAAEGVGSLFKGCGANILRGVAGAGVISMYDQLQMILFGKKFK

SEQ ID NO: 1367 - protein, 297 aa, Saccharomyces cerevisiae
  strain ATCC 204508 / S288c
MAFQKDAKSSAYSSRFQTPFRRRREGKTDYYQRKRLVTQHKAKYNTPKYRLVVRFTNKDIICQIISSTITGDVVLAAAYSHELPRYGITHGLTNWAAAYATGLLIARRTLQKLGLDETYKGVEEVEGEYELTEAVEDGPRPFKVFLDIGLQRTTTGARVFGALKGASDGGLYVPHSENRFPGWDFETEEIDPELLRSYIFGGHVSQYMEELADDDEERFSELFKGYLADDIDADSLEDIYTSAHEAIRADPAFKPTEKKFTKEQYAAESKKYRQTKLSKEERAARVAAKIAALAGQQ

SEQ ID NO: 1368 - protein, 334 aa, Saccharomyces cerevisiae
  strain ATCC 204508 / S288c
MLSRVAKRAFSSTVANPYKVTVLGAGGGIGQPLSLLLKLNHKVTDLRLYDLKGAKGVATDLSHIPTNSVVKGFTPEEPDGLNNALKDTDMVLIPAGVPRKPGMTRDDLFAINASIVRDLAAATAESAPNAAILVISNPVNSTVPIVAQVLKNKGVYNPKKLFGVTTLDSIRAARFISEVENTDPTQERVNVIGGHSGITIIPLISQTNHKLMSDDKRHELIHRIQFGGDEVVKAKNGAGSATLSMAHAGAKFANAVLSGFKGERDVIEPSFVDSPLFKSEGIEFFASPVTLGPDGIEKIHPIGELSSEEEEMLQKCKETLKKNIEKGVNFVASK

SEQ ID NO: 1369 - protein, 368 aa, Saccharomyces cerevisiae
  strain ATCC 204508 / S288c
MLSAARLQFAQGSVRRLTVSARDAPTKISTLAVKVHGGSRYATKDGVAHLLNRFNFQNTNTRSALKLVRESELLGGTFKSTLDREYITLKATFLKDDLPYYVNALADVLYKTAFKPHELTESVLPAARYDYAVAEQCPVKSAEDQLYAITFRKGLGNPLLYDGVERVSLQDIKDFADKVYTKENLEVSGENVVEADLKRFVDESLLSTLPAGKSLVSKSEPKFFLGEENRVRFIGDSVAAIGIPVNKASLAQYEVLANYLTSALSELSGLISSAKLDKFTDGGLFTLFVRDQDSAVVSSNIKKIVADLKKGKDLSPAINYTKLKNAVQNESVSSPIELNFDAVKDFKLGKFNYVAVGDVSNLPYLDEL

SEQ ID NO: 1370 - protein, 394 aa, Saccharomyces cerevisiae
  strain ATCC 204508 / S288c
MTLQESDKFATKAIHAGEHVDVHGSVIEPISLSTTFKQSSPANPIGTYEYSRSQNPNRENLERAVAALENAQYGLAFSSGSATTATILQSLPQGSHAVSIGDVYGGTHRYFTKVANAHGVETSFTNDLLNDLPQLIKENTKLVWIETPTNPTLKVTDIQKVADLIKKHAAGQDVILVVDNTFLSPYISNPLNFGADIVVHSATKYINGHSDVVLGVLATNNKPLYERLQFLQNAIGAIPSPFDAWLTHRGLKTLHLRVRQAALSANKIAEFLAADKENVVAVNYPGLKTHPNYDVVLKQHRDALGGGMISFRIKGGAEAASKFASSTRLFTLAESLGGIESLLEVPAVMTHGGIPKEAREASGVFDDLVRISVGIEDTDDLLEDIKQALKQATN

SEQ ID NO: 1371 - protein, 446 aa, Saccharomyces cerevisiae
  strain ATCC 204508 / S288c
MGKNVLLLGSGFVAQPVIDTLAANDDINVTVACRTLANAQALAKPSGSKAISLDVTDDSALDKVLADNDVVISLIPYTFHPNVVKSAIRTKTDVVTSSYISPALRELEPEIVKAGITVMNEIGLDPGIDHLYAVKTIDEVHRAGGKLKSFLSYCGGLPAPEDSDNPLGYKFSWSSRGVLLALRNSAKYWKDGKIETVSSEDLMATAKPYFIYPGYAFVCYPNRDSTLFKDLYHIPEAETVIRGTLRYQGFPEFVKALVDMGMLKDDANEIFSKPIAWNEALKQYLGAKSTSKEDLIASIDSKATWKDDEDRERILSGFAWLGLFSDAKITPRGNALDTLCARLEELMQYEDNERDMVVLQHKFGIEWADGTTETRTSTLVDYGKVGGYSSMAATVGYPVAIATKFVLDGTIKGPGLLAPYSPEINDPIMKELKDKYGIYLKEKTVA

SEQ ID NO: 1372 - protein, 457 aa, Saccharomyces cerevisiae
  strain ATCC 204508 / S288c
MLRTVTSKTVSNQFKRSLATAVATPKAEVTQLSNGIVVATEHNPSAHTASVGVVFGSGAANENPYNNGVSNLWKNIFLSKENSAVAAKEGLALSSNISRDFQSYIVSSLPGSTDKSLDFLNQSFIQQKANLLSSSNFEATKKSVLKQVQDFEENDHPNRVLEHLHSTAFQNTPLSLPTRGTLESLENLVVADLESFANNHFLNSNAVVVGTGNIKHEDLVNSIESKNLSLQTGTKPVLKKKAAFLGSEVRLRDDTLPKAWISLAVEGEPVNSPNYFVAKLAAQIFGSYNAFEPASRLQGIKLLDNIQEYQLCDNFNHFSLSYKDSGLWGFSTATRNVTMIDDLIHFTLKQWNRLTISVTDTEVERAKSLLKLQLGQLYESGNPVNDANLLGAEVLIKGSKLSLGEAFKKIDAITVKDVKAWAGKRLWDQDIAIAGTGQIEGLLDYMRIRSDMSMMRW

SEQ ID NO: 1373 - protein, 492 aa, Saccharomyces cerevisiae
  strain ATCC 204508 / S288c
MSKAVGDLGLVGLAVMGQNLILNAADHGFTVVAYNRTQSKVDRFLANEAKGKSIIGATSIEDLVAKLKKPRKIMLLIKAGAPVDTLIKELVPHLDKGDIIIDGGNSHFPDTNRRYEELTKQGILFVGSGVSGGEDGARFGPSLMPGGSAEAWPHIKNIFQSIAAKSNGEPCCEWVGPAGSGHYVKMVHNGIEYGDMQLICEAYDIMKRIGRFTDKEISEVFDKWNTGVLDSFLIEITRDILKFDDVDGKPLVEKIMDTAGQKGTGKWTAINALDLGMPVTLIGEAVFARCLSAIKDERKRASKLLAGPTVPKDAIHDREQFVYDLEQALYASKIISYAQGFMLIREAARSYGWKLNNPAIALMWRGGCIIRSVFLAEITKAYRDDPDLENLLFNEFFASAVTKAQSGWRRTIALAATYGIPTPAFSTALAFYDGYRSERLPANLLQAQRDYFGAHTFRILPECASAHLPVDKDIHINWTGHGGNISSSTYQA

SEQ ID NO: 1374 - protein, 500 aa, Saccharomyces cerevisiae
  strain ATCC 204508 / S288c
MTKLHFDTAEPVKITLPNGLTYEQPTGLFINNKFMKAQDGKTYPVEDPSTENTVCEVSSATTEDVEYAIECADRAFHDTEWATQDPRERGRLLSKLADELESQIDLVSSIEALDNGKTLALARGDVTIAINCLRDAAAYADKVNGRTINTGDGYMNFTTLEPIGVCGQIIPWNFPIMMLAWKIAPALAMGNVCILKPAAVTPLNALYFASLCKKVGIPAGVVNIVPGPGRTVGAALTNDPRIRKLAFTGSTEVGKSVAVDSSESNLKKITLELGGKSAHLVFDDANIKKTLPNLVNGIFKNAGQICSSGSRIYVQEGIYDELLAAFKAYLETEIKVGNPFDKANFQGAITNRQQFDTIMNYIDIGKKEGAKILTGGEKVGDKGYFIRPTVFYDVNEDMRIVKEEIFGPVVTVAKFKTLEEGVEMANSSEFGLGSGIETESLSTGLKVAKMLKAGTVWINTYNDFDSRVPFGGVKQSGYGREMGEEVYHAYTEVKAVRIKL

SEQ ID NO: 1375 - protein, 499 aa, Saccharomyces cerevisiae
  strain ATCC 204508 / S288c
MSTKKHTKTHSTYAFESNTNSVAASQMRNALNKLADSSKLDDAARAKFENELDSFFTLFRRYLVEKSSRTTLEWDKIKSPNPDEVVKYEIISQQPENVSNLSKLAVLKLNGGLGTSMGCVGPKSVIEVREGNTFLDLSVRQIEYLNRQYDSDVPLLLMNSFNTDKDTEHLIKKYSANRIRIRSFNQSRFPRVYKDSLLPVPTEYDSPLDAWYPPGHGDLFESLHVSGELDALIAQGREILFVSNGDNLGATVDLKILNHMIETGAEYIMELTDKTRADVKGGTLISYDGQVRLLEVAQVPKEHIDEFKNIRKFTNFNTNNLWINLKAVKRLIESSNLEMEIIPNQKTITRDGHEINVLQLETACGAAIRHFDGAHGVVVPRSRFLPVKTCSDLLLVKSDLFRLEHGSLKLDPSRFGPNPLIKLGSHFKKVSGFNARIPHIPKIVELDHLTITGNVFLGKDVTLRGTVIIVCSDGHKIDIPNGSILENVVVTGNLQILEH

SEQ ID NO: 1376 - protein, 649 aa, Saccharomyces cerevisiae
  strain ATCC 204508 / S288c
MFSVTRRRAAGAAAAMATATGTLYWMTSQGDRPLVHNDPSYMVQFPTAAPPQVSRRDLLDRLAKTHQFDVLIIGGGATGTGCALDAATRGLNVALVEKGDFASGTSSKSTKMIHGGVRYLEKAFWEFSKAQLDLVIEALNERKHLINTAPHLCTVLPILIPIYSTWQVPYIYMGCKFYDFFAGSQNLKKSYLLSKSATVEKAPMLTTDNLKASLVYHDGSFNDSRLNATLAITAVENGATVLNYVEVQKLIKDPTSGKVIGAEARDVETNELVRINAKCVVNATGPYSDAILQMDRNPSGLPDSPLNDNSKIKSTFNQIAVMDPKMVIPSIGVHIVLPSFYCPKDMGLLDVRTSDGRVMFFLPWQGKVLAGTTDIPLKQVPENPMPTEADIQDILKELQHYIEFPVKREDVLSAWAGVRPLVRDPRTIPADGKKGSATQGVVRSHFLFTSDNGLITIAGGKWTTYRQMAEETVDKVVEVGGFHNLKPCHTRDIKLAGAEEWTQNYVALLAQNYHLSSKMSNYLVQNYGTRSSIICEFFKESMENKLPLSLADKENNVIYSSEENNLVNFDTFRYPFTIGELKYSMQYEYCRTPLDFLLRRTRFAFLDAKEALNAVHATVKVMGDEFNWSEKKRQWELEKTVNFIKTFGV

SEQ ID NO: 1377 - protein, 1887 aa, Saccharomyces cerevisiae
  strain ATCC 204508 / S288c
MKPEVEQELAHILLTELLAYQFASPVRWIETQDVFLKDFNTERVVEIGPSPTLAGMAQRTLKNKYESYDAALSLHREILCYSKDAKEIYYTPDPSELAAKEEPAKEEAPAPTPAASAPAPAAAAPAPVAAAAPAAAAAEIADEPVKASLLLHVLVAHKLKKSLDSIPMSKTIKDLVGGKSTVQNEILGDLGKEFGTTPEKPEETPLEELAETFQDTFSGALGKQSSSLLSRLISSKMPGGFTITVARKYLQTRWGLPSGRQDGVLLVALSNEPAARLGSEADAKAFLDSMAQKYASIVGVDLSSAASASGAAGAGAAAGAAMIDAGALEEITKDHKVLARQQLQVLARYLKMDLDNGERKFLKEKDTVAELQAQLDYLNAELGEFFVNGVATSFSRKKARTFDSSWNWAKQSLLSLYFEIIHGVLKNVDREVVSEAINIMNRSNDALIKFMEYHISNTDETKGENYQLVKTLGEQLIENCKQVLDVDPVYKDVAKPTGPKTAIDKNGNITYSEEPREKVRKLSQYVQEMALGGPITKESQPTIEEDLTRVYKAISAQADKQDISSSTRVEFEKLYSDLMKFLESSKEIDPSQTTQLAGMDVEDALDKDSTKEVASLPNKSTISKTVSSTIPRETIPFLHLRKKTPAGDWKYDRQLSSLFLDGLEKAAFNGVTFKDKYVLITGAGKGSIGAEVLQGLLQGGAKVVVTTSRFSKQVTDYYQSIYAKYGAKGSTLIVVPFNQGSKQDVEALIEFIYDTEKNGGLGWDLDAIIPFAAIPEQGIELEHIDSKSEFAHRIMLTNILRMMGCVKKQKSARGIETRPAQVILPMSPNHGTFGGDGMYSESKLSLETLFNRWHSESWANQLTVCGAIIGWTRGTGLMSANNIIAEGIEKMGVRTFSQKEMAFNLLGLLTPEVVELCQKSPVMADLNGGLQFVPELKEFTAKLRKELVETSEVRKAVSIETALEHKVVNGNSADAAYAQVEIQPRANIQLDFPELKPYKQVKQIAPAELEGLLDLERVIVVTGFAEVGPWGSARTRWEMEAFGEFSLEGCVEMAWIMGFISYHNGNLKGRPYTGWVDSKTKEPVDDKDVKAKYETSILEHSGIRLIEPELFNGYNPEKKEMIQEVIVEEDLEPFEASKETAEQFKHQHGDKVDIFEIPETGEYSVKLLKGATLYIPKALRFDRLVAGQIPTGWNAKTYGISDDIISQVDPITLFVLVSVVEAFIASGITDPYEMYKYVHVSEVGNCSGSGMGGVSALRGMFKDRFKDEPVQNDILQESFINTMSAWVNMLLISSSGPIKTPVGACATSVESVDIGVETILSGKARICIVGGYDDFQEEGSFEFGNMKATSNTLEEFEHGRTPAEMSRPATTTRNGFMEAQGAGIQIIMQADLALKMGVPIYGIVAMAATATDKIGRSVPAPGKGILTTAREHHSSVKYASPNLNMKYRKRQLVTREAQIKDWVENELEALKLEAEEIPSEDQNEFLLERTREIHNEAESQLRAAQQQWGNDFYKRDPRIAPLRGALATYGLTIDDLGVASFHGTSTKANDKNESATINEMMKHLGRSEGNPVIGVFQKFLTGHPKGAAGAWMMNGALQILNSGIIPGNRNADNVDKILEQFEYVLYPSKTLKTDGVRAVSITSFGFGQKGGQAIVVHPDYLYGAITEDRYNEYVAKVSAREKSAYKFFHNGMIYNKLFVSKEHAPYTDELEEDVYLDPLARVSKDKKSGSLTFNSKNIQSKDSYINANTIETAKMIENMTKEKVSNGGVGVDVELITSINVENDTFIERNFTPQEIEYCSAQPSVQSSFAGTWSAKEAVFKSLGVKSLGGGAALKDIEIVRVNKNAPAVELHGNAKKAAEEAGVTDVKVSISHDDLQAVAVAVSTKK

SEQ ID NO: 1378 - protein, 82 aa, Saccharomyces cerevisiae; identical to SEQ ID NO: 528
  strain ATCC 204508 / S288c

SEQ ID NO: 1379 - protein, 135 aa, Saccharomyces cerevisiae
  strain ATCC 204508 / S288c
MSDAVTIRTRKVISNPLLARKQFVVDVLHPNRANVSKDELREKLAEVYKAEKDAVSVFGFRTQFGGGKSVGFGLVYNSVAEAKKFEPTYRLVRYGLAEKVEKASRQQRKQKKNRDKKIFGTGKRLAKKVARRNAD

SEQ ID NO: 1380 - protein, 130 aa, Saccharomyces cerevisiae
  strain ATCC 204508 / S288c
MTRSSVLADALNAINNAEKTGKRQVLIRPSSKVIIKFLQVMQKHGYIGEFEYIDDHRSGKIVVQLNGRLNKCGVISPRFNVKIGDIEKWTANLLPARQFGYVILTTSAGIMDHEEARRKHVSGKILGFVY

SEQ ID NO: 1381 - protein, 138 aa, Saccharomyces cerevisiae
  strain ATCC 204508 / S288c
MANDLVQARDNSQVFGVARIYASFNDTFVHVTDLSGKETIARVTGGMKVKADRDESSPYAAMLAAQDVAAKCKEVGITAVHVKIRATGGTRTKTPGPGGQAALRALARSGLRIGRIEDVTPVPSDSTRKKGGRRGRRL

SEQ ID NO: 1382 - protein, 153 aa, Saccharomyces cerevisiae
  strain ATCC 204508 / S288c
MSSQTERTFIAVKPDGVQRGLVSQILSRFEKKGYKLVAIKLVKADDKLLEQHYAEHVGKPFFPKMVSFMKSGPILATVWEGKDVVRQGRTILGATNPLGSAPGTIRGDFGIDLGRNVCHGSDSVDSAEREINLWFKKEELVDWESNQAKWIYE

SEQ ID NO: 1383 - protein, 160 aa, Saccharomyces cerevisiae
  strain ATCC 204508 / S288c
MGKSHGYRSRTRYMFQRDFRKHGAVHLSTYLKVYKVGDIVDIKANGSIQKGMPHKFYQGKTGVVYNVTKSSVGVIINKMVGNRYLEKRLNLRVEHIKHSKCRQEFLERVKANAAKRAEAKAQGVAVQLKRQPAQPRESRIVSTEGNVPQTLAPVPYETFI

SEQ ID NO: 1384 - protein, 199 aa, Saccharomyces cerevisiae
  strain ATCC 204508 / S288c
MSANEFYSSGQQGQYNQQNNQERTGAPNNGQYGADNGNPNGERGLFSTIVGGSAGAYAGSKVSNNHSKLSGVLGAIGGAFLANKISDERKEHKQQEQYGNSNFGGAPQGGHNNHHRQDNNNNNGGFGGPGGPGGQGFGRQGPQGFGGPGPQEFGGPGGQGFGGPNPQEFGGPGGQGFGGPNPQEFGGQGRQGFNGGSRW

SEQ ID NO: 1385 - protein, 195 aa, Saccharomyces cerevisiae
  strain ATCC 204508 / S288c
MPRAPRTYSKTYSTPKRPYESSRLDAELKLAGEFGLKNKREIYRISFQLSKIRRAARDLLTRDEKDPKRLFEGNALIRRLVRVGVLSEDKKKLDYVLALKVEDFLERRLQTQVYKLGLAKSVHHARVLITQRHIAVGKQIVNIPSFMVRLDSEKHIDFAPTSPFGGARPGRVARRNAARKAEASGEAAEEAEDEE

SEQ ID NO: 1386 - protein, 215 aa, Saccharomyces cerevisiae
  strain ATCC 204508 / S288c
MLGIRSSVKTCFKPMSLTSKRLISQSLLASKSTYRTPNFDDVLKENNDADKGRSYAYFMVGAMGLLSSAGAKSTVETFISSMTATADVLAMAKVEVNLAAIPLGKNVVVKWQGKPVFIRHRTPHEIQEANSVDMSALKDPQTDADRVKDPQWLIMLGICTHLGCVPIGEAGDFGGWFCPCHGSHYDISGRIRKGPAPLNLEIPAYEFDGDKVIVG

SEQ ID NO: 1387 - protein, 237 aa, Saccharomyces cerevisiae
  strain ATCC 204508 / S288c
MAPKKVLLALTSYNDVFYSDGAKTGVFVVEALHPFNTFRKEGFEVDFVSETGKFGWDEHSLAKDFLNGQDETDFKNKDSDFNKTLAKIKTPKEVNADDYQIFFASAGHGTLFDYPKAKDLQDIASEIYANGGVVAAVCHGPAIFDGLTDKKTGRPLIEGKSITGFTDVGETILGVDSILKAKNLATVEDVAKKYGAKYLAPVGPWDDYSITDGRLVTGVNPASAHSTAVRSIDALKN

SEQ ID NO: 1388 - protein, 273 aa, Saccharomyces cerevisiae; identical to SEQ ID NO: 609
  strain ATCC 204508 / S288c

SEQ ID NO: 1389 - protein, 302 aa, Saccharomyces cerevisiae
  strain ATCC 204508 / S288c
MFSRLSRSHSKALPIALGTVAIAAATAFYFANRNQHSFVFNESNKVFKGDDKWIDLPISKIEEESHDTRRFTFKLPTEDSEMGLVLASALFAKFVTPKGSNVVRPYTPVSDLSQKGHFQLVVKHYEGGKMTSHLFGLKPNDTVSFKGPIMKWKWQPNQFKSITLLGAGTGINPLYQLAHHIVENPNDKTKVNLLYGNKTPQDILLRKELDALKEKYPDKFNVTYFVDDKQDDQDFDGEISFISKDFIQEHVPGPKESTHLFVCGPPPFMNAYSGEKKSPKDQGELIGILNNLGYSKDQVFKF

SEQ ID NO: 1390 - protein, 333 aa, Saccharomyces cerevisiae
  strain ATCC 204508 / S288c
MSEPSEKKQKVATSSLEQLKKAGTHVVADSGDFEAISKYEPQDSTTNPSLILAASKLEKYARFIDAAVEYGRKHGKTDHEKIENAMDKILVEFGTQILKVVPGRVSTEVDARLSFDKKATVKKALHIIKLYKDAGVPKERVLIKIASTWEGIQAARELEVKHGIHCNMTLLFSFTQAVACAEANVTLISPFVGRIMDFYKALSGKDYTAETDPGVLSVKKIYSYYKRHGYATEVMAASFRNLDELKALAGIDNMTLPLNLLEQLYESTDPIENKLNSESAKEEGVEKVSFINDEPHFRYVLNEDQMATEKLSDGIRKFSADIEALYKLVEEKM

SEQ ID NO: 1391 - protein, 385 aa, Saccharomyces cerevisiae
  strain ATCC 204508 / S288c
MTKSVDTLLIPGPIILSGAVQKALDVPSLGHTSPEFVSIFQRVLKNTRAVFKSAAASKSQPFVLAGSGTLGWDIFASNFILSKAPNKNVLVVSTGTFSDRFADCLRSYGAQVDVVRPLKIGESVPLELITEKLSQNSYGAVTVTHVDTSTAVLSDLKAISQAIKQTSPETFFVVDAVCSIGCEEFEFDEWGVDFALTASQKAIGAPAGLSISLCSSRFMDYALNDSKNGHVHGYFSSLRRWTPIMENYEAGKGAYFATPPVQLINSLDVALKEILEEGLHKRWDLHREMSDWFKDSLVNGLQLTSVSRYPSNMSAHGLTAVYVADPPDVIAFLKSHGVVIAGGIHKDIGPKYIRIGHMGVTACNKNLPYMKNCFDLIKLALQRKK

SEQ ID NO: 1392 - protein, 398 aa, Saccharomyces cerevisiae
  strain ATCC 204508 / S288c
MSQNVYIVSTARTPIGSFQGSLSSKTAVELGAVALKGALAKVPELDASKDFDEIIFGNVLSANLGQAPARQVALAAGLSNHIVASTVNKVCASAMKAIILGAQSIKCGNADVVVAGGCESMTNAPYYMPAARAGAKFGQTVLVDGVERDGLNDAYDGLAMGVHAEKCARDWDITREQQDNFAIESYQKSQKSQKEGKFDNEIVPVTIKGFRGKPDTQVTKDEEPARLHVEKLRSARTVFQKENGTVTAANASPINDGAAAVILVSEKVLKEKNLKPLAIIKGWGEAAHQPADFTWAPSLAVPKALKHAGIEDINSVDYFEFNEAFSVVGLVNTKILKLDPSKVNVYGGAVALGHPLGCSGARVVVTLLSILQQEGGKIGVAAICNGGGGASSIVIEKI

SEQ ID NO: 1393 - protein, 491 aa, Saccharomyces cerevisiae
  strain ATCC 204508 / S288c
MKLSTKLCWCGIKGRLRPQKQQQLHNTNLQMTELKKQKTAEQKTRPQNVGIKGIQIYIPTQCVNQSELEKFDGVSQGKYTIGLGQTNMSFVNDREDIYSMSLTVLSKLIKSYNIDTNKIGRLEVGTETLIDKSKSVKSVLMQLFGENTDVEGIDTLNACYGGTNALFNSLNWIESNAWDGRDAIVVCGDIAIYDKGAARPTGGAGTVAMWIGPDAPIVFDSVRASYMEHAYDFYKPDFTSEYPYVDGHFSLTCYVKALDQVYKSYSKKAISKGLVSDPAGSDALNVLKYFDYNVFHVPTCKLVTKSYGRLLYNDFRANPQLFPEVDAELATRDYDESLTDKNIEKTFVNVAKPFHKERVAQSLIVPTNTGNMYTASVYAAFASLLNYVGSDDLQGKRVGLFSYGSGLAASLYSCKIVGDVQHIIKELDITNKLAKRITETPKDYEAAIELRENAHLKKNFKPQGSIEHLQSGVYYLTNIDDKFRRSYDVKK

SEQ ID NO: 1394 - protein, 585 aa, Saccharomyces cerevisiae
  strain ATCC 204508 / S288c
MLHRHGSKQKNFENIAGKVVHDLAGLQLLSNDVQKSAVQSGHQGSNNMRDTSSQGMANKYSVPKKGLPADLSYQLIHNELTLDGNPHLNLASFVNTFTTDQARKLIDENLTKNLADNDEYPQLIELTQRCISMLAQLWHANPDEEPIGCATTGSSEAIMLGGLAMKKRWEHRMKNAGKDASKPNIIMSSACQVALEKFTRYFEVECRLVPVSHRSHHMLDPESLWDYVDENTIGCFVILGTTYTGHLENVEKVADVLSQIEAKHPDWSNTDIPIHADGASGGFIIPFGFEKEHMKAYGMERWGFNHPRVVSMNTSGHKFGLTTPGLGWVLWRDESLLADELRFKLKYLGGVEETFGLNFSRPGFQVVHQYFNFVSLGHSGYRTQFQNSLFVARAFSFELLNSSKLPGCFEIVSSIHESIENDSAPKSVKDYWEHPQAYKPGVPLVAFKLSKKFHEEYPEVPQAILSSLLRGRGWIIPNYPLPKATDGSDEKEVLRVVFRSEMKLDLAQLLIVDIESILTKLIHSYEKVCHHIELASEQTPERKSSFIYEMLLALASPQDDIPTPDEIEKKNKLKETTTRNYRGTC

SEQ ID NO: 1395 - protein, 713 aa, Saccharomyces cerevisiae
  strain ATCC 204508 / S288c
MSPSAVQSSKLEEQSSEIDKLKAKMSQSAATAQQKKEHEYEHLTSVKIVPQRPISDRLQPAIATHYSPHLDGLQDYQRLHKESIEDPAKFFGSKATQFLNWSKPFDKVFIPDPKTGRPSFQNNAWFLNGQLNACYNCVDRHALKTPNKKAIIFEGDEPGQGYSITYKELLEEVCQVAQVLTYSMGVRKGDTVAVYMPMVPEAIITLLAISRIGAIHSVVFAGFSSNSLRDRINDGDSKVVITTDESNRGGKVIETKRIVDDALRETPGVRHVLVYRKTNNPSVAFHAPRDLDWATEKKKYKTYYPCTPVDSEDPLFLLYTSGSTGAPKGVQHSTAGYLLGALLTMRYTFDTHQEDVFFTAGDIGWITGHTYVVYGPLLYGCATLVFEGTPAYPNYSRYWDIIDEHKVTQFYVAPTALRLLKRAGDSYIENHSLKSLRCLGSVGEPIAAEVWEWYSEKIGKNEIPIVDTYWQTESGSHLVTPLAGGVTPMKPGSASFPFFGIDAVVLDPNTGEELNTSHAEGVLAVKAAWPSFARTIWKNHDRYLDTYLNPYPGYYFTGDGAAKDKDGYIWILGRVDDVVNVSGHRLSTAEIEAAIIEDPIVAECAVVGFNDDLTGQAVAAFVVLKNKSSWSTATDDELQDIKKHLVFTVRKDIGPFAAPKLIILVDDLPKTRSGKIMRRILRKILAGESDQLGDVSTLSNPGIVRHLIDSVKL

SEQ ID NO: 1396 - protein, 835 aa, Saccharomyces cerevisiae
  strain ATCC 204508 / S288c
MGEEHKPLLDASGVDPREEDKTATAILRRKKKDNMLLVDDAINDDNSVIAINSNTMDKLELFRGDTVLVKGKKRKDTVLIVLIDDELEDGACRINRVVRNNLRIRLGDLVTIHPCPDIKYATRISVLPIADTIEGITGNLFDVFLKPYFVEAYRPVRKGDHFVVRGGMRQVEFKVVDVEPEEYAVVAQDTIIHWEGEPINREDEENNMNEVGYDDIGGCRKQMAQIREMVELPLRHPQLFKAIGIKPPRGVLMYGPPGTGKTLMARAVANETGAFFFLINGPEVMSKMAGESESNLRKAFEEAEKNAPAIIFIDEIDSIAPKRDKTNGEVERRVVSQLLTLMDGMKARSNVVVIAATNRPNSIDPALRRFGRFDREVDIGIPDATGRLEVLRIHTKNMKLADDVDLEALAAETHGYVGADIASLCSEAAMQQIREKMDLIDLDEDEIDAEVLDSLGVTMDNFRFALGNSNPSALRETVVESVNVTWDDVGGLDEIKEELKETVEYPVLHPDQYTKFGLSPSKGVLFYGPPGTGKTLLAKAVATEVSANFISVKGPELLSMWYGESESNIRDIFDKARAAAPTVVFLDELDSIAKARGGSLGDAGGASDRVVNQLLTEMDGMNAKKNVFVIGATNRPDQIDPAILRPGRLDQLIYVPLPDENARLSILNAQLRKTPLEPGLELTAIAKATQGFSGADLLYIVQRAAKYAIKDSIEAHRQHEAEKEVKVEGEDVEMTDEGAKAEQEPEVDPVPYITKEHFAEAMKTAKRSVSDAELRRYEAYSQQMKASRGQFSNFNFNDAPLGTTATDNANSNNSAPSGAGAAFGSNAEEDDDLYS

SEQ ID NO: 1397 - protein, 843 aa, Saccharomyces cerevisiae [sequence omitted]

SEQ ID NO: 1398 - protein, 1098 aa, Saccharomyces cerevisiae
  strain ATCC 204508 / S288c
MALIVASLFLPYQPQFELDTSLPENSQVDSSLVNIQAMANDQQQQRALSNNISQESLVAPAPEQGVPPAISRSATRSPSAFNRASSTTNTATLDDLVSSDIFMENLTANATTSHTPTSKTMLKPRKNGSVERFFSPSSNIPTDRIASPIQHEHDSGSRIASPIQQQQQDPTTNLLKNVNKSLLVHSLLNNTSQTSLEGPNNHIVTPKSRAGNRPTSAATSLVNRTKQGSASSGSSGSSAPPSIKRITPHLTASAAKQRPLLAKQPSNLKYSELADISSSETSSQHNESDPDDLTTAPDEEYVSDLEMDDAKQDYKVPKFGGYSNKSKLKKYALLRSSQELFSRLPWSIVPSIKGNGAMKNAINTAVLENIIPHRHVKWVGTVGIPTDEIPENILANISDSLKDKYDSYPVLTDDDTFKAAYKNYCKQILWPTLHYQIPDNPNSKAFEDHSWKFYRNLNQRFADAIVKIYKKGDTIWIHDYHLMLVPQMVRDVLPFAKIGFTLHVSFPSSEVFRCLAQREKILEGLTGADFVGFQTREYARHFLQTSNRLLMADVVHDEELKYNGRVVSVRFTPVGIDAFDLQSQLKDGSVMQWRQLIRERWQGKKLIVCRDQFDRIRGIHKKLLAYEKFLVENPEYVEKSTLIQICIGSSKDVELERQIMIVVDRINSLSTNISISQPVVFLHQDLDFSQYLALSSEADLFVVSSLREGMNLTCHEFIVCSEDKNAPLLLSEFTGSASLLNDGAIIINPWDTKNFSQAILKGLEMPFDKRRPQWKKLMKDIINNDSTNWIKTSLQDIHISWQFNQEGSKIFKLNTKTLMEDYQSSKKRMFVFNIAEPPSSRMISILNDMTSKGNIVYIMNSFPKPILENLYSRVQNIGLIAENGAYVSLNGVWYNIVDQVDWRNDVAKILEDKVERLPGSYYKINESMIKFHTENAEDQDRVASVIGDAITHINTVFDHRGIHAYVYKNVVSVQQVGLSLSAAQFLFRFYNSASDPLDTSSGQITNIQTPSQQNPSDQEQQPPASPTVSMNHIDFACVSGSSSPVLEPLFKLVNDEASEGQVKAGHAIVYGDATSTYAKEHVNGLNELFTIISRIIED

SEQ ID NO: 1399 - protein, 2214 aa, Saccharomyces cerevisiae
  strain ATCC 204508 / S288c
MATIAPTAPITPPMESTGDRLVTLELKDGTVLQGYSFGAEKSVAGELVFQTGMVGYPESVTDPSYEGQILVITYPLVGNYGVPDMHLRDELVEELPRYFESNRIHIAGLVISHYTDEYSHYLAKSSLGKWLQNEGIPAVYGVDTRSLTKHLRDAGSMLGRLSLEKSGSDRTISRSSSWRSAFDVPEWVDPNVQNLVSKVSINEPKLYVPPADNKHIELQTGPDGKVLRILAIDVGMKYNQIRCFIKRGVELKVVPWNYDFTKEDYDGLFISNGPGDPSVLDDLSQRLSNVLEAKKTPVFGICLGHQLIARAAGASTLKLKFGNRGHNIPCTSTISGRCYITSQNHGFAVDVDTLTSGWKPLFVNANDDSNEGIYHSELPYFSVQFHPESTPGPRDTEFLFDVFIQAVKEFKYTQVLKPIAFPGGLLEDNVKAHPRIEAKKVLVLGSGGLSIGQAGEFDYSGSQAIKALKEEGIYTILINPNIATIQTSKGLADKVYFVPVTAEFVRKVILHERPDAIYVTFGGQTALSVGIAMKDEFEALGVKVLGTPIDTIITTEDRELFSNAIDEINEKCAKSQAANSVDEALAAVKEIGFPVIVRAAYALGGLGSGFANNEKELVDLCNVAFSSSPQVLVEKSMKGWKEVEYEVVRDAFDNCITVCNMENFDPLGIHTGDSIVVAPSQTLSDEDYNMLRTTAVNVIRHLGVVGECNIQYALNPVSKDYCIIEVNARLSRSSALASKATGYPLAYTAAKLGLNIPLNEVKNSVTKSTCACFEPSLDYCVVKMPRWDLKKFTRVSTELSSSMKSVGEVMSIGRTFEEAIQKAIRSTEYANLGFNETDLDIDIDYELNNPTDMRVFAIANAFAKKGYSVDKVWEMTRIDKWFLNKLHDLVQFAEKISSFGTKEELPSLVLRQAKQLGFDDRQIARFLDSNEVAIRRLRKEYGITPFVKQIDTVAAEFPAYTNYLYMTYNADSHDLSFDDHGVMVLGSGVYRIGSSVEFDWCAVTAVRTLRANNIKTIMVNYNPETVSTDYDEADRLYFETINLERVLDIYEIENSSGVVVSMGGQTSNNIAMTLHRENVKILGTSPDMIDSAENRYKFSRMLDQIGVDQPAWKELTSMDEAESFAEKVGYPVLVRPSYVLSGAAMNTVYSKNDLESYLNQAVEVSRDYPVVITKYIENAKEIEMDAVARNGELVMHVVSEHVENAGVHSGDATLIVPPQDLAPETVDRIVVATAKIGKALKITGPYNIQFIAKDNEIKVIECNVRASRSFPFISKVVGVNLIELATKAIMGLPLTPYPVEKLPDDYVAVKVPQFSFPRLAGADPVLGVEMASTGEVATFGHSKYEAYLKSLLATGFKLPKKNILLSIGSYKEKQELLSSVQKLYNMGYKLFATSGTADFLSEHGIAVQYLEVLNKDDDDQKSEYSLTQHLANNEIDLYINLPSANRFRRPASYVSKGYKTRRLAVDYSVPLVTNVKCAKLLIEAISRNITLDVSERDAQTSHRTITLPGLINIATYVPNASHVIKGPAELKETTRLFLESGFTYCQLMPRSISGPVITDVASLKAANSVSQDSSYTDFSFTIAGTAHNAHSVTQSASKVTALFLPLRELKNKITAVAELLNQWPTEKQVIAEAKTADLASVLLLTSLQNRSIHITGVSNKEDLALIMTVKAKDPRVTCDVNIYSLFIAQDDYPEAVFLPTKEDQEFFWNNLDSIDAFSVGALPVALANVTGNKVDVGMGIKDSLPLLLAAVEEGKLTIDDIVLRLHDNPAKIFNIPTQDSVVEIDLDYSFRRNKRWSPFNKDMNGGIERVVYNGETLVLSGELVSPGAKGKCIVNPSPASITASAELQSTSAKRRFSITEEAIADNLDAAEDAIPEQPLEQKLMSSRPPRELVAPGAIQNLIRSNNPFRGRHILSIKQFKRSDFHVLFAVAQELRAAVAREGVLDLMKGHVITTIFFEPSTRTCSSFIAAMERLGGRIVNVNPLVSSVKKGETLQDTIRTLACYSDAIVMRHSEEMSVHIAAKYSPVPIINGGNGSREHPTQAFLDLFTIREEIGTVNGITVTFMGDLKHGRTVHSLCRLLMHYQVRINLVSPPELRLPEGLREELRKAGLLGVESIELTPHIISKTDVLYCTRVQEERFNSPEEYARLKDTYIVDNKILAHAKENMAIMHPLPRVNEIKEEVDYDHRAAYFRQMKYGLFVRMALLAMVMGVDM

SEQ ID NO: 1400 - protein, 85 aa, Saccharomyces cerevisiae; identical to SEQ ID NO: 641
  strain ATCC 204508 / S288c

SEQ ID NO: 1401 - protein, 83 aa, Saccharomyces cerevisiae; identical to SEQ ID NO: 642
  strain ATCC 204508 / S288c

SEQ ID NO: 1402 - protein, 111 aa, Saccharomyces cerevisiae; identical to SEQ ID NO: 632
  strain ATCC 204508 / S288c

SEQ ID NO: 1403 - protein, 127 aa, Saccharomyces cerevisiae
  strain ATCC 204508 / S288c
MAKQSLDVSSDRRKARKAYFTAPSSERRVLLSAPLSKELRAQYGIKALPIRRDDEVLVVRGSKKGQEGKISSVYRLKFAVQVDKVTKEKVNGASVPINLHPSKLVITKLHLDKDRKALIQRKGGKLE

SEQ ID NO: 1404 - protein, 136 aa, Saccharomyces cerevisiae
  strain ATCC 204508 / S288c
MGRVRTKTVKRASKALIERYYPKLTLDFQTNKRLCDEIATIQSKRLRNKIAGYTTHLMKRIQKGPVRGISFKLQEEERERKDQYVPEVSALDLSRSNGVLNVDNQTSDLVKSLGLKLPLSVINVSAQRDRRYRKRN

SEQ ID NO: 1405 - protein, 155 aa, Saccharomyces cerevisiae; identical to SEQ ID NO: 516
  strain ATCC 204508 / S288c

SEQ ID NO: 1406 - protein, 148 aa, Saccharomyces cerevisiae; identical to SEQ ID NO: 545
  strain ATCC 204508 / S288c

SEQ ID NO: 1407 - protein, 153 aa, Saccharomyces cerevisiae; identical to SEQ ID NO: 558
  strain ATCC 204508 / S288c

SEQ ID NO: 1408 - protein, 155 aa, Saccharomyces cerevisiae; identical to SEQ ID NO: 517
  strain ATCC 204508 / S288c

SEQ ID NO: 1409 - protein, 176 aa, Saccharomyces cerevisiae
  strain ATCC 204508 / S288c
MSDLVNKKFPAGDYKFQYIAISQSDADSESCKMPQTVEWSKLISENKKVIITGAPAAFSPTCTVSHIPGYINYLDELVKEKEVDQVIVVTVDNPFANQAWAKSLGVKDTTHIKFASDPGCAFTKSIGFELAVGDGVYWSGRWAMVVENGIVTYAAKETNPGTDVTVSSVESVLAHL

SEQ ID NO: 1410 - protein, 184 aa, Saccharomyces cerevisiae
  strain ATCC 204508 / S288c
MARYGATSTNPAKSASARGSYLRVSFKNTRETAQAINGWELTKAQKYLEQVLDHQRAIPFRRFNSSIGRTAQGKEFGVTKARWPAKSVKFVQGLLQNAAANAEAKGLDATKLYVSHIQVNQAPKQRRRTYRAHGRINKYESSPSHIELVVTEKEEAVAKAAEKKVVRLTSRQRGRIAAQKRIAA

SEQ ID NO: 1411 - protein, 186 aa, Saccharomyces cerevisiae
  strain ATCC 204508 / S288c
MGIDHTSKQHKRSGHRTAPKSDNVYLKLLVKLYTFLARRTDAPFNKVVLKALFLSKINRPPVSVSRIARALKQEGAANKTVVVVGTVTDDARIFEFPKTTVAALRFTAGARAKIVKAGGECITLDQLAVRAPKGQNTLILRGPRNSREAVRHFGMGPHKGKAPRILSTGRKFERARGRRRSKGFKV

SEQ ID NO: 1412 - protein, 191 aa, Saccharomyces cerevisiae
  strain ATCC 204508 / S288c
MKYIQTEQQIEVPEGVTVSIKSRIVKVVGPRGTLTKNLKHIDVTFTKVNNQLIKVAVHNGGRKHVAALRTVKSLVDNMITGVTKGYKYKMRYVYAHFPINVNIVEKDGAKFIEVRNFLGDKKIRNVPVRDGVTIEFSTNVKDEIVLSGNSVEDVSQNAADLQQICRVRNKDIRKFLDGIYVSHKGFITEDL

SEQ ID NO: 1413 - protein, 233 aa, Saccharomyces cerevisiae
  strain ATCC 204508 / S288c
MFAKTAAANLTKKGGLSLLSTTARRTKVTLPDLKWDFGALEPYISGQINELHYTKHHQTYVNGFNTAVDQFQELSDLLAKEPSPANARKMIAIQQNIKFHGGGFTNHCLFWENLAPESQGGGEPPTGALAKAIDEQFGSLDELIKLTNTKLAGVQGSGWAFIVKNLSNGGKLDVVQTYNQDTVTGPLVPLVAIDAWEHAYYLQYQNKKADYFKAIWNVVNWKEASRRFDAGKI

SEQ ID NO: 1414 - protein, 236 aa, Saccharomyces cerevisiae
  strain ATCC 204508 / S288c
MKLNISYPVNGSQKTFEIDDEHRIRVFFDKRIGQEVDGEAVGDEFKGYVFKISGGNDKQGFPMKQGVLLPTRIKLLLTKNVSCYRPRRDGERKRKSVRGAIVGPDLAVLALVIVKKGEQELEGLTDTTVPKRLGPKRANNIRKFFGLSKEDDVRDFVIRREVTKGEKTYTKAPKIQRLVTPQRLQRKRHQRALKVRNAQAQREAAAEYAQLLAKRLSERKAEKAEIRKRRASSLKA

SEQ ID NO: 1415 - protein, 321 aa, Saccharomyces cerevisiae
  strain ATCC 204508 / S288c
MVDARGSTPCLIGDSIRNVNDGNSLDFQYTNQFNEESEASRLLTPQTSSNHALSKMQKDDDIRDRSYTSVAELNREGALLTDEVDLENVDASKVRSNRDDLEAEEKRKKLLLLKKKQRNKSINSESFSSPSLRASKSNSLITSTDPVEDHISKYSSSGTPENITGEADDEDEDIIRNSYGQMIKNNSNRPHLAKGESYQSAEQEIDHTAPEKSEKRQERSGRSFDRQKSSAEFLRSLSRSISRGPTKNKTVSPSKGEDSRMYSTSNYSISLVDLENGPKIIPETLEEEQEDAEKEGVLMEDEGNEEYTKDLEEAANKAQPQ

SEQ ID NO: 1416 - protein, 327 aa, Saccharomyces cerevisiae
  strain ATCC 204508 / S288c
MSSLVTLNNGLKMPLVGLGCWKIDKKVCANQIYEAIKLGYRLFDGACDYGNEKEVGEGIRKAISEGLVSRKDIFVVSKLWNNFHHPDHVKLALKKTLSDMGLDYLDLYYIHFPIAFKYVPFEEKYPPGFYTGADDEKKGHITEAHVPIIDTYRALEECVDEGLIKSIGVSNFQGSLIQDLLRGCRIKPVALQIEHHPYLTQEHLVEFCKLHDIQVVAYSSFGPQSFIEMDLQLAKTTPTLFENDVIKKVSQNHPGSTTSQVLLRWATQRGIAVIPKSSKKERLLGNLEIEKKFTLTEQELKDISALNANIRFNDPWTWLDGKFPTFA

SEQ ID NO: 1417 - protein, 326 aa, Saccharomyces cerevisiae
  strain ATCC 204508 / S288c
MSFNAFASSLSKKLQEISTSVSEKTQELPSLAQSTQRMVQERLGQVTDISQLPREYTELEDKVDTIKLIYNHFLGVTAIYENGSYDYPKYINESVNEFSRSVASKLTELTHATSASEAQNILVAPGPIKEPKTLNYALSKVALNSSECLNKMFPTEEQPLASALLQFSDVQAKIAQARIQQDTLIQTKFNKNLRERLSFEIGKADKCRKDVHSMRLRYDVARTNLANNKKPEKEASLRVQMETLEDQFAQVTEDATVCLQEVISHANFSEDLKELAKAQAEYFETSAGLMKEFLSNSFAEEPEAKPEVAEEEKPQTAISMNDEDDA

SEQ ID NO: 1418 - protein, 360 aa, Saccharomyces cerevisiae
  strain ATCC 204508 / S288c
MLNRTIAKRTLATAAQAERTLPKKYGGRFTVTLIPGDGVGKEITDSVRTIFEAENIPIDWETINIKQTDHKEGVYEAVESLKRNKIGLKGLWHTPADQTGHGSLNVALRKQLDIYANVALFKSLKGVKTRIPDIDLIVIRENTEGEFSGLEHESVPGVVESLKVMTRPKTERIARFAFDFAKKYNRKSVTAVHKANIMKLGDGLFRNIITEIGQKEYPDIDVSSIIVDNASMQAVAKPHQFDVLVTPSMYGTILGNIGAALIGGPGLVAGANFGRDYAVFEPGSRHVGLDIKGQNVANPTAMILSSTLMLNHLGLNEYATRISKAVHETIAEGKHTTRDIGGSSSTTDFTNEIINKLSTM

SEQ ID NO: 1419 - protein, 361 aa, Saccharomyces cerevisiae
  strain ATCC 204508 / S288c
MKGLILVGGYGTRLRPLTLTVPKPLVEFGNRPMILHQIEALANAGVTDIVLAVNYRPEVMVETLKKYEKEYGVNITFSVETEPLGTAGPLKLAEDVLKKDNSPFFVLNSDVICEYPFKELADFHKAHGGKGTIVATKVDEPSKYGVIVHDIATPNLIDRFVEKPKEFVGNRINAGLYILNPEVIDLIEMKPTSIEKETFPILVEEKQLYSFDLEGFWMDVGQPKDFLSGTVLYLNSLAKRQPKKLATGANIVGNALIDPTAKISSTAKIGPDVVIGPNVTIGDGVRITRSVVLCNSTIKNHSLVKSTIVGWNSTVGQWCRLEGVTVLGDDVEVKDEIYINGGKVLPHKSISDNVPKEAIIM

SEQ ID NO: 1420 - protein, 369 aa, Saccharomyces cerevisiae
  strain ATCC 204508 / S288c
MLRNTFFRNTSRRFLATVKQPSIGRYTGKPNPSTGKYTVSFIEGDGIGPEISKSVKKIFSAANVPIEWESCDVSPIFVNGLTTIPDPAVQSITKNLVALKGPLATPIGKGHRSLNLTLRKTFGLFANVRPAKSIEGFKTTYENVDLVLIRENTEGEYSGIEHIVCPGVVQSIKLITRDASERVIRYAFEYARAIGRPRVIVVHKSTIQRLADGLFVNVAKELSKEYPDLTLETELIDNSVLKVVTNPSAYTDAVSVCPNLYGDILSDLNSGLSAGSLGLTPSANIGHKISIFEAVHGSAPDIAGQDKANPTALLLSSVMMLNHMGLTNHADQIQNAVLSTIASGPENRTGDLAGTATTSSFTEAVIKRL

SEQ ID NO: 1421 - protein, 382 aa, Saccharomyces cerevisiae
  strain ATCC 204508 / S288c
MRALAYFKKGDIHFTNDIPRPEIQTDDEVIIDVSWCGICGSDLHEYLDGPIFMPKDGECHKLSNAALPLAMGHEMSGIVSKVGPKVTKVKVGDHVVVDAASSCADLHCWPHSKFYNSKPCDACQRGSENLCTHAGFVGLGVISGGFAEQVVVSQHHIIPVPKEIPLDVAALVEPLSVTWHAVKISGFKKGSSALVLGAGPIGLCTILVLKGMGASKIVVSEIAERRIEMAKKLGVEVFNPSKHGHKSIEILRGLTKSHDGFDYSYDCSGIQVTFETSLKALTFKGTATNIAVWGPKPVPFQPMDVTLQEKVMTGSIGYVVEDFEEVVRAIHNGDIAMEDCKQLITGKQRIEDGWEKGFQELMDHKESNVKILLTPNNHGEMK

SEQ ID NO: 1422 - protein, 393 aa, Saccharomyces cerevisiae
  strain ATCC 204508 / S288c
MNRNTTTNKNANLNNSRNANAPGEAGHQNKTGLIYWTNPSKSGASFAATLVSLLILRNVNVISVLLKIGYMVLFTSFAVELSTKVLFDKGVVSRFGMQESPDLVGVLKPHIDRELDRLPALEDRIRKLVFAHRTRNNFTIGVSLYFLHGLFAIFSMNTVLIMTTIFLYTVPLIYDRKQARIDRAIDRMKDLVIHRFHKNYNKVVEKTEPYIDKIIPPQTDEGSYSTSISNENKSSTSQRNKSGLSSSEFDNMNDTSASKSGKDSYSTSQYNRAEYPVSQNENIGTLKSGKQEIPTEKDFNNRHENFSKPDVKTYDPRTVDIEEELAAHQRELEQNLKDGDYNLVGSKEIPDPITVPAPTRHTTKPAESQSIPIKNNETLHKTTHGLKQKLQHA

SEQ ID NO: 1423 - protein, 405 aa, Saccharomyces cerevisiae
  strain ATCC 204508 / S288c
MFSLKALLPLALLLVSANQVAAKVHKAKIYKHELSDEMKEVTFEQHLAHLGQKYLTQFEKANPEVVFSREHPFFTEGGHDVPLTNYLNAQYYTDITLGTPPQNFKVILDTGSSNLWVPSNECGSLACFLHSKYDHEASSSYKANGTEFAIQYGTGSLEGYISQDTLSIGDLTIPKQDFAEATSEPGLTFAFGKFDGILGLGYDTISVDKVVPPFYNAIQQDLLDEKRFAFYLGDTSKDTENGGEATFGGIDESKFKGDITWLPVRRKAYWEVKFEGIGLGDEYAELESHGAAIDTGTSLITLPSGLAEMINAEIGAKKGWTGQYTLDCNTRDNLPDLIFNFNGYNFTIGPYDYTLEVSGSCISAITPMDFPEPVGPLAIVGDAFLRKYYSIYDLGNNAVGLAKAI

SEQ ID NO: 1424 - protein, 412 aa, Saccharomyces cerevisiae
  strain ATCC 204508 / S288c
MSQGTLYINRSPRNYASEALISYFKLDVKIVDLEQSSEFASLFPLKQAPAFLGPKGLKLTEALAIQFYLANQVADEKERARLLGSDVIEKSQILRWASLANSDVMSNIARPFLSFKGLIPYNKKDVDACFVKIDNLAAVFDARLRDYTFVATENISLGDLHAAGSWAFGLATILGPEWRAKHPHLMRWFNTVAASPIVKTPFAEVKLAEKALTYTPPKKQKAEKPKAEKSKAEKKKDEAKPADDAAPAKKPKHPLEALGKSTFVLDDWKRKYSNDDTRPVALPWFWEHYNPEEYSIWKVGYKYNDELTLTFMSNNLVGGFFNRLSASTKYMFGCLVVYGENNNNGIVGAVMVRGQDFAPAFDVAPDWESYEYTKLDPTKEEDKEFVNNMWAWDKPVVVNGEDKEIVDGKVLK

SEQ ID NO: 1425 - protein, 500 aa, Saccharomyces cerevisiae
  strain ATCC 204508 / S288c
MSFENLHKVNAEALEDAVVEICSSLQVDAAKLDELTAYFIECMEKGLNNTSVGEEKTVDKGLPMIPTYVTSLPNGTERGVLLAADLGGTHFRVCSVTLNGDGTFDMQQLKSKIPEEYLNDKDVTSEELFSYLGRRTRAFVRKHHPELLKSTGENIKPLKMGFTFSYPVDQTSLSSGTLIRWTKSFKIEDTVGKDVVRLYQEQLDIQGLSMINVVALTNDTVGTFLSHCYTSGSRPSSAGEISEPVIGCIFGTGTNGCYMEDIENIKKLPDELRTRLLHEGKTQMCINIEWGSFDNELKHLSATKYDIDIDQKFSPNPGYHLFEKRISGMYLGELLRNILVDLHARGLILGQYRNYDQLPHRLKTPFQLCSEVLSRIEIDDSTNLRETELSFLQSLRLPTTFEERKAIQNLVRSITRRSAYLAAVPIAAILIKTNALNKRYHGEVEIGFDGYVIEYYPGFRSMLRHALALSPIGTEGERKIHLRLAKDGSGVGAALCALVA

SEQ ID NO: 1426 - protein, 523 aa, Saccharomyces cerevisiae
  strain ATCC 204508 / S288c
MAAVRDYKTALEFAKSLPRLDGLSVQELMDSKTRGGLTYNDFLVLPGLVDFPSSEVSLQTKLTRNITLNTPFVSSPMDTVTESEMAIFMALLGGIGFIHHNCTPEDQADMVRRVKNYENGFINNPIVISPTTTVGEAKSMKERFGFSGFPVTEDGKRNGKLMGIVTSRDIQFVEDNSLLVQDVMTKNPVTGAQGITLSEGNEILKKIKKGKLLIVDDNGNLVSMLSRTDLMKNQNYPLASKSATTKQLLCGAAIGTIDADKERLRLLVEAGLDVVILDSSQGNSIFQLNMIKWIKETFPDLEIIAGNVATREQAANLIAAGADGLRIGMGSGSICITQEVMACGRPQGTAVYNVCEFANQFGIPCMADGGVQNIGHITKALALGSSTVMMGGMLAGTTESPGEYFYQDGKRLKAYRGMGSIDAMQKTGTKGNASTSRYFSESDSVLVAQGVSGAVVDKGSIKKFIPYLYNGLQHSCQDIGYKSLTLLKENVQSGKVRFEFRTASAQLEGGVHNLHSYEKRLHN

SEQ ID NO: 1427 - protein, 526 aa, Saccharomyces cerevisiae
  strain ATCC 204508 / S288c
MTISNLLKQRVRYAPYLKKVKEAHELIPLFKNGQYLGWSGFTGVGTPKAVPEALIDHVEKNNLQGKLRFNLFVGASAGPEENRWAEHDMIIKRAPHQVGKPIAKAINQGRIEFFDKHLSMFPQDLTYGFYTRERKDNKILDYTIIEATAIKEDGSIVPGPSVGGSPEFITVSDKVIIEVNTATPSFEGIHDIDMPVNPPFRKPYPYLKVDDKCGVDSIPVDPEKVVAIVESTMRDQVPPNTPSDDMSRAIAGHLVEFFRNEVKHGRLPENLLPLQSGIGNIANAVIEGLAGAQFKHLTVWTEVLQDSFLDLFENGSLDYATATSVRLTEKGFDRAFANWENFKHRLCLRSQVVSNNPEMIRRLGVIAMNTPVEVDIYAHANSTNVNGSRMLNGLGGSADFLRNAKLSIMHAPSARPTKVDPTGISTIVPMASHVDQTEHDLDILVTDQGLADLRGLSPKERAREIINKCAHPDYQALLTDYLDRAEHYAKKHNCLHEPHMLKNAFKFHTNLAEKGTMKVDSWEPVD

SEQ ID NO: 1428 - protein, 537 aa, Saccharomyces cerevisiae
  strain ATCC 204508 / S288c
MHFSLKQLAVAAFYATNLGSAYVIPQFFQEAFQQEEPIENYLPQLNDDDSSAVAANIPKPHIPYFMKPHVESEKLQDKIKVDDLNATAWDLYRLANYSTPDYGHPTRVIGSKGHNKTMEYILNVFDDMQDYYDVSLQEFEALSGKIISFNLSDAETGKSFANTTAFALSPPVDGFVGKLVEIPNLGCEEKDYASVVPPRHNEKQIALIERGKCPFGDKSNLAGKFGFTAVVIYDNEPKSKEGLHGTLGEPTKHTVATVGVPYKVGKKLIANIALNIDYSLYFAMDSYVEFIKTQNIIADTKHGDPDNIVALGAHSDSVEEGPGINDDGSGTISLLNVAKQLTHFKINNKVRFAWWAAEEEGLLGSNFYAYNLTKEENSKIRVFMDYDMMASPNYEYEIYDANNKENPKGSEELKNLYVDYYKAHHLNYTLVPFDGRSDYVGFINNGIPAGGIATGAEKNNVNNGKVLDRCYHQLCDDVSNLSWDAFITNTKLIAHSVATYADSFEGFPKRETQKHKEVDILNAQQPQFKYRADFLII

SEQ ID NO: 1429 - protein, 513 aa, Saccharomyces cerevisiae
  strain ATCC 204508 / S288c
MKQFKLVNAVSASFVLIGLVLANSDSVFDKWTQEDLADYLRDNKKSLEKYATDSIEDLKTEASQVWDKHAQPKPWWQVWSSDSSSVSNSNPGWFGYTGSSDHPVSDWLFDTWSTDSLRNFLKKNGVDVDDAKASKDSLVKTAKENFNKISKSLKSSGYYPSSSYFDSWSTKDLQNWLNDNGIDYDKAVQSKDELVQKVKENIYRTSEKAEQQRLGLLESLDLAHQQILDTSGQIKDTVFDKWSSDQLTNWLESHKVNIDKNMAKKHDYLVRMAKENSANLKDDIYWYLDYMKRESSPFLTKTPEYVGSVWDSSKNFLTNLYSKFRGKTDNVINDTFLVGLDSWPKDKLKMFLDARGIKYSMLSTEHQLRELVKKSRNEKLKILPKDYQKYFDNSNWSLDDIKGWFADKKDDFQDSQTYSTIMQDFDKVSKNTNDAKDQIAKTWSNTFQSWSQEDLLQYLKSFGVPVKQTSTKDDLINLAKQNTQWLFGTVKEPAYKRYLHNVKNWSKSILGFN

SEQ ID NO: 1430 - protein, 589 aa, Saccharomyces cerevisiae
  strain ATCC 204508 / S288c
MSLTADEYKQQGNAAFTAKDYDKAIELFTKAIEVSETPNHVLYSNRSACYTSLKKFSDALNDANECVKINPSWSKGYNRLGAAHLGLGDLDEAESNYKKALELDASNKAAKEGLDQVHRTQQARQAQPDLGLTQLFADPNLIENLKKNPKTSEMMKDPQLVAKLIGYKQNPQAIGQDLFTDPRLMTIMATLMGVDLNMDDINQSNSMPKEPETSKSTEQKKDAEPQSDSTTSKENSSKAPQKEESKESEPMEVDEDDSKIEADKEKAEGNKFYKARQFDEAIEHYNKAWELHKDITYLNNRAAAEYEKGEYETAISTLNDAVEQGREMRADYKVISKSFARIGNAYHKLGDLKKTIEYYQKSLTEHRTADILTKLRNAEKELKKAEAEAYVNPEKAEEARLEGKEYFTKSDWPNAVKAYTEMIKRAPEDARGYSNRAAALAKLMSFPEAIADCNKAIEKDPNFVRAYIRKATAQIAVKEYASALETLDAARTKDAEVNNGSSAREIDQLYYKASQQRFQPGTSNETPEETYQRAMKDPEVAAIMQDPVMQSILQQAQQNPAALQEHMKNPEVFKKIQTLIAAGIIRTGR

SEQ ID NO: 1431 - protein, 640 aa, Saccharomyces cerevisiae
  strain ATCC 204508 / S288c
MLSLKKSALSKLTLLRNTRTFTSSALVRQTQGSVNGSASRSADGKYHIIDHEYDCVVIGAGGAGLRAAFGLAEAGYKTACISKLFPTRSHTVAAQGGINAALGNMHKDNWKWHMYDTVKGSDWLGDQDSIHYMTREAPKSIIELEHYGVPFSRTENGKIYQRAFGGQTKEYGKGAQAYRTCAVADRTGHALLHTLYGQALRHDTHFFIEYFALDLLTHNGEVVGVIAYNQEDGTIHRFRAHKTIIATGGYGRAYFSCTSAHTCTGDGNAMVSRAGFPLQDLEFVQFHPSGIYGSGCLITEGARGEGGFLVNSEGERFMERYAPTAKDLACRDVVSRAITMEIREGRGVGKKKDHMYLQLSHLPPEVLKERLPGISETAAIFAGVDVTKEPIPIIPTVHYNMGGIPTKWNGEALTIDEETGEDKVIPGLMACGEAACVSVHGANRLGANSLLDLVVFGRAVAHTVADTLQPGLPHKPLPSDLGKESIANLDKLRNANGSRSTAEIRMNMKQTMQKDVSVFRTQSSLDEGVRNITAVEKTFDDVKTTDRSMIWNSDLVETLELQNLLTCASQTAVSAANRKESRGAHAREDYPNRDDEHWMKHTLSWQKDVAAPVTLKYRRVIDHTLDEKECPSVPPTVRAY

SEQ ID NO: 1432 - protein, 802 aa, Saccharomyces cerevisiae
  strain ATCC 204508 / S288c
MLNILVLGNGAREHVLVTKLAQSPTVGKIYVAPGNGGTATMDPSRVINWDITPDVANFARLQSMAVEHKINLVVPGPELPLVNGITSVFHSVGIPVFGPSVKAAQLEASKAFSKRFMSKHNIPTASYDVFTNPEEAISFLQAHTDKAFVIKADGIAAGKGVIIPSSIDESVQAIKDIMVTKQFGEEAGKQVVIEQFLEGDEISLLTIVDGYSHFNLPVAQDHKRIFDGDKGLNTGGMGAYAPAPVATPSLLKTIDSQIVKPTIDGMRRDGMPFVGVLFTGMILVKDSKTNQLVPEVLEYNVRFGDPETQAVLSLLDDQTDLAQVFLAAAEHRLDSVNIGIDDTRSAVTVVVAAGGYPESYAKGDKITLDTDKLPPHTQIFQAGTKYDSATDSLLTNGGRVLSVTSTAQDLRTAVDTVYEAVKCVHFQNSYYRKDIAYRAFQNSESSKVAITYADSGVSVDNGNNLVQTIKEMVRSTRRPGADSDIGGFGGLFDLAQAGFRQNEDTLLVGATDGVGTKLIIAQETGIHNTVGIDLVAMNVNDLVVQGAEPLFFLDYFATGALDIQVASDFVSGVANGCIQSGCALVGGETSEMPGMYPPGHYDTNGTAVGAVLRQDILPKINEMAAGDVLLGLASSGVHSNGFSLVRKIIQHVALPWDAPCPWDESKTLGEGILEPTKIYVKQLLPSIRQRLLLGLAHITGGGLVENIPRAIPDHLQARVDMSTWEVPRVFKWFGQAGNVPHDDILRTFNMGVGMVLIVKRENVKAVCDSLTEEGEIIWELGSLQERPKDAPGCVIENGTKLY

SEQ ID NO: 1433 - protein, 56 aa, Saccharomyces cerevisiae
  strain ATCC 204508 / S288c
MAHENVWFSHPRRFGKGSRQCRVCSSHTGLVRKYDLNICRQCFREKANDIGFHKYR

SEQ ID NO: 1434 - protein, 103 aa, Saccharomyces cerevisiae
  strain ATCC 204508 / S288c
MSGRGKGGKGLGKGGAKRHRKILRDNIQGITKPAIRRLARRGGVKRISGLIYEEVRAVLKSFLESVIRDSVTYTEHAKRKTVTSLDVVYALKRQGRTLYGFGG

SEQ ID NO: 1435 - protein, 104 aa, Saccharomyces cerevisiae
  strain ATCC 204508 / S288c
MVTQLKSASEYDSALASGDKLVVVDFFATWCGPCKMIAPMIEKFAEQYSDAAFYKLDVDEVSDVAQKAEVSSMPTLIFYKGGKEVTRVVGANPAAIKQAIASNV

SEQ ID NO: 1436 - protein, 114 aa, Saccharomyces cerevisiae
  strain ATCC 204508 / S288c
MSEVIEGNVKIDRISPGDGATFPKTGDLVTIHYTGTLENGQKFDSSVDRGSPFQCNIGVGQVIKGWDVGIPKLSVGEKARLTIPGPYAYGPRGFPGLIPPNSTLVFDVELLKVN

SEQ ID NO: 1437 - protein, 115 aa, Saccharomyces cerevisiae
  strain ATCC 204508 / S288c
MGSFWDAFAVYDKKKHADPSVYGGNHNNTGDSKTQVMFSKEYRQPRTHQQENLQSMRRSSIGSQDSSDVEDVKEGRLPAEVEIPKNVDISNMSQGEFLRLYESLRRGEPDNKVNR

SEQ ID NO: 1438 - protein, 131 aa, Saccharomyces cerevisiae; identical to SEQ ID NO: 577
  strain ATCC 204508 / S288c

SEQ ID NO: 1439 - protein, 121 aa, Saccharomyces cerevisiae; identical to SEQ ID NO: 628
  strain ATCC 204508 / S288c

SEQ ID NO: 1440 - protein, 130 aa, Saccharomyces cerevisiae
  strain ATCC 204508 / S288c
MASLPHPKIVKKHTKKFKRHHSDRYHRVAENWRKQKGIDSVVRRRFRGNISQPKIGYGSNKKTKFLSPSGHKTFLVANVKDLETLTMHTKTYAAEIAHNISAKNRVVILARAKALGIKVTNPKGRLALEA

SEQ ID NO: 1441 - protein, 135 aa, Saccharomyces cerevisiae
  strain ATCC 204508 / S288c
MFLRTQARFFHATTKKMDFSKMSIVGRIGSEFTEHTSANNNRYLKYSIASQPRRDGQTNWYNITVFNEPQINFLTEYVRKGALVYVEADAANYVFERDDGSKGTTLSLVQKDINLLKNGKKLEDAEGQENAASSE

SEQ ID NO: 1442 - protein, 138 aa, Saccharomyces cerevisiae
  strain ATCC 204508 / S288c
MSTDSIVKASNWRLVEVGRVVLIKKGQSAGKLAAIVEIIDQKKVLIDGPKAGVPRQAINLGQVVLTPLTFALPRGARTATVSKKWAAAGVCEKWAASSWAKKIAQRERRAALTDFERFQVMVLRKQKRYTVKKALAKA

SEQ ID NO: 1443 - protein, 143 aa, Saccharomyces cerevisiae
  strain ATCC 204508 / S288c
MSRSGVAVADESLTAFNDLKLGKKYKFILFGLNDAKTEIVVKETSTDPSYDAFLEKLPENDCLYAIYDFEYEINGNEGKRSKIVFFTWSPDTAPVRSKMVYASSKDALRRALNGVSTDVQGTDFSEVSYDSVLERVSRGAGSH

SEQ ID NO: 1444 - protein, 142 aa, Saccharomyces cerevisiae
  strain ATCC 204508 / S288c
MSQAVNAKKRVFKTHSYRGVDLEKLLEMSTEDFVKLAPARVRRRFARGMTSKPAGFMKKLRAAKLAAPENEKPAPVRTHMRNMIIVPEMIGSVVGIYNGKAFNQVEIRPEMLGHYLGEFSITYTPVRHGRAGATTSRFIPLK

SEQ ID NO: 1445 - protein, 165 aa, Saccharomyces cerevisiae
  strain ATCC 204508 / S288c
MPPKFDPNEVKYLYLRAVGGEVGASAALAPKIGPLGLSPKKVGEDIAKATKEFKGIKVTVQLKIQNRQAAASVVPSASSLVITALKEPPRDRKKDKNVKHSGNIQLDEIIEIARQMRDKSFGRTLASVTKEILGTAQSVGCRVDFKNPHDIIEGINAGEIEIPEN

SEQ ID NO: 1446 - protein, 161 aa, Saccharomyces cerevisiae
  strain ATCC 204508 / S288c
MEKIKEKLNSLKLESESWQEKYEELREQLKELEQSNTEKENEIKSLSAKNEQLDSEVEKLESQLSDTKQLAEDSNNLRSNNENYTKKNQDLEQQLEDSEAKLKEAMDKLKEADLNSEQMGRRIVALEEERDEWEKKCEEFQSKYEEAQKELDEIANSLENL

SEQ ID NO: 1447 - protein, 174 aa, Saccharomyces cerevisiae
  strain ATCC 204508 / S288c
MSTKAQNPMRDLKIEKLVLNISVGESGDRLTRASKVLEQLSGQTPVQSKARYTVRTFGIRRNEKIAVHVTVRGPKAEEILERGLKVKEYQLRDRNFSATGNFGFGIDEHIDLGIKYDPSIGIFGMDFYVVMNRPGARVTRRKRCKGTVGNSHKTTKEDTVSWFKQKYDADVLDK

SEQ ID NO: 1448 - protein, 180 aa, Saccharomyces cerevisiae
  strain ATCC 204508 / S288c
MSEYASSIHSQMKQFDTKYSGNRILQQLENKTNLPKSYLVAGLGFAYLLLIFINVGGVGEILSNFAGFVLPAYLSLVALKTPTSTDDTQLLTYWIVFSFLSVIEFWSKAILYLIPFYWFLKTVFLIYIALPQTGGARMIYQKIVAPLTDRYILRDVSKTEKDEIRASVNEASKATGASVH

SEQ ID NO: 1449 - protein, 193 aa, Saccharomyces cerevisiae
  strain ATCC 204508 / S288c
MSAVATYLKTLTARRTIYALKPELPGEITINDIQSVVQTIIKETPTAFNSQPNRAVILTGETHKKVWDEVTKAIESPAGQKRPASARDEAFGSVIFFTDDKVTEKLKADFPAYAAAFPSFADHTSGAAQINSWVALEAMGLGGHLQHYNGYIKAALPSKIPESWTVQAQLVFGTPAAPPGEKTYIKNDVEIFN

SEQ ID NO: 1450 - protein, 194 aa, Saccharomyces cerevisiae; identical to SEQ ID NO: 496
  strain ATCC 204508 / S288c

SEQ ID NO: 1451 - protein, 198 aa, Saccharomyces cerevisiae
  strain ATCC 204508 / S288c
MSQPVVVIDAKDHLLGRLASTIAKQVLNGQKIVVVRAEALNISGEFFRNKLKYHDFLRKATAFNKTRGPFHFRAPSRILYKAIRGMVSHKTARGKAALERLKIFEGIPPPYDKKKRVVVPQALRVLRLKPGRKYTTLGKLSTSVGWKYEDVVAKLEDKRKVRSAEYYAKKRAFTKKVSSASAAASESDVAKQLASFGY

SEQ ID NO: 1452 - protein, 206 aa, Saccharomyces cerevisiae
  strain ATCC 204508 / S288c
MASTDFSKIETLKQLNASLADKSYIEGTAVSQADVTVFKAFQSAYPEFSRWFNHIASKADEFDSFPAASAAAAEEEEDDDVDLFGSDDEEADAEAEKLKAERIAAYNAKKAAKPAKPAAKSIVTLDVKPWDDETNLEEMVANVKAIEMEGLTWGAHQFIPIGFGIKKLQINCVVEDDKVSLDDLQQSIEEDEDHVQSTDIAAMQKL

SEQ ID NO: 1453 - protein, 216 aa, Saccharomyces cerevisiae
  strain ATCC 204508 / S288c
MKTLIVVDMQNDFISPLGSLTVPKGEELINPISDLMQDADRDWHRIVVTRDWHPSRHISFAKNHKDKEPYSTYTYHSPRPGDDSTQEGILWPVHCVKNTWGSQLVDQIMDQVVTKHIKIVDKGFLTDREYYSAFHDIWNFHKTDMNKYLEKHHTDEVYIVGVALEYCVKATAISAAELGYKTTVLLDYTRPISDDPEVINKVKEELKAHNINVVDK

SEQ ID NO: 1454 - protein, 219 aa, Saccharomyces cerevisiae
  strain ATCC 204508 / S288c
MSAPAANGEVPTFKLVLVGDGGTGKTTFVKRHLTGEFEKKYIATIGVEVHPLSFYTNFGEIKFDVWDTAGQEKFGGLRDGYYINAQCAIIMFDVTSRITYKNVPNWHRDLVRVCENIPIVLCGNKVDVKERKVKAKTITFHRKKNLQYYDISAKSNYNFEKPFLWLARKLAGNPQLEFVASPALAPPEVQVDEQLMQQYQQEMEQATALPLPDEDDADL

SEQ ID NO: 1455 - protein, 233 aa, Saccharomyces cerevisiae; identical to SEQ ID NO: 484
  strain ATCC 204508 / S288c

SEQ ID NO: 1456 - protein, 244 aa, Saccharomyces cerevisiae
  strain ATCC 204508 / S288c
MSMSMGVRGLALRSVSKTLFSQGVRCPSMVIGARYMSSTPEKQTDPKAKANSIINAIPGNNILTKTGVLGTSAAAVIYAISNELYVINDESILLLTFLGFTGLVAKYLAPAYKDFADARMKKVSDVLNASRNKHVEAVKDRIDSVSQLQNVAETTKVLFDVSKETVELESEAFELKQKVELAHEAKAVLDSWVRYEASLRQLEQRQLAKSVISRVQSELGNPKFQEKVLQQSISEIEQLLSKLK

SEQ ID NO: 1457 - protein, 250 aa, Saccharomyces cerevisiae
  strain ATCC 204508 / S288c
MGLTTKPLSLKVNAALFDVDGTIIISQPAIAAFWRDFGKDKPYFDAEHVIQVSHGWRTFDAIAKFAPDFANEEYVNKLEAEIPVKYGEKSIEVPGAVKLCNALNALPKEKWAVATSGTRDMAQKWFEHLGIRRPKYFITANDVKQGKPHPEPYLKGRNGLGYPINEQDPSKSKVVVFEDAPAGIAAGKAAGCKIIGIATTFDLDFLKEKGCDIIVKNHESIRVGGYNAETDEVEFIFDDYLYAKDDLLKW

SEQ ID NO: 1458 - protein, 306 aa, Saccharomyces cerevisiae
  strain ATCC 204508 / S288c
MSITKTELDGILPLVARGKVRDIYEVDAGTLLFVATDRISAYDVIMENSIPEKGILLTKLSEFWFKFLSNDVRNHLVDIAPGKTIFDYLPAKLSEPKYKTQLEDRSLLVHKHKLIPLEVIVRGYITGSAWKEYVKTGTVHGLKQPQGLKESQEFPEPIFTPSTKAEQGEHDENISPAQAAELVGEDLSRRVAELAVKLYSKCKDYAKEKGIIIADTKFEFGIDEKTNEIILVDEVLTPDSSRFWNGASYKVGESQDSYDKQFLRDWLTANKLNGVNGVKMPQDIVDRTRAKYIEAYETLTGSKWSH

SEQ ID NO: 1459 - protein, 340 aa, Saccharomyces cerevisiae
  strain ATCC 204508 / S288c
MTAPLVVLGNPLLDFQADVTAEYLAKYSLKENDAILVDAKSGDAKMAIFDELLQMPETKLVAGGAAQNTARGAAYVLGAGQVVYFGSVGKDKFSERLLNENEKAGVKSMYQVQNDIGTGKCAALITGHNRSLVTDLGAANFFTPDHLDKHWDLVEAAKLFYIGGFHLTVSPDAIVKLGQHAKENSKPFVLNFSAPFIPHVFKDALARVLPYATVIIANESEAEAFCDAFQLDCANTDLEAIAQRIVKDSPVEKTVIFTHGVEPTVVVSSKGTSTYPVKPLDSSKIVDTNGAGDAFAGGFMAGLTKGEDLETSIDMGQWLAALSIQEVGPSYPSEKISYSK

SEQ ID NO: 1460 - protein, 370 aa, Saccharomyces cerevisiae
  strain ATCC 204508 / S288c
MSESPMFAANGMPKVNQGAEEDVRILGYDPLASPALLQVQIPATPTSLETAKRGRREAIDIITGKDDRVLVIVGPCSIHDLEAAQEYALRLKKLSDELKGDLSIIMRAYLEKPRTTVGWKGLINDPDVNNTFNINKGLQSARQLFVNLTNIGLPIGSEMLDTISPQYLADLVSFGAIGARTTESQLHRELASGLSFPVGFKNGTDGTLNVAVDACQAAAHSHHFMGVTKHGVAAITTTKGNEHCFVILRGGKKGTNYDAKSVAEAKAQLPAGSNGLMIDYSHGNSNKDFRNQPKVNDVVCEQIANGENAITGVMIESNINEGNQGIPAEGKAGLKYGVSITDACIGWETTEDVLRKLAAAVRQRREVNKK

SEQ ID NO: 1461 - protein, 365 aa, Saccharomyces cerevisiae
  strain ATCC 204508 / S288c
MAGKKIAGVLGATGSVGQRFILLLANHPHFELKVLGASSRSAGKKYVDAVNWKQTDLLPESATDIIVSECKSEFFKECDIVFSGLDADYAGAIEKEFMEAGIAIVSNAKNYRREQDVPLIVPVVNPEHLDIVAQKLDTAKAQGKPRPGFIICISNCSTAGLVAPLKPLIEKFGPIDALTTTTLQAISGAGFSPGVPGIDILDNIIPYIGGEEDKMEWETKKILAPLAEDKTHVKLLTPEEIKVSAQCNRVAVSDGHTECISLRFKNRPAPSVEQVKTCLKEYVCDAYKLGCHSAPKQTIHVLEQPDRPQPRLDRNRDSGYGVSVGRIREDPLLDFKMVVLSHNTIIGAAGSGVLIAEILLARNLI

SEQ ID NO: 1462 - protein, 386 aa, Saccharomyces cerevisiae
  strain ATCC 204508 / S288c
MSAATVGKPIKCIAAVAYDAKKPLSVEEITVDAPKAHEVRIKIEYTAVCHTDAYTLSGSDPEGLFPCVLGHEGAGIVESVGDDVITVKPGDHVIALYTAECGKCKFCTSGKTNLCGAVRATQGKGVMPDGTTRFHNAKGEDIYHFMGCSTFSEYTVVADVSVVAIDPKAPLDAACLLGCGVTTGFGAALKTANVQKGDTVAVFGCGTVGLSVIQGAKLRGASKIIAIDINNKKKQYCSQFGATDFVNPKEDLAKDQTIVEKLIEMTDGGLDFTFDCTGNTKIMRDALEACHKGWGQSIIIGVAAAGEEISTRPFQLVTGRVWKGSAFGGIKGRSEMGGLIKDYQKGALKVEEFITHRRPFKEINQAFEDLHNGDCLRTVLKSDEIK

SEQ ID NO: 1463 - protein, 370 aa, Saccharomyces cerevisiae
  strain ATCC 204508 / S288c
MAEASIEKTQILQKYLELDQRGRIIAEYVWIDGTGNLRSKGRTLKKRITSIDQLPEWNFDGSSTNQAPGHDSDIYLKPVAYYPDPFRRGDNIVVLAACYNNDGTPNKFNHRHEAAKLFAAHKDEEIWFGLEQEYTLFDMYDDVYGWPKGGYPAPQGPYYCGVGAGKVYARDMIEAHYRACLYAGLEISGINAEVMPSQWEFQVGPCTGIDMGDQLWMARYFLHRVAEEFGIKISFHPKPLKGDWNGAGCHTNVSTKEMRQPGGMKYIEQAIEKLSKRHAEHIKLYGSDNDMRLTGRHETASMTAFSSGVANRGSSIRIPRSVAKEGYGYFEDRRPASNIDPYLVTGIMCETVCGAIDNADMTKEFERESS

SEQ ID NO: 1464 - protein, 499 aa, Saccharomyces cerevisiae
  strain ATCC 204508 / S288c
MLRIRSLLNNKRAFSSTVRTLTINKSHDVVIIGGGPAGYVAAIKAAQLGFNTACVEKRGKLGGTCLNVGCIPSKALLNNSHLFHQMHTEAQKRGIDVNGDIKINVANFQKAKDDAVKQLTGGIELLFKKNKVTYYKGNGSFEDETKIRVTPVDGLEGTVKEDHILDVKNIIVATGSEVTPFPGIEIDEEKIVSSTGALSLKEIPKRLTIIGGGIIGLEMGSVYSRLGSKVTVVEFQPQIGASMDGEVAKATQKFLKKQGLDFKLSTKVISAKRNDDKNVVEIVVEDTKTNKQENLEAEVLLVAVGRRPYIAGLGAEKIGLEVDKRGRLVIDDQFNSKFPHIKVVGDVTFGPMLAHKAEEEGIAAVEMLKTGHGHVNYNNIPSVMYSHPEVAWVGKTEEQLKEAGIDYKIGKFPFAANSRAKTNQDTEGFVKILIDSKTERILGAHIIGPNAGEMIAEAGLALEYGASAEDVARVCHAHPTLSEAFKEANMAAYDKAIHC

SEQ ID NO: 1465 - protein, 482 aa, Saccharomyces cerevisiae
  strain ATCC 204508 / S288c
MPDYDNYTTPLSSRYASKEMSATFSLRNRFSTWRKLWLNLAIAEKELGLTVVTDEAIEQMRKHVEITDDEIAKASAQEAIVRHDVMAHVHTFGETCPAAAGIIHLGATSCFVTDNADLIFIRDAYDIIIPKLVNVINRLAKFAMEYKDLPVLGWTHFQPAQLTTLGKRATLWIQELLWDLRNFERARNDIGLRGVKGTTGTQASFLALFHGNHDKVEALDERVTELLGFDKVYPVTGQTYSRKIDIDVLAPLSSFAATAHKMATDIRLLANLKEVEEPFEKSQIGSSAMAYKRNPMRCERVCSLARHLGSLFSDAVQTASVQWFERTLDDSAIRRISLPSAFLTADILLSTLLNISSGLVVYPKVIERRIKGELPFMATENIIMAMVEKNASRQEVHERIRVLSHQAAAVVKEEGGENDLIERVKRDEFFKPIWEELDSLLEPSTFVGRAPQQVEKFVQKDVNNALQPFQKYLNDEQVKLNV

SEQ ID NO: 1466 - protein, 506 aa, Saccharomyces cerevisiae
  strain ATCC 204508 / S288c
MPTLYTDIEIPQLKISLKQPLGLFINNEFCPSSDGKTIETVNPATGEPITSFQAANEKDVDKAVKAARAAFDNVWSKTSSEQRGIYLSNLLKLIEEEQDTLAALETLDAGKPFHSNAKQDLAQIIELTRYYAGAVDKFNMGETIPLTFNKFAYTLKVPFGVVAQIVPWNYPLAMACRKMQGALAAGNTVIIKPAENTSLSLLYFATLIKKAGFPPGVVNVIPGYGSVVGKALGTHMDIDKISFTGSTKVGGSVLEASGQSNLKDITLECGGKSPALVFEDADLDKAIEWVANGIFFNSGQICTANSRVYVQSSIYDKFVEKFKETAKKEWDVAGKFDPFDEKCIVGPVISSTQYDRIKSYIERGKKEEKLDMFQTSEFPIGGAKGYFIPPTIFTDVPETSKLLRDEIFGPVVVVSKFTNYDDALKLANDTCYGLASAVFTKDVKKAHMFARDIKAGTVWINQTNQEEAKVPFGGFKMSGIGRESGDTGVDNYLQIKSVHVDLSLDK

SEQ ID NO: 1467 - protein, 507 aa, Saccharomyces cerevisiae
  strain ATCC 204508 / S288c
MTKSEQQADSRHNVIDLVGNTPLIALKKLPKALGIKPQIYAKLELYNPGGSIKDRIAKSMVEEAEASGRIHPSRSTLIEPTSGNTGIGLALIGAIKGYRTIITLPEKMSNEKVSVLKALGAEIIRTPTAAAWDSPESHIGVAKKLEKEIPGAVILDQYNNMMNPEAHYFGTGREIQRQLEDLNLFDNLRAVVAGAGTGGTISGISKYLKEQNDKIQIVGADPFGSILAQPENLNKTDITDYKVEGIGYDFVPQVLDRKLIDVWYKTDDKPSFKYARQLISNEGVLVGGSSGSAFTAVVKYCEDHPELTEDDVIVAIFPDSIRSYLTKFVDDEWLKKNNLWDDDVLARFDSSKLEASTTKYADVFGNATVKDLHLKPVVSVKETAKVTDVIKILKDNGFDQLPVLTEDGKLSGLVTLSELLRKLSINNSNNDNTIKGKYLDFKKLNNFNDVSSYNENKSGKKKFIKFDENSKLSDLNRFFEKNSSAVITDGLKPIHIVTKMDLLSYLA

SEQ ID NO: 1468 - protein, 592 aa, Saccharomyces cerevisiae
  strain ATCC 204508 / S288c
MALEPIDYTTHSREIDAEYLKIVRGSDPDTTWLIISPNAKKEYEPESTGSSFHDFLQLFDETKVQYGLARVSPPGSDVEKIIIIGWCPDSAPLKTRASFAANFAAVANNLFKGYHVQVTARDEDDLDENELLMKISNAAGARYSIQTSSKQQGKASTPPVKKSFTPSKSPAPVSKKEPVKTPSPAPAAKISSRVNDNNDDDDWNEPELKERDFDQAPLKPNQSSYKPIGKIDLQKVIAEEKAKEDPRLVQKPTAAGSKIDPSSDIANLKNESKLKRDSEFNSFLGTTKPPSMTESSLKNDDDKVIKGFRNEKSPAQLWAERKAKQNSGNAETKAEAPKPEVPEDEPEGEPDVKDLKSKFEGLAASEKEEEEMENKFAPPPKKSEPTIISPKPFSKPQEPVKAEEAEQPKTDYKKIGNPLPGMHIEADNEEEPEENDDDWDDDEDEAAQPPLPSRNVASGAPVQKEEPEQEEIAPSLPSRNSIPAPKQEEAPEQAPEEEIEEEAEEAAPQLPSRSSAAPPPPPRRATPEKKPKENPWATAEYDYDAAEDNELTFVENDKIINIEFVDDDWWLGELEKDGSKGLFPSNYVSLGN

SEQ ID NO: 1469 - protein, 589 aa, Saccharomyces cerevisiae
  strain ATCC 204508 / S288c
MTISSAHPETEPKWWKEATFYQIYPASFKDSNDDGWGDMKGIASKLEYIKELGADAIWISPFYDSPQDDMGYDIANYEKVWPTYGTNEDCFALIEKTHKLGMKFITDLVINHCSSEHEWFKESRSSKTNPKRDWFFWRPPKGYDAEGKPIPPNNWKSYFGGSAWTFDEKTQEFYLRLFCSTQPDLNWENEDCRKAIYESAVGYWLDHGVDGFRIDVGSLYSKVVGLPDAPVVDKNSTWQSSDPYTLNGPRIHEFHQEMNQFIRNRVKDGREIMTVGEMQHASDETKRLYTSASRHELSELFNFSHTDVGTSPLFRYNLVPFELKDWKIALAELFRYINGTDCWSTIYLENHDQPRSITRFGDDSPKNRVISGKLLSVLLSALTGTLYVYQGQELGQINFKNWPVEKYEDVEIRNNYNAIKEEHGENSEEMKKFLEAIALISRDHARTPMQWSREEPNAGFSGPSAKPWFYLNDSFREGINVEDEIKDPNSVLNFWKEALKFRKAHKDITVYGYDFEFIDLDNKKLFSFTKKYNNKTLFAALNFSSDATDFKIPNDDSSFKLEFGNYPKKEVDASSRTLKPWEGRIYISE

SEQ ID NO: 1470 - protein, 635 aa, Saccharomyces cerevisiae
  strain ATCC 204508 / S288c
MKLENTLFTLGALGSISAALVIPNLENAADHHELINKEDHHERPRKVEFTKDDDEEPSDSEDKEHGKFHKKGRKGQDKESPEFNGKRASGSHGSAHEGGKGMKPKHESSNDDDNDDKKKKPHHKGGCHENKVEEKKMKGKKVKGKKHHEKTLEKGRHHNRLAPLVSTAQFNPDAISKIIPNRYIIVFKRGAPQEEIDFHKENVQQAQLQSVENLSAEDAFFISTKDTSLSTSEAGGIQDSFNIDNLFSGYIGYFTQEIVDLIRQNPLVDFVERDSIVEATEFDTQNSAPWGLARISHRERLNLGSFNKYLYDDDAGRGVTSYVIDTGVNINHKDFEKRAIWGKTIPLNDEDLDGNGHGTHCAGTIASKHYGVAKNANVVAVKVLRSNGSGTMSDVVKGVEYAAKAHQKEAQEKKKGFKGSTANMSLGGGKSPALDLAVNAAVEVGIHFAVAAGNENQDACNTSPASADKAITVGASTLSDDRAYFSNWGKCVDVFAPGLNILSTYIGSDDATATLSGTSMASPHVAGLLTYFLSLQPGSDSEFFELGQDSLTPQQLKKKLIHYSTKDILFDIPEDTPNVLIYNGGGQDLSAFWNDTKKSHSSGFKQELNMDEFIGSKTDLIFDQVRDILDKLNII

SEQ ID NO: 1471 - protein, 683 aa, Saccharomyces cerevisiae
  strain ATCC 204508 / S288c
MTIKEHKVVYEAHNVKALKAPQHFYNSQPGKGYVTDMQHYQEMYQQSINEPEKFFDKMAKEYLHWDAPYTKVQSGSLNNGDVAWFLNGKLNASYNCVDRHAFANPDKPALIYEADDESDNKIITFGELLRKVSQIAGVLKSWGVKKGDTVAIYLPMIPEAVIAMLAVARIGAIHSVVFAGFSAGSLKDRVVDANSKVVITCDEGKRGGKTINTKKIVDEGLNGVDLVSRILVFQRTGTEGIPMKAGRDYWWHEEAAKQRTYLPPVSCDAEDPLFLLYTSGSTGSPKGVVHTTGGYLLGAALTTRYVFDIHPEDVLFTAGDVGWITGHTYALYGPLTLGTASIIFESTPAYPDYGRYWRIIQRHKATHFYVAPTALRLIKRVGEAEIAKYDTSSLRVLGSVGEPISPDLWEWYHEKVGNKNCVICDTMWQTESGSHLIAPLAGAVPTKPGSATVPFFGINACIIDPVTGVELEGNDVEGVLAVKSPWPSMARSVWNHHDRYMDTYLKPYPGHYFTGDGAGRDHDGYYWIRGRVDDVVNVSGHRLSTSEIEASISNHENVSEAAVVGIPDELTGQTVVAYVSLKDGYLQNNATEGDAEHITPDNLRRELILQVRGEIGPFASPKTIILVRDLPRTRSGKIMRRVLRKVASNEAEQLGDLTTLANPEVVPAIISAVENQFFSQKKK

SEQ ID NO: 1472 - protein, 779 aa, Saccharomyces cerevisiae
  strain ATCC 204508 / S288c
MVYTPSKGPRTLYDKVFDAHVVHQDENGSFLLYIDRHLVHEVTSPQAFEGLENAGRKVRRVDCTLATVDHNIPTESRKNFKSLDTFIKQTDSRLQVKTLENNVKQFGVPYFGMSDARQGIVHTIGPEEGFTLPGTTVVCGDSHTSTHGAFGSLAFGIGTSEVEHVLATQTIIQAKSKNMRITVNGKLSPGITSKDLILYIIGLIGTAGGTGCVIEFAGEAIEALSMEARMSMCNMAIEAGARAGMIKPDETTFQYTKGRPLAPKGAEWEKAVAYWKTLKTDEGAKFDHEINIEAVDVIPTITWGTSPQDALPITGSVPDPKNVTDPIKKSGMERALAYMGLEPNTPLKSIKVDKVFIGSCTNGRIEDLRSAAAVVRGQKLASNIKLAMVVPGSGLVKKQAEAEGLDKIFQEAGFEWREAGCSICLGMNPDILDAYERCASTSNRNFEGRQGALSRTHLMSPAMAAAAGIAGHFVDIREFEYKDQDQSSPKVEVTSEDEKELESAAYDHAEPVQPEDAPQDIANDELKDIPVKSDDTPAKPSSSGMKPFLTLEGISAPLDKANVDTDAIIPKQFLKTIKRTGLKKGLFYEWRFRKDDQGKDQETDFVLNVEPWREAEILVVTGDNFGCGSSREHAPWALKDFGIKSIIAPSYGDIFYNNSFKNGLLPIRLDQQIIIDKLIPIANKGGKLCVDLPNQKILDSDGNVLVDHFEIEPFRKHCLVNGLDDIGITLQKEEYISRYEALRREKYSFLEGGSKLLKFDNVPKRKAVTTTFDKVHQDW

SEQ ID NO: 1473 - protein, 811 aa, Saccharomyces cerevisiae
  strain ATCC 204508 / S288c
MLRQATKAPIQKYLQRTQLLRRSTPRIYTIVQCKRSICSFNARPRVANKLLSDIKTNALNEVAISTCALKSSYGLPNFKRTYVQMRMDPNQQPEKPALEQFGTNLTKLARDGKLDPVIGRDEEIARAIQILSRRTKNNPCLIGRAGVGKTALIDGLAQRIVAGEVPDSLKDKDLVALDLGSLIAGAKYRGEFEERLKKVLEEIDKANGKVIVFIDEVHMLLGLGKTDGSMDASNILKPKLARGLRCISATTLDEFKIIEKDPALSRRFQPILLNEPSVSDTISILRGLKERYEVHHGVRITDTALVSAAVLSNRYITDRFLPDKAIDLVDEACAVLRLQHESKPDEIQKLDRAIMKIQIELESLKKETDPVSVERREALEKDLEMKNDELNRLTKIWDAERAEIESIKNAKANLEQARIELEKCQREGDYTKASELRYSRIPDLEKKVALSEKSKDGDKVNLLHDSVTSDDISKVVAKMTGIPTETVMKGDKDRLLYMENSLKERVVGQDEAIAAISDAVRLQRAGLTSEKRPIASFMFLGPTGTGKTELTKALAEFLFDDESNVIRFDMSEFQEKHTVSRLIGAPPGYVLSESGGQLTEAVRRKPYAVVLFDEFEKAHPDVSKLLLQVLDEGKLTDSLGHHVDFRNTIIVMTSNIGQDILLNDTKLGDDGKIDTATKNKVIEAMKRSYPPEFINRIDDILVFNRLSKKVLRSIVDIRIAEIQDRLAEKRMKIDLTDEAKDWLTDKGYDQLYGARPLNRLIHRQILNSMATFLLKGQIRNGETVRVVVKDTKLVVLPNHEEGEVVEEEAEK

SEQ ID NO: 1474 - protein, 62 aa, Saccharomyces cerevisiae; identical to SEQ ID NO: 549
  strain ATCC 204508 / S288c

SEQ ID NO: 1475 - protein, 75 aa, Saccharomyces cerevisiae
  strain ATCC 204508 / S288c
MTKNFIVTLKKNTPDVEAKKFLDSVHHAGGSIVHEFDIIKGYTIKVPDVLHLNKLKEKHNDVIENVEEDKEVHTN

SEQ ID NO: 1476 - protein, 92 aa, Saccharomyces cerevisiae; identical to SEQ ID NO: 639
  strain ATCC 204508 / S288c

SEQ ID NO: 1477 - protein, 105 aa, Saccharomyces cerevisiae
  strain ATCC 204508 / S288c
MAPVKSQESINQKLALVIKSGKYTLGYKSTVKSLRQGKSKLIIIAANTPVLRKSELEYYAMLSKTKVYYFQGGNNELGTAVGKLFRVGVVSILEAGDSDILTTLA

SEQ ID NO: 1478 - protein, 110 aa, Saccharomyces cerevisiae
  strain ATCC 204508 / S288c
MVSQETIKHVKDLIAENEIFVASKTYCPYCHAALNTLFEKLKVPRSKVLVLQLNDMKEGADIQAALYEINGQRTVPNIYINGKHIGGNDDLQELRETGELEELLEPILAN

SEQ ID NO: 1479 - protein, 108 aa, Saccharomyces cerevisiae; identical to SEQ ID NO: 634
  strain ATCC 204508 / S288c

SEQ ID NO: 1480 - protein, 129 aa, Saccharomyces cerevisiae
  strain ATCC 204508 / S288c
MVTTLTPVICESAPAAAASYSHAMKVNNLIFLSGQIPVTPDNKLVEGSIADKAEQVIQNIKNVLEASNSSLDRVVKVNIFLADINHFAEFNSVYAKYFNTHKPARSCVAVAALPLGVDMEMEAIAAERD

SEQ ID NO: 1481 - protein, 125 aa, Saccharomyces cerevisiae
  strain ATCC 204508 / S288c
MFRSVCRISSRVAPSAYRTIMGRSVMSNTILAQRFYSANLSKDQVSQRVIDVIKAFDKNSPNIANKQISSDTQFHKDLGLDSLDTVELLVAIEEEFDIEIPDKVADELRSVGETVDYIASNPDAN

SEQ ID NO: 1482 - protein, 127 aa, Saccharomyces cerevisiae
  strain ATCC 204508 / S288c
MPQSFTSIARIGDYILKSPVLSKLCVPVANQFINLAGYKKLGLKFDDLIAEENPIMQTALRRLPEDESYARAYRIIRAHQTELTHHLLPRNEWIKAQEDVPYLLPYILEAEAAAKEKDELDNIEVSK

SEQ ID NO: 1483 - protein, 144 aa, Saccharomyces cerevisiae
  strain ATCC 204508 / S288c
MAGVSVRDVAAQDFINAYASFLQRQGKLEVPGYVDIVKTSSGNEMPPQDAEGWFYKRAASVARHIYMRKQVGVGKLNKLYGGAKSRGVRPYKHIDASGSINRKVLQALEKIGIVEISPKGGRRISENGQRDLDRIAAQTLEEDE

SEQ ID NO: 1484 - protein, 142 aa, Saccharomyces cerevisiae
  strain ATCC 204508 / S288c
MAPSAKATAAKKAVVKGTNGKKALKVRTSATFRLPKTLKLARAPKYASKAVPHYNRLDSYKVIEQPITSETAMKKVEDGNILVFQVSMKANKYQIKKAVKELYEVDVLKVNTLVRPNGTKKAYVRLTADYDALDIANRIGYI

SEQ ID NO: 1485 - protein, 150 aa, Saccharomyces cerevisiae; identical to SEQ ID NO: 546
  strain ATCC 204508 / S288c

SEQ ID NO: 1486 - protein, 151 aa, Saccharomyces cerevisiae
  strain ATCC 204508 / S288c
MGRMHSAGKGISSSAIPYSRNAPAWFKLSSESVIEQIVKYARKGLTPSQIGVLLRDAHGVTQARVITGNKIMRILKSNGLAPEIPEDLYYLIKKAVSVRKHLERNRKDKDAKFRLILIESRIHRLARYYRTVAVLPPNWKYESATASALVN

SEQ ID NO: 1487 - protein, 170 aa, Saccharomyces cerevisiae
  strain ATCC 204508 / S288c
MLRTTRLWTTRMPTVSKLFLRNSSGNALNKNKLPFLYSSQGPQAVRYTSQHEWIAVHQDKTAFVGITKYATDALGDATYVELPEVGTEIAQGESLGSIESVKSASEIYQPADGTVEEINTNLEENPGVVNEDPMGDGWLVKMKLGEGVNVEQVEGLMSLEQYEKTLVHDD

SEQ ID NO: 1488 - protein, 173 aa, Saccharomyces cerevisiae
  strain ATCC 204508 / S288c
MTHSLKALFALLFLYTAAVNAGVIGIFNALPPPNTKPINGESPLYQCDILDKQLVEIKEVNLDPNPPVRGENLTISANGEVFETIEEGAYIDVEVRLGYIRLLSQTFDLCETLEDNDIEGLSCPIEPGEYNIKKIVEIPGEVPPGKYVVVARAYTEKDDLITCLTGEVIFPPR

SEQ ID NO: 1489 - protein, 161 aa, Saccharomyces cerevisiae
  strain ATCC 204508 / S288c
MTKKDKKEVKVQTVTTEDGETVKVFEDLQGFETFIANETEDDDFDHLHCKLNYYPPFVLHESHEDPEKISDAANSHSKKFVRHLHQHIEKHLLKDIKQAVRKPELKFHEKSKEETFDKITWHYGEETEYHGRPFKIDVQVVCTHEDAMVFVDYKTHPVGAN

SEQ ID NO: 1490 - protein, 268 aa, Saccharomyces cerevisiae; identical to SEQ ID NO: 610
  strain ATCC 204508 / S288c

SEQ ID NO: 1491 - protein, 309 aa, Saccharomyces cerevisiae
  strain ATCC 204508 / S288c
MIFKRFVNLLVFLFLLGAGLLTFFLILSGGRESGTLKNFYWLQADTNGFNSAPSTTRWYNYNWCGYEDGQLANCSSRAPAKPFSPRDNFGNSVNLPSSFRNNRDTYYYLSRVGWAMLLISLFFIVLALVPGFLATFLPFKAVPVLYCVLSWLAFFFIILAACLYTGCYVKARKTFRNSGRSARLGPKNFAFIWTSVFLMLVNAIWSTIFSATHKAHSTYSDHDMYAQYESPSVDTGAQMEKSTYNSGATDGAGPITAAPVVGQPQPTTTTTPAGNGKFFQKLKTRKQVPSAELEPAGDGGLAGPVTVRD

SEQ ID NO: 1492 - protein, 312 aa, Saccharomyces cerevisiae
  strain ATCC 204508 / S288c
MSFHQQFFTLNNGNKIPAIAIIGTGTRWYKNEETDATFSNSLVEQIVYALKLPGIIHIDAAEIYRTYPEVGKALSLTEKPRNAIFLTDKYSPQIKMSDSPADGLDLALKKMGTDYVDLYLLHSPFVSKEVNGLSLEEAWKDMEQLYKSGKAKNIGVSNFAVEDLQRILKVAEVKPQVNQIEFSPFLQNQTPGIYKFCQEHDILVEAYSPLGPLQKKTAQDDSQPFFEYVKELSEKYIKSEAQIILRWVTKRGVLPVTTSSKPQRISDAQNLFSFDLTAEEVDKITELGLEHEPLRLYWNKLYGKYNYAAQKV

SEQ ID NO: 1493 - protein, 326 aa, Saccharomyces cerevisiae
  strain ATCC 204508 / S288c
MSTDSTRYPIQIEKASNDPTLLLNHTCLRVKDPARTVKFYTEHFGMKLLSRKDFEEAKFSLYFLSFPKDDIPKNKNGEPDVFSAHGVLELTHNWGTEKNPDYKINNGNEEPHRGFGHICFSVSDINKTCEELESQGVKFKKRLSEGRQKDIAFALGPDGYWIELITYSREGQEYPKGSVGNKFNHTMIRIKNPTRSLEFYQNVLGMKLLRTSEHESAKFTLYFLGYGVPKTDSVFSCESVLELTHNWGTENDPNFHYHNGNSEPQGYGHICISCDDAGALCKEIEVKYGDKIQWSPKFNQGRMKNIAFLKDPDGYSIEVVPHGLIA

SEQ ID NO: 1494 - protein, 364 aa, Saccharomyces cerevisiae
  strain ATCC 204508 / S288c
MSAPKKIVVLPGDHVGQEITAEAIKVLKAISDVRSNVKFDFENHLIGGAAIDATGVPLPDEALEASKKADAVLLGAVGGPKWGTGSVRPEQGLLKIRKELQLYANLRPCNFASDSLLDLSPIKPQFAKGTDFVVVRELVGGIYFGKRKEDDGDGVAWDSEQYTVPEVQRITRMAAFMALQHEPPLPIWSLDKANVLASSRLWRKTVEETIKNEFPTLKVQHQLIDSAAMILVKNPTHLNGIIITSNMFGDIISDEASVIPGSLGLLPSASLASLPDKNTAFGLYEPCHGSAPDLPKNKVNPIATILSAAMMLKLSLNLPEEGKAIEDAVKKVLDAGIRTGDLGGSNSTTEVGDAVAEEVKKILA

SEQ ID NO: 1495 - protein, 345 aa, Saccharomyces cerevisiae
  strain ATCC 204508 / S288c
MEAHNQFLKTFQKERHDMKEAEKDEILLMENSRRFVMFPIKYHEIWAAYKKVEASFWTAEEIELAKDTEDFQKLTDDQKTYIGNLLALSISSDNLVNKYLIENFSAQLQNPEGKSFYGFQIMMENIYSEVYSMMVDAFFKDPKNIPLFKEIANLPEVKHKAAFIERWISNDDSLYAERLVAFAAKEGIFQAGNYASMFWLTDKKIMPGLAMANRNICRDRGAYTDFSCLLFAHLRTKPNPKIIEKIITEAVEIEKEYYSNSLPVEKFGMDLKSIHTYIEFVADGLLQGFGNEKYYNAVNPFEFMEDVATAGKTTFFEKKVSDYQKASDMSKSATPSKEINFDDDF

SEQ ID NO: 1496 - protein, 371 aa, Saccharomyces cerevisiae
  strain ATCC 204508 / S288c
MFRSVATRLSACRGLASNAARKSLTIGLIPGDGIGKEVIPAGKQVLENLNSKHGLSFNFIDLYAGFQTFQETGKALPDETVKVLKEQCQGALFGAVQSPTTKVEGYSSPIVALRREMGLFANVRPVKSVEGEKGKPIDMVIVRENTEDLYIKIEKTYIDKATGTRVADATKRISEIATRRIATIALDIALKRLQTRGQATLTVTHKSNVLSQSDGLFREICKEVYESNKDKYGQIKYNEQIVDSMVYRLFREPQCFDVIVAPNLYGDILSDGAAALVGSLGVVPSANVGPEIVIGEPCHGSAPDIAGKGIANPIATIRSTALMLEFLGHNEAAQDIYKAVDANLREGSIKTPDLGGKASTQQVVDDVLSRL

SEQ ID NO: 1497 - protein, 352 aa, Saccharomyces cerevisiae
  strain ATCC 204508 / S288c
MASEKEIRRERFLNVFPKLVEELNASLLAYGMPKEACDWYAHSLNYNTPGGKLNRGLSVVDTYAILSNKTVEQLGQEEYEKVAILGWCIELLQAYFLVADDMMDKSITRRGQPCWYKVPEVGEIAINDAFMLEAAIYKLLKSHFRNEKYYIDITELFHEVTFQTELGQLMDLITAPEDKVDLSKFSLKKHSFIVTFKTAYYSFYLPVALAMYVAGITDEKDLKQARDVLIPLGEYFQIQDDYLDCFGTPEQIGKIGTDIQDNKCSWVINKALELASAEQRKTLDENYGKKDSVAEAKCKKIFNDLKIEQLYHEYEESIAKDLKAKISQVDESRGFKADVLTAFLNKVYKRSK

SEQ ID NO: 1498 - protein, 353 aa, Saccharomyces cerevisiae
  strain ATCC 204508 / S288c
MGSQDLASLIGRFKYVRVLDSNPHTKVISLLGSIDGKDAVLTAEKTHFIFDETVRRPSQSGRSTPIFFHREIDEYSFLNGITDLKELTSNDIYYWGLSVLKQHILHNPTAKVNLIWPASQFHIKGYDQQDLHVVRETPDMYRNIVVPFIQEMCTSERMKWVNNILYEGAEDDRVVYKEYSSRNKEDGFVILPDMKWDGINIDSLYLVAIVYRDDIKSLRDLNPNHRDWLIRLNKKIKTIIPQHYDYNVNPDELRVFIHYQPSYYHFHVHIVNIRHPGVGEERGSGMTILLEDVIEALGFLGPEGYMKKTLTYVIGENHDLWKKGFKEEVEKQLKHDGIATSPEKGSGFNTNLG

SEQ ID NO: 1499 - protein, 375 aa, Saccharomyces cerevisiae
  strain ATCC 204508 / S288c
MSFYQPSLSLYDVLNALSNQTGQRGQQGYPRQPQRPQRYHPHYGQVHVGGHHPRHHPLYSRYNGVPNTYYYQFPGQAYYYSPEYGYDDEDGEEEDQDEDMVGDSGTTRQEDGGEDSNSRRYPSYYHCNTARNNRTNQQANSLNDLLTALIGVPPYEGTEPEIEANTEQEGEKGEEKDKKDKSEAPKEEAGETNKEKPLNQLEESSRPPLAKKSSSFAHLQAPSPIPDPLQVSKPETRMDLPFSPEVNVYDTEDTYVVVLALPGANSRAFHIDYHPSSHEMLIKGKIEDRVGIDEKFLKITELKYGAFERTVKFPVLPRIKDEEIKATYNNGLLQIKVPKIVNDTEKPKPKKRIAIEEIPDEELEFEENPNPTVEN

SEQ ID NO: 1500 - protein, 394 aa, Saccharomyces cerevisiae
  strain ATCC 204508 / S288c
MPPKKQVEEKKVLLGRPGNNLKAGIVGLANVGKSTFFQAITRCPLGNPANYPFATIDPEEARVIVPSPRFDKLCEIYKKTASEVPAHLTVYDIAGLTKGASAGEGLGNAFLSHIRSVDSIYQVVRCFDDAEIIHVEGDVDPVRDLEIINQELRLKDIEFAQKALEGAEKIAKRGGQSLEVKQKKEEMDLITKIIKLLESGQRVANHSWTSKEVEIINSMFLLTAKPCIYLINLSERDYIRKKNKHLLRIKEWVDKYSPGDLIIPFSVSLEERLSHMSPEDAEEELKKLQTISALPKIITTMRQKLDLISFFTCGPDEVREWTIRRGTKAPQAAGVIHNDLMNTFILAQVMKCEDVFEYKDDSAIKAAGKLMQKGKDYVVEDGDIIYFRAGAGKN

SEQ ID NO: 1501 - protein, 393 aa, Saccharomyces cerevisiae
  strain ATCC 204508 / S288c
MLQRHSLKLGKFSIRTLATGAPLDASKLKITRNPNPSKPRPNEELVFGQTFTDHMLTIPWSAKEGWGTPHIKPYGNLSLDPSACVFHYAFELFEGLKAYRTPQNTITMFRPDKNMARMNKSAARICLPTFESEELIKLTGKLIEQDKHLVPQGNGYSLYIRPTMIGTSKGLGVGTPSEALLYVITSPVGPYYKTGFKAVRLEATDYATRAWPGGVGDKKLGANYAPCILPQLQAAKRGYQQNLWLFGPEKNITEVGTMNVFFVFLNKVTGKKELVTAPLDGTILEGVTRDSVLTLARDKLDPQEWDINERYYTITEVATRAKQGELLEAFGSGTAAVVSPIKEIGWNNEDIHVPLLPGEQCGALTKQVAQWIADIQYGRVNYGNWSKTVADLN

SEQ ID NO: 1502 - protein, 399 aa, Saccharomyces cerevisiae
  strain ATCC 204508 / S288c
MPKETPSKAAADALSDLEIKDSKSNLNKELETLREENRVKSDMLKEKLSKDAENHKAYLKSHQVHRHKLKEMEKEEPLLNEDKERTVLFPIKYHEIWQAYKRAEASFWTAEEIDLSKDIHDWNNRMNENERFFISRVLAFFAASDGIVNENLVENFSTEVQIPEAKSFYGFQIMIENIHSETYSLLIDTYIKDPKESEFLFNAIHTIPEIGEKAEWALRWIQDADALFGERLVAFASIEGVFFSGSFASIFWLKKRGMMPGLTFSNELICRDEGLHTDFACLLFAHLKNKPDPAIVEKIVTEAVEIEQRYFLDALPVALLGMNADLMNQYVEFVADRLLVAFGNKKYYKVENPFDFMENISLAGKTNFFEKRVSDYQKAGVMSKSTKQEAGAFTFNEDF

SEQ ID NO: 1503 - protein, 424 aa, Saccharomyces cerevisiae
  strain ATCC 204508 / S288c
MSEATLSSKQTIEWENKYSAHNYHPLPVVFHKAKGAHVWDPEGKLYLDFLSAYSAVNQGHCHPHIIKALTEQAQTLTLSSRAFHNDVYAQFAKFVTEFFGFETVLPMNTGAEAVETALKLARRWGYMKKNIPQDKAIILGAEGNFHGRTFGAISLSTDYEDSKLHFGPFVPNVASGHSVHKIRYGHAEDFVPILESPEGKNVAAIILEPIQGEAGIVVPPADYFPKVSALCRKHNVLLIVDEIQTGIGRTGELLCYDHYKAEAKPDIVLLGKALSGGVLPVSCVLSSHDIMSCFTPGSHGSTFGGNPLASRVAIAALEVIRDEKLCQRAAQLGSSFIAQLKALQAKSNGIISEVRGMGLLTAIVIDPSKANGKTAWDLCLLMKDHGLLAKPTHDHIIRLAPPLVISEEDLQTGVETIAKCIDLL

SEQ ID NO: 1504 - protein, 429 aa, Saccharomyces cerevisiae
  strain ATCC 204508 / S288c
MSNKLFRLDAGYQQYDWGKIGSSSAVAQFAAHSDPSVQIEQDKPYAELWMGTHSKMPSYNHESKESLRDIISKNPSAMLGKDIIDKFHATNELPFLFKVLSIEKVLSIQAHPDKALGKILHAQDPKNYPDDNHKPEMAIAVTDFEGFCGFKPLQEIADELKRIPELRNIVGEETSRNFIENIQPSAQKGSPEDEQNKKLLQAVFSRVMNASDDKIKIQARSLVERSKNSPSDFNKPDLPELIQRLNKQFPDDVGLFCGCLLLNHCRLNAGEAIFLRAKDPHAYISGDIMECMAASDNVVRAGFTPKFKDVKNLVSMLTYTYDPVEKQKMQPLKFDRSSGNGKSVLYNPPIEEFAVLETTFDEKLGQRHFEGVDGPSILITTKGNGYIKADGQKLKAEPGFVFFIAPHLPVDLEAEDEAFTTYRAFVEPN

SEQ ID NO: 1505 - protein, 469 aa, Saccharomyces cerevisiae
  strain ATCC 204508 / S288c
MTSIDINNLQNTFQQAMNMSGSPGAVCTSPTQSFMNTVPQRLNAVKHPKILKPFSTGDMKILLLENVNQTAITIFEEQGYQVEFYKSSLPEEELIEKIKDVHAIGIRSKTRLTSNVLQHAKNLVCIGCFCIGTNQVDLDYATSRGIAVFNSPFSNSRSVAELVIAEIISLARQLGDRSIELHTGTWNKVAARCWEVRGKTLGIIGYGHIGSQLSVLAEAMGLHVLYYDIVTIMALGTARQVSTLDELLNKSDFVTLHVPATPETEKMLSAPQFAAMKDGAYVINASRGTVVDIPSLIQAVKANKIAGAALDVYPHEPAKNGEGSFNDELNSWTSELVSLPNIILTPHIGGSTEEAQSSIGIEVATALSKYINEGNSVGSVNFPEVALKSLSYDQENTVRVLYIHQNVPGVLKTVNDILSNHNIEKQFSDSNGEIAYLMADISSVDQSDIKDIYEQLNQTSAKISIRLLY

SEQ ID NO: 1506 - protein, 527 aa, Saccharomyces cerevisiae [sequence omitted]

SEQ ID NO: 1507 - protein, 511 aa, Saccharomyces cerevisiae
  strain ATCC 204508 / S288c
MPAPHGGILQDLIARDALKKNELLSEAQSSDILVWNLTPRQLCDIELILNGGFSPLTGFLNENDYSSVVTDSRLADGTLWTIPITLDVDEAFANQIKPDTRIALFQDDEIPIAILTVQDVYKPNKTIEAEKVFRGDPEHPAISYLFNVAGDYYVGGSLEAIQLPQHYDYPGLRKTPAQLRLEFQSRQWDRVVAFQTRNPMHRAHRELTVRAAREANAKVLIHPVVGLTKPGDIDHHTRVRVYQEIIKRYPNGIAFLSLLPLAMRMSGDREAVWHAIIRKNYGASHFIVGRDHAGPGKNSKGVDFYGPYDAQELVESYKHELDIEVVPFRMVTYLPDEDRYAPIDQIDTTKTRTLNISGTELRRRLRVGGEIPEWFSYPEVVKILRESNPPRPKQGFSIVLGNSLTVSREQLSIALLSTFLQFGGGRYYKIFEHNNKTELLSLIQDFIGSGSGLIIPNQWEDDKDSVVGKQNVYLLDTSSSADIQLESADEPISHIVQKVVLFLEDNGFFVF

SEQ ID NO: 1508 - protein, 619 aa, Saccharomyces cerevisiae
  strain ATCC 204508 / S288c
MVKESIIALAEHAASRASRVIPPVKLAYKNMLKDPSSKYKPFNAPKLSNRKWPDNRITRAPRWLSTDLRDGNQSLPDPMSVEQKKEYFHKLVNIGFKEIEVSFPSASQTDFDFTRYAVENAPDDVSIQCLVQSREHLIKRTVEALTGAKKATIHTYLATSDMFREIVFNMSREEAISKAVEATKLVRKLTKDDPSQQATRWSYEFSPECFSDTPGEFAVEICEAVKKAWEPTEENPIIFNLPATVEVASPNVYADQIEYFATHITEREKVCISTHCHNDRGCGVAATELGMLAGADRVEGCLFGNGERTGNVDLVTVAMNMYTQGVSPNLDFSDLTSVLDVVERCNKIPVSQRAPYGGDLVVCAFSGSHQDAIKKGFNLQNKKRAQGETQWRIPYLPLDPKDIGRDYEAVIRVNSQSGKGGAAWVILRSLGLDLPRNMQIEFSSAVQDHADSLGRELKSDEISKLFKEAYNYNDEQYQAISLVNYNVEKFGTERRVFTGQVKVGDQIVDIEGTGNGPISSLVDALSNLLNVRFAVANYTEHSLGSGSSTQAASYIHLSYRRNADNEKAYKWGVGVSEDVGDSSVRAIFATINNIIHSGDVSIPSLAEVEGKNAAASGSA

SEQ ID NO: 1509 - protein, 708 aa, Saccharomyces cerevisiae
  strain ATCC 204508 / S288c
MPSTLTINGKAPIVAYAELIAARIVNALAPNSIAIKLVDDKKAPAAKLDDATEDVFNKITSKFAAIFDNGDKEQVAKWVNLAQKELVIKNFAKLSQSLETLDSQLNLRTFILGGLKYSAADVACWGALRSNGMCGSIIKNKVDVNVSRWYTLLEMDPIFGEAHDFLSKSLLELKKSANVGKKKETHKANFEIDLPDAKMGEVVTRFPPEPSGYLHIGHAKAALLNQYFAQAYKGKLIIRFDDTNPSKEKEEFQDSILEDLDLLGIKGDRITYSSDYFQEMYDYCVQMIKDGKAYCDDTPTEKMREERMDGVASARRDRSVEENLRIFTEEMKNGTEEGLKNCVRAKIDYKALNKTLRDPVIYRCNLTPHHRTGSTWKIYPTYDFCVPIVDAIEGVTHALRTIEYRDRNAQYDWMLQALRLRKVHIWDFARINFVRTLLSKRKLQWMVDKDLVGNWDDPRFPTVRGVRRRGMTVEGLRNFVLSQGPSRNVINLEWNLIWAFNKKVIDPIAPRHTAIVNPVKIHLEGSEAPQEPKIEMKPKHKKNPAVGEKKVIYYKDIVVDKDDADVINVDEEVTLMDWGNVIITKKNDDGSMVAKLNLEGDFKKTKHKLTWLADTKDVVPVDLVDFDHLITKDRLEEDESFEDFLTPQTEFHTDAIADLNVKDMKIGDIIQFERKGYYRLDALPKDGKPYVFFTIPDGKSVNKYGAKK

SEQ ID NO: 1510 - protein, 734 aa, Saccharomyces cerevisiae
  strain ATCC 204508 / S288c
MSASEAGVTEQVKKLSVKDSSNDAVKPNKKENKKSKQQSLYLDPEPTFIEERIEMFDRLQKEYNDKVASMPRVPLKIVLKDGAVKEATSWETTPMDIAKGISKSLADRLCISKVNGQLWDLDRPFEGEANEEIKLELLDFESDEGKKVFWHSSAHVLGESCECHLGAHICLGPPTDDGFFYEMAVRDSMKDISESPERTVSQADFPGLEGVAKNVIKQKQKFERLVMSKEDLLKMFHYSKYKTYLVQTKVPDGGATTVYRCGKLIDLCVGPHIPHTGRIKAFKLLKNSSCYFLGDATNDSLQRVYGISFPDKKLMDAHLKFLAEASMRDHRKIGKEQELFLFNEMSPGSCFWLPHGTRIYNTLVDLLRTEYRKRGYEEVITPNMYNSKLWETSGHWANYKENMFTFEVEKETFGLKPMNCPGHCLMFKSRERSYRELPWRVADFGVIHRNEFSGALSGLTRVRRFQQDDAHIFCTHDQIESEIENIFNFLQYIYGVFGFEFKMELSTRPEKYVGKIETWDAAESKLESALKKWGGNWEINAGDGAFYGPKIDIMISDALRRWHQCATIQLDFQLPNRFELEFKSKDQDSESYERPVMIHRAILGSVERMTAILTEHFAGKWPFWLSPRQVLVVPVGVKYQGYAEDVRNKLHDAGFYADVDLTGNTLQKKVRNGQMLKYNFIFIVGEQEMNEKSVNIRNRDVMEQQGKNATVSVEEVLKQLRNLKDEKRGDNVLA

SEQ ID NO: 1511 - protein, 799 aa, Saccharomyces cerevisiae
  strain ATCC 204508 / S288c
MVLPILPLIDDLASWNSKKEYVSLVGQVLLDGSSLSNEEILQFSKEEEVPLVALSLPSGKFSDDEIIAFLNNGVSSLFIASQDAKTAEHLVEQLNVPKERVVVEENGVFSNQFMVKQKFSQDKIVSIKKLSKDMLTKEVLGEVRTDRPDGLYTTLVVDQYERCLGLVYSSKKSIAKAIDLGRGVYYSRSRNEIWIKGETSGNGQKLLQISTDCDSDALKFIVEQENVGFCHLETMSCFGEFKHGLVGLESLLKQRLQDAPEESYTRRLFNDSALLDAKIKEEAEELTEAKGKKELSWEAADLFYFALAKLVANDVSLKDVENNLNMKHLKVTRRKGDAKPKFVGQPKAEEEKLTGPIHLDVVKASDKVGVQKALSRPIQKTSEIMHLVNPIIENVRDKGNSALLEYTEKFDGVKLSNPVLNAPFPEEYFEGLTEEMKEALDLSIENVRKFHAAQLPTETLEVETQPGVLCSRFPRPIEKVGLYIPGGTAILPSTALMLGVPAQVAQCKEIVFASPPRKSDGKVSPEVVYVAEKVGASKIVLAGGAQAVAAMAYGTETIPKVDKILGPGNQFVTAAKMYVQNDTQALCSIDMPAGPSEVLVIADEDADVDFVASDLLSQAEHGIDSQVILVGVNLSEKKIQEIQDAVHNQALQLPRVDIVRKCIAHSTIVLCDGYEEALEMSNQYAPEHLILQIANANDYVKLVDNAGSVFVGAYTPESCGDYSSGTNHTLPTYGYARQYSGANTATFQKFITAQNITPEGLENIGRAVMCVAKKEGLDGHRNAVKIRMSKLGLIPKDFQ

SEQ ID NO: 1512 - protein, 1002 aa, Saccharomyces cerevisiae
  strain ATCC 204508 / S288c
MAKKSKKNQQNYWDEEFEEDAAQNEEISATPTPNPESSAGADDTSREASASAEGAEAIEGDFMSTLKQSKKKQEKKVIEEKKDGKPILKSKKEKEKEKKEKEKQKKKEQAARKKAQQQAQKEKNKELNKQNVEKAAAEKAAAEKSQKSKGESDKPSASAKKPAKKVPAGLAALRRQLELKKQLEEQEKLEREEEERLEKEEEERLANEEKMKEEAKAAKKEKEKAKREKRKAEGKLLTRKQKEEKKLLERRRAALLSSGNVKVAGLAKKDGEENKPKKVVYSKKKKRTTQENASEAIKSDSKKDSEVVPDDELKESEDVLIDDWENLALGDDDEEGTNEETQESTASHENEDQNQGEEEEEGEEEEEEEEERAHVHEVAKSTPAATPAATPTPSSASPNKKDLRSPICCILGHVDTGKTKLLDKIRQTNVQGGEAGGITQQIGATYFPIDAIKAKTKVMAEYEKQTFDVPGLLVIDTPGHESFSNLRSRGSSLCNIAILVIDIMHGLEQQTIESIKLLRDRKAPFVVALNKIDRLYDWKAIPNNSFRDSFAKQSRAVQEEFQSRYSKIQLELAEQGLNSELYFQNKNMSKYVSIVPTSAVTGEGVPDLLWLLLELTQKRMSKQLMYLSHVEATILEVKVVEGFGTTIDVILSNGYLREGDRIVLCGMNGPIVTNIRALLTPQPLRELRLKSEYVHHKEVKAALGVKIAANDLEKAVSGSRLLVVGPEDDEDELMDDVMDDLTGLLDSVDTTGKGVVVQASTLGSLEALLDFLKDMKIPVMSIGLGPVYKRDVMKASTMLEKAPEYAVMLCFDVKVDKEAEQYAEQEGIKIFNADVIYHLFDSFTAYQEKLLEERRKDFLDYAIFPCVLQTLQIINKRGPMIIGVDVLEGTLRVGTPICAVKTDPTTKERQTLILGKVISLEINHQPVQEVKKGQTAAGVAVRLEDPSGQQPIWGRHVDENDTLYSLVSRRSIDTLKDKAFRDQVARSDWLLLKKLKVVFGIE

SEQ ID NO: 1513 - protein, 1024 aa, Saccharomyces cerevisiae
  strain ATCC 204508 / S288c
MSSNNSGLSAAGEIDESLYSRQLYVLGKEAMLKMQTSNVLILGLKGLGVEIAKNVVLAGVKSMTVFDPEPVQLADLSTQFFLTEKDIGQKRGDVTRAKLAELNAYVPVNVLDSLDDVTQLSQFQVVVATDTVSLEDKVKINEFCHSSGIRFISSETRGLFGNTFVDLGDEFTVLDPTGEEPRTGMVSDIEPDGTVTMLDDNRHGLEDGNFVRFSEVEGLDKLNDGTLFKVEVLGPFAFRIGSVKEYGEYKKGGIFTEVKVPRKISFKSLKQQLSNPEFVFSDFAKFDRAAQLHLGFQALHQFAVRHNGELPRTMNDEDANELIKLVTDLSVQQPEVLGEGVDVNEDLIKELSYQARGDIPGVVAFFGGLVAQEVLKACSGKFTPLKQFMYFDSLESLPDPKNFPRNEKTTQPVNSRYDNQIAVFGLDFQKKIANSKVFLVGSGAIGCEMLKNWALLGLGSGSDGYIVVTDNDSIEKSNLNRQFLFRPKDVGKNKSEVAAEAVCAMNPDLKGKINAKIDKVGPETEEIFNDSFWESLDFVTNALDNVDARTYVDRRCVFYRKPLLESGTLGTKGNTQVIIPRLTESYSSSRDPPEKSIPLCTLRSFPNKIDHTIAWAKSLFQGYFTDSAENVNMYLTQPNFVEQTLKQSGDVKGVLESISDSLSSKPHNFEDCIKWARLEFEKKFNHDIKQLLFNFPKDAKTSNGEPFWSGAKRAPTPLEFDIYNNDHFHFVVAGASLRAYNYGIKSDDSNSKPNVDEYKSVIDHMIIPEFTPNANLKIQVNDDDPDPNANAANGSDEIDQLVSSLPDPSTLAGFKLEPVDFEKDDDTNHHIEFITACSNCRAQNYFIETADRQKTKFIAGRIIPAIATTTSLVTGLVNLELYKLIDNKTDIEQYKNGFVNLALPFFGFSEPIASPKGEYNNKKYDKIWDRFDIKGDIKLSDLIEHFEKDEGLEITMLSYGVSLLYASFFPPKKLKERLNLPITQLVKLVTKKDIPAHVSTMILEICADDKEGEDVEVPFITIHL

SEQ ID NO: 1514 - protein, 2233 aa, Saccharomyces cerevisiae
  strain ATCC 204508 / S288c
MSEESLFESSPQKMEYEITNYSERHTELPGHFIGLNTVDKLEESPLRDFVKSHGGHTVISKILIANNGIAAVKEIRSVRKWAYETFGDDRTVQFVAMATPEDLEANAEYIRMADQYIEVPGGTNNNNYANVDLIVDIAERADVDAVWAGWGHASENPLLPEKLSQSKRKVIFIGPPGNAMRSLGDKISSTIVAQSAKVPCIPWSGTGVDTVHVDEKTGLVSVDDDIYQKGCCTSPEDGLQKAKRIGFPVMIKASEGGGGKGIRQVEREEDFIALYHQAANEIPGSPIFIMKLAGRARHLEVQLLADQYGTNISLFGRDCSVQRRHQKIIEEAPVTIAKAETFHEMEKAAVRLGKLVGYVSAGTVEYLYSHDDGKFYFLELNPRLQVEHPTTEMVSGVNLPAAQLQIAMGIPMHRISDIRTLYGMNPHSASEIDFEFKTQDATKKQRRPIPKGHCTACRITSEDPNDGFKPSGGTLHELNFRSSSNVWGYFSVGNNGNIHSFSDSQFGHIFAFGENRQASRKHMVVALKELSIRGDFRTTVEYLIKLLETEDFEDNTITTGWLDDLITHKMTAEKPDPTLAVICGAATKAFLASEEARHKYIESLQKGQVLSKDLLQTMFPVDFIHEGKRYKFTVAKSGNDRYTLFINGSKCDIILRQLSDGGLLIAIGGKSHTIYWKEEVAATRLSVDSMTTLLEVENDPTQLRTPSPGKLVKFLVENGEHIIKGQPYAEIEVMKMQMPLVSQENGIVQLLKQPGSTIVAGDIMAIMTLDDPSKVKHALPFEGMLPDFGSPVIEGTKPAYKFKSLVSTLENILKGYDNQVIMNASLQQLIEVLRNPKLPYSEWKLHISALHSRLPAKLDEQMEELVARSLRRGAVFPARQLSKLIDMAVKNPEYNPDKLLGAVVEPLADIAHKYSNGLEAHEHSIFVHFLEEYYEVEKLFNGPNVREENIILKLRDENPKDLDKVALTVLSHSKVSAKNNLILAILKHYQPLCKLSSKVSAIFSTPLQHIVELESKATAKVALQAREILIQGALPSVKERTEQIEHILKSSVVKVAYGSSNPKRSEPDLNILKDLIDSNYVVFDVLLQFLTHQDPVVTAAAAQVYIRRAYRAYTIGDIRVHEGVTVPIVEWKFQLPSAAFSTFPTVKSKMGMNRAVSVSDLSYVANSQSSPLREGILMAVDHLDDVDEILSQSLEVIPRHQSSSNGPAPDRSGSSASLSNVANVCVASTEGFESEEEILVRLREILDLNKQELINASIRRITFMFGFKDGSYPKYYTFNGPNYNENETIRHIEPALAFQLELGRLSNFNIKPIFTDNRNIHVYEAVSKTSPLDKRFFTRGIIRTGHIRDDISIQEYLTSEANRLMSDILDNLEVTDTSNSDLNHIFINFIAVFDISPEDVEAAFGGFLERFGKRLLRLRVSSAEIRIIIKDPQTGAPVPLRALINNVSGYVIKTEMYTEVKNAKGEWVFKSLGKPGSMHLRPIATPYPVKEWLQPKRYKAHLMGTTYVYDFPELFRQASSSQWKNFSADVKLTDDFFISNELIEDENGELTEVEREPGANAIGMVAFKITVKTPEYPRGRQFVVVANDITFKIGSFGPQEDEFFNKVTEYARKRGIPRIYLAANSGARIGMAEEIVPLFQVAWNDAANPDKGFQYLYLTSEGMETLKKFDKENSVLTERTVINGEERFVIKTIIGSEDGLGVECLRGSGLIAGATSRAYHDIFTITLVTCRSVGIGAYLVRLGQRAIQVEGQPIILTGAPAINKMLGREVYTSNLQLGGTQIMYNNGVSHLTAVDDLAGVEKIVEWMSYVPAKRNMPVPILETKDTWDRPVDFTPTNDETYDVRWMIEGRETESGFEYGLFDKGSFFETLSGWAKGVVVGRARLGGIPLGVIGVETRTVENLIPADPANPNSAETLIQEPGQVWHPNSAFKTAQAINDFNNGEQLPMMILANWRGFSGGQRDMFNEVLKYGSFIVDALVDYKQPIIIYIPPTGELRGGSWVVVDPTINADQMEMYADVNARAGVLEPQGMVGIKFRREKLLDTMNRLDDKYRELRSQLSNKSLAPEVHQQISKQLADRERELLPIYGQISLQFADLHDRSSRMVAKGVISKELEWTEARRFFFWRLRRRLNEEYLIKRLSHQVGEASRLEKIARIRSWYPASVDHEDDRQVATWIEENYKTLDDKLKGLKLESFAQDLAKKIRSDHDNAIDGLSEVIKMLSTDDKEKLLKTLK

SEQ ID NO: 1515 - protein, 77 aa, Saccharomyces cerevisiae; identical to SEQ ID NO: 645
  strain ATCC 204508 / S288c

SEQ ID NO: 1516 - protein, 79 aa, Saccharomyces cerevisiae; identical to SEQ ID NO: 552
  strain ATCC 204508 / S288c

SEQ ID NO: 1517 - protein, 86 aa, Saccharomyces cerevisiae; identical to SEQ ID NO: 591
  strain ATCC 204508 / S288c

SEQ ID NO: 1518 - protein, 93 aa, Saccharomyces cerevisiae; identical to SEQ ID NO: 589
  strain ATCC 204508 / S288c

SEQ ID NO: 1519 - protein, 100 aa, Saccharomyces cerevisiae; identical to SEQ ID NO: 616
  strain ATCC 204508 / S288c

SEQ ID NO: 1520 - protein, 98 aa, Saccharomyces cerevisiae
  strain ATCC 204508 / S288c
MKSSIPITEVLPRAVGSLTFDENYNLLDTSGVAKVIEKSPIAEIIRKSNAELGRLGYSVYEDAQYIGHAFKKAGHFIVYFTPKNKNREGVVPPVGITN

SEQ ID NO: 1521 - protein, 106 aa, Saccharomyces cerevisiae; identical to SEQ ID NO: 587
  strain ATCC 204508 / S288c

SEQ ID NO: 1522 - protein, 107 aa, Saccharomyces cerevisiae; identical to SEQ ID NO: 635
  strain ATCC 204508 / S288c

SEQ ID NO: 1523 - protein, 119 aa, Saccharomyces cerevisiae; identical to SEQ ID NO: 629
  strain ATCC 204508 / S288c

SEQ ID NO: 1524 - protein, 113 aa, Saccharomyces cerevisiae; identical to SEQ ID NO: 537
  strain ATCC 204508 / S288c

SEQ ID NO: 1525 - protein, 132 aa, Saccharomyces cerevisiae
  strain ATCC 204508 / S288c
MSGGKGGKAGSAAKASQSRSAKAGLTFPVGRVHRLLRRGNYAQRIGSGAPVYLTAVLEYLAAEILELAGNAARDNKKTRIIPRHLQLAIRNDDELNKLLGNVTIAQGGVLPNIHQNLLPKKSAKTAKASQEL

SEQ ID NO: 1526 - protein, 137 aa, Saccharomyces cerevisiae
  strain ATCC 204508 / S288c
MSGNGAQGTKFRISLGLPVGAIMNCADNSGARNLYIIAVKGSGSRLNRLPAASLGDMVMATVKKGKPELRKKVMPAIVVRQAKSWRRRDGVFLYFEDNAGVIANPKGEMKGSAITGPVGKECADLWPRVASNSGVVV

SEQ ID NO: 1527 - protein, 126 aa, Saccharomyces cerevisiae
  strain ATCC 204508 / S288c
MSWQAYTDNLIGTGKVDKAVIYSRAGDAVWATSGGLSLQPNEIGEIVQGFDNPAGLQSNGLHIQGQKFMLLRADDRSIYGRHDAEGVVCVRTKQTVIIAHYPPTVQAGEATKIVEQLADYLIGVQY

SEQ ID NO: 1528 - protein, 139 aa, Saccharomyces cerevisiae
  strain ATCC 204508 / S288c
MWKAVMNAWNGTESQSKNVSNIQSYSFEDMKRIVGKHDPNVVLVDVREPSEYSIVHIPASINVPYRSHPDAFALDPLEFEKQIGIPKPDSAKELIFYCASGKRGGEAQKVASSHGYSNTSLYPGSMNDWVSHGGDKLDL

SEQ ID NO: 1529 - protein, 145 aa, Saccharomyces cerevisiae; identical to SEQ ID NO: 570
  strain ATCC 204508 / S288c

SEQ ID NO: 1530 - protein, 174 aa, Saccharomyces cerevisiae
  strain ATCC 204508 / S288c
MSAIPENANVTVLNKNEKKARELIGKLGLKQIPGIIRVTFRKKDNQIYAIEKPEVFRSAGGNYVVFGEAKVDNFTQKLAAAQQQAQASGIMPSNEDVATKSPEDIQADMQAAAEGSVNAAAEEDDEEGEVDAGDLNKDDIELVVQQTNVSKNQAIKALKAHNGDLVNAIMSLSK

SEQ ID NO: 1531 - protein, 181 aa, Saccharomyces cerevisiae
  strain ATCC 204508 / S288c
MGLFASKLFSNLFGNKEMRILMVGLDGAGKTTVLYKLKLGEVITTIPTIGFNVETVQYKNISFTVWDVGGQDRIRSLWRHYYRNTEGVIFVVDSNDRSRIGEAREVMQRMLNEDELRNAAWLVFANKQDLPEAMSAAEITEKLGLHSIRNRPWFIQATCATSGEGLYEGLEWLSNSLKNST

SEQ ID NO: 1532 - protein, 187 aa, Saccharomyces cerevisiae; identical to SEQ ID NO: 497
  strain ATCC 204508 / S288c

SEQ ID NO: 1533 - protein, 198 aa, Saccharomyces cerevisiae
  strain ATCC 204508 / S288c
MDIILGIRVQDSVILASSKAVTRGISVLKDSDDKTRQLSPHTLMSFAGEAGDTVQFAEYIQANIQLYSIREDYELSPQAVSSFVRQELAKSIRSRRPYQVNVLIGGYDKKKNKPELYQIDYLGTKVELPYGAHGYSGFYTFSLLDHHYRPDMTTEEGLDLLKLCVQELEKRMPMDFKGVIVKIVDKDGIRQVDDFQAQ

SEQ ID NO: 1534 - protein, 213 aa, Saccharomyces cerevisiae; identical to SEQ ID NO: 489
  strain ATCC 204508 / S288c

SEQ ID NO: 1535 - protein, 227 aa, Saccharomyces cerevisiae
  strain ATCC 204508 / S288c
MSPMKVAVVGASGKVGRLLINQLKANDSFSTPLAIVRTQDQVNYFKNEVGVDASLTDIENASVSEITDAIKAYDAVVFSAGAGGKGMERIFTVDLDGCIKVVEACEKAGIKRFVVVSALKAEDRDFWYNIKGLREYYIAKRSADREVRNSNLDYTILQPGSLELNKGTGLLQPLDKLEEKASVNYSINREDVASFIVESLLHPNATVKKTISLVNGNEPMEKFIQSL

SEQ ID NO: 1536 - protein, 231 aa, Saccharomyces cerevisiae
  strain ATCC 204508 / S288c
MFLRNVRVISLNSRRLFRTMSTVKGKPEDAKIIEARHVKETSDCKWIGLQKIIYKDPNGKEREWDSAVRTTRSSGGVDGIGILTILKYKDGKPDEILLQKQFRPPVEGVCIEMPAGLIDAGEDIDTAALRELKEETGYSGKIISKSPTVFNDPGFTNTNLCLVTVEVDMSLPENQKPVTQLEDNEFIECFSVELHKFPDEMVKLDQQGYKLDARVQNVAQGILMAKQYHIK

SEQ ID NO: 1537 - protein, 245 aa, Saccharomyces cerevisiae
  strain ATCC 204508 / S288c
MATRTQFENSNEIGVFSKLTNTYCLVAVGGSENFYSAFEAELGDAIPIVHTTIAGTRIIGRMTAGNRRGLLVPTQTTDQELQHLRNSLPDSVKIQRVEERLSALGNVICCNDYVALVHPDIDRETEELISDVLGVEVFRQTISGNILVGSYCSLSNQGGLVHPQTSVQDQEELSSLLQVPLVAGTVNRGSSVVGAGMVVNDYLAVTGLDTTAPELSVIESIFRLQDAQPESISGNLRDTLIETYS

SEQ ID NO: 1538 - protein, 234 aa, Saccharomyces cerevisiae
  strain ATCC 204508 / S288c
MSLPIIKVHWLDHSRAFRLLWLLDHLNLEYEIVPYKRDANFRAPPELKKIHPLGRSPLLEVQDRETGKKKILAESGFIFQYVLQHFDHSHVLMSEDADIADQINYYLFYVEGSLQPPLMIEFILSKVKDSGMPFPISYLARKVADKISQAYSSGEVKNQFDFVEGEISKNNGYLVDGKLSGADILMSFPLQMAFERKFAAPEDYPAISKWLKTITSEESYAASKEKARALGSNF

SEQ ID NO: 1539 - protein, 240 aa, Saccharomyces cerevisiae; identical to SEQ ID NO: 482
  strain ATCC 204508 / S288c

SEQ ID NO: 1540 - protein, 234 aa, Saccharomyces cerevisiae
  strain ATCC 204508 / S288c
MRFLRGFVFSLAFTLYKVTATAEIGSEINVENEAPPDGLSWEEWHMDHEHQLKDYTPETFFALHDIKKKGFLDENDILSLYGLNREEIVGAGDGMGQHDESEKIDNEMAKRVVSLIMRLLDVDDNTKITKEEYLQFAKRGNKFPDLGVGVGHHSDFELEYEIHHWNKFHKDKDPDVKVVHKEDIEHELLHHEHEIEHEEEIQRGASRATVITDDELESRIELKNIPEKFKNGIF

SEQ ID NO: 1541 - protein, 251 aa, Saccharomyces cerevisiae
  strain ATCC 204508 / S288c
MLDLLRLQLTTFIMNDVPTPYACYFQDSATPNQEGILELHDNIMFYLLVILGLVSWMLYTIVMTYSKNPIAYKYIKHGQTIEVIWTIFPAVILLIIAFPSFILLYLCDEVISPAMTIKAIGYQWYWKYEYSDFINDSGETVEFESYVIPDELLEEGQLRLLDTDTSMVVPVDTHIRFVVTAADVIHDFAIPSLGIKVDATPGRLNQVSALIQREGVFYGACSELCGTGHANMPIKIEAVSLPKFLEWLNEQ

SEQ ID NO: 1542 - protein, 258 aa, Saccharomyces cerevisiae
  strain ATCC 204508 / S288c
MLEAKFEEASLFKRIIDGFKDCVQLVNFQCKEDGIIAQAVDDSRVLLVSLEIGVEAFQEYRCDHPVTLGMDLTSLSKILRCGNNTDTLTLIADNTPDSIILLFEDTKKDRIAEYSLKLMDIDADFLKIEELQYDSTLSLPSSEFSKIVRDLSQLSDSINIMITKETIKFVADGDIGSGSVIIKPFVDMEHPETSIKLEMDQPVDLTFGAKYLLDIIKGSSLSDRVGIRLSSEAPALFQFDLKSGFLQFFLAPKFNDEE

SEQ ID NO: 1543 - protein, 260 aa, Saccharomyces cerevisiae
  strain ATCC 204508 / S288c
MFLTRSEYDRGVSTFSPEGRLFQVEYSLEAIKLGSTAIGIATKEGVVLGVEKRATSPLLESDSIEKIVEIDRHIGCAMSGLTADARSMIEHARTAAVTHNLYYDEDINVESLTQSVCDLALRFGEGASGEERLMSRPFGVALLIAGHDADDGYQLFHAEPSGTFYRYNAKAIGSGSEGAQAELLNEWHSSLTLKEAELLVLKILKQVMEEKLDENNAQLSCITKQDGFKIYDNEKTAELIKELKEKEAAESPEEADVEMS

SEQ ID NO: 1544 - protein, 266 aa, Saccharomyces cerevisiae
  strain ATCC 204508 / S288c
MLNVLLRRKAFCLVTKKGMATATTAAATHTPRLKTFKVYRWNPDEPSAKPHLQSYQVDLNDCGPMVLDALLKIKDEQDSTLTFRRSCREGICGSCAMNIGGRNTLACICKIDQNESKQLKIYPLPHMFIVKDLVPDLTNFYQQYKSIQPYLQRSSFPKDGTEVLQSIEDRKKLDGLYECILCACCSTSCPSYWWNQEQYLGPAVLMQAYRWLIDSRDQATKTRKAMLNNSMSLYRCHTIMNCTRTCPKGLNPGLAIAEIKKSLAFA

SEQ ID NO: 1545 - protein, 287 aa, Saccharomyces cerevisiae
  strain ATCC 204508 / S288c
MQAIADSFSVPNRLVKELQYDNEQNLESDFVTGASQFQRLAPSLTVPPIASPQQFLRAHTDDSRNPDCKIKIAHGTTTLAFRFQGGIIVAVDSRATAGNWVASQTVKKVIEINPFLLGTMAGGAADCQFWETWLGSQCRLHELREKERISVAAASKILSNLVYQYKGAGLSMGTMICGYTRKEGPTIYYVDSDGTRLKGDIFCVGSGQTFAYGVLDSNYKWDLSVEDALYLGKRSILAAAHRDAYSGGSVNLYHVTEDGWIYHGNHDVGELFWKVKEEEGSFNNVIG

SEQ ID NO: 1546 - protein, 297 aa, Saccharomyces cerevisiae; identical to SEQ ID NO: 603
  strain ATCC 204508 / S288c

SEQ ID NO: 1547 - protein, 309 aa, Saccharomyces cerevisiae
  strain ATCC 204508 / S288c
MFSNLSKRWAQRTLSKSFYSTATGAASKSGKLTQKLVTAGVAAAGITASTLLYADSLTAEAMTAAEHGLHAPAYAWSHNGPFETFDHASIRRGYQVYREVCAACHSLDRVAWRTLVGVSHTNEEVRNMAEEFEYDDEPDEQGNPKKRPGKLSDYIPGPYPNEQAARAANQGALPPDLSLIVKARHGGCDYIFSLLTGYPDEPPAGVALPPGSNYNPYFPGGSIAMARVLFDDMVEYEDGTPATTSQMAKDVTTFLNWCAEPEHDERKRLGLKTVIILSSLYLLSIWVKKFKWAGIKTRKFVFNPPKPRK

SEQ ID NO: 1548 - protein, 304 aa, Saccharomyces cerevisiae
  strain ATCC 204508 / S288c
MVTQQEKEFLESYPQNCPPDALPGTPGNLDSAQEKALAELRKLLEDAGFIERLDDSTLLRFLRARKFDVQLAKEMFENCEKWRKDYGTDTILQDFHYDEKPLIAKFYPQYYHKTDKDGRPVYFEELGAVNLHEMNKVTSEERMLKNLVWEYESVVQYRLPACSRAAGHLVETSCTIMDLKGISISSAYSVMSYVREASYISQNYYPERMGKFYIINAPFGFSTAFRLFKPFLDPVTVSKIFILGSSYQKELLKQIPAENLPVKFGGKSEVDESKGGLYLSDIGPWRDPKYIGPEGEAPEAFSMK

SEQ ID NO: 1549 - protein, 322 aa, Saccharomyces cerevisiae
  strain ATCC 204508 / S288c
MPLNKSNIREYKLVVVGGGGVGKSALTIQLTQSHFVDEYDPTIEDSYRKQVVIDDEVSILDILDTAGQEEYSAMREQYMRNGEGFLLVYSITSKSSLDELMTYYQQILRVKDTDYVPIVVVGNKSDLENEKQVSYQDGLNMAKQMNAPFLETSAKQAINVEEAFYTLARLVRDEGGKYNKTLTENDNSKQTSQDTKGSGANSVPRNSGGHRKMSNAANGKNVNSSTTVVNARNASIESKTGLAGNQATNGKTQTDRTNIDNSTGQAGQANAQSANTVNNRVNNNSKAGQVSNAKQARKQQAAPGGNTSEASKSGSGGCCIIS

SEQ ID NO: 1550 - protein, 312 aa, Saccharomyces cerevisiae
  strain ATCC 204508 / S288c
MPATLHDSTKILSLNTGAQIPQIGLGTWQSKENDAYKAVLTALKDGYRHIDTAAIYRNEDQVGQAIKDSGVPREEIFVTTKLWCTQHHEPEVALDQSLKRLGLDYVDLYLMHWPARLDPAYIKNEDILSVPTKKDGSRAVDITNWNFIKTWELMQELPKTGKTKAVGVSNFSINNLKDLLASQGNKLTPAANQVEIHPLLPQDELINFCKSKGIVVEAYSPLGSTDAPLLKEPVILEIAKKNNVQPGHVVISWHVQRGYVVLPKSVNPDRIKTNRKIFTLSTEDFEAINNISKEKGEKRVVHPNWSPFEVFK

SEQ ID NO: 1551 - protein, 329 aa, Saccharomyces cerevisiae
  strain ATCC 204508 / S288c
MLRSTVSKASLKICRHFHRESIPYDKTIKNLLLPKDTKVIFQGFTGKQGTFHASISQEYGTNVVGGTNPKKAGQTHLGQPVFASVKDAIKETGATASAIFVPPPIAAAAIKESIEAEIPLAVCITEGIPQHDMLYIAEMLQTQDKTRLVGPNCPGIINPATKVRIGIQPPKIFQAGKIGIISRSGTLTYEAVQQTTKTDLGQSLVIGMGGDAFPGTDFIDALKLFLEDETTEGIIMLGEIGGKAEIEAAQFLKEYNFSRSKPMPVASFIAGTVAGQMKGVRMGHSGAIVEGSGTDAESKKQALRDVGVAVVESPGYLGQALLDQFAKFK

SEQ ID NO: 1552 - protein, 325 aa, Saccharomyces cerevisiae
  strain ATCC 204508 / S288c
MSTNFEKHFQENVDECTLEQLRDILVNKSGKTVLANRFRALFNLKTVAEEFATKPEEAKKAIEYIAESFVNDKSELLKHEVAYVLGQTKNLDAAPTLRHVMLDQNQEPMVRHEAAEALGALGDKDSLDDLNKAAKEDPHVAVRETCELAINRINWTHGGAKDKENLQQSLYSSIDPAPPLPLEKDATIPELQALLNDPKQPLFQRYRAMFRLRDIGTDEAILALATGFSAESSLFKHEIAYVFGQIGSPAAVPSLIEVLGRKEEAPMVRHEAAEALGAIASPEVVDVLKSYLNDEVDVVRESCIVALDMYDYENSNELEYAPTAN

SEQ ID NO: 1553 - protein, 342 aa, Saccharomyces cerevisiae
  strain ATCC 204508 / S288c
MSVFVSGANGFIAQHIVDLLLKEDYKVIGSARSQEKAENLTEAFGNNPKFSMEVVPDISKLDAFDHVFQKHGKDIKIVLHTASPFCFDITDSERDLLIPAVNGVKGILHSIKKYAADSVERVVLTSSYAAVFDMAKENDKSLTFNEESWNPATWESCQSDPVNAYCGSKKFAEKAAWEFLEENRDSVKFELTAVNPVYVFGPQMFDKDVKKHLNTSCELVNSLMHLSPEDKIPELFGGYIDVRDVAKAHLVAFQKRETIGQRLIVSEARFTMQDVLDILNEDFPVLKGNIPVGKPGSGATHNTLGATLDNKKSKKLLGFKFRNLKETIDDTASQILKFEGRI

SEQ ID NO: 1554 - protein, 344 aa, Saccharomyces cerevisiae
  strain ATCC 204508 / S288c
MSSSVASTENIVENMLHPKTTEIYFSLNNGVRIPALGLGTANPHEKLAETKQAVKAAIKAGYRHIDTAWAYETEPFVGEAIKELLEDGSIKREDLFITTKVWPVLWDEVDRSLNESLKALGLEYVDLLLQHWPLCFEKIKDPKGISGLVKTPVDDSGKTMYAADGDYLETYKQLEKIYLDPNDHRVRAIGVSNFSIEYLERLIKECRVKPTVNQVETHPHLPQMELRKFCFMHDILLTAYSPLGSHGAPNLKIPLVKKLAEKYNVTGNDLLISYHIRQGTIVIPRSLNPVRISSSIEFASLTKDELQELNDFGEKYPVRFIDEPFAAILPEFTGNGPNLDNLKY

SEQ ID NO: 1555 - protein, 350 aa, Saccharomyces cerevisiae
  strain ATCC 204508 / S288c
MSKKPIVLKLGKDAFGDQAWGELEKIADVITIPESTTREQFLREVKDPQNKLSQVQVITRTARSVKNTGRFDEELALALPSSVVAVCHTGAGYDQIDVEPFKKRHIQVANVPDLVSNATADTHVFLLLGALRNFGIGNRRLIEGNWPEAGPACGSPFGYDPEGKTVGILGLGRIGRCILERLKPFGFENFIYHNRHQLPSEEEHGCEYVGFEEFLKRSDIVSVNVPLNHNTHHLINAETIEKMKDGVVIVNTARGAVIDEQAMTDALRSGKIRSAGLDVFEYEPKISKELLSMSQVLGLPHMGTHSVETRKKMEELVVENAKNVILTGKVLTIVPELQNEDWPNESKPLV

SEQ ID NO: 1556 - protein, 345 aa, Saccharomyces cerevisiae
  strain ATCC 204508 / S288c
MEGVYFNIDNGFIEGVVRGYRNGLLSNNQYINLTQCDTLEDLKLQLSSTDYGNFLSSVSSESLTTSLIQEYASSKLYHEFNYIRDQSSGSTRKFMDYITYGYMIDNVALMITGTIHDRDKGEILQRCHPLGWFDTLPTLSVATDLESLYETVLVDTPLAPYFKNCFDTAEELDDMNIEIIRNKLYKAYLEDFYNFVTEEIPEPAKECMQTLLGFEADRRSINIALNSLQSSDIDPDLKSDLLPNIGKLYPLATFHLAQAQDFEGVRAALANVYEYRGFLETGNLEDHFYQLEMELCRDAFTQQFAISTVWAWMKSKEQEVRNITWIAECIAQNQRERINNYISVY

SEQ ID NO: 1557 - protein, 365 aa, Saccharomyces cerevisiae
  strain ATCC 204508 / S288c
MVLAKQWVLKNLPTPGEPFNFHFHDPACTFELIEKELSSEQLKDGELLLETTYLSNDPAQKFWISSMDKNYAKGVQPGEIIPARGIGKVLASRNKAFSPGDYVSAVTGWTTHAIISQENVQGLRKLDKNKVGKLWWYLSVLGGTSLTAYFIFFTYAQLQEREEDYGKVYLISGAAGAVGTVCIQLALNVFKASKVIAIAGGPEKVAFVESFGDNVVGVDYKDPSFKQKLIEAAGGENTVDYFIDNVGSNVLEAGVLLLKQRAMLIACGAISAYNDPSKFVFKGYSFILTKRLVVKGVLVTDNIDDFPKALDKLGSLVKHGKIDLLKSATLEDGTGDKFKNVPLIWKGLFSGVNKGKLITKVNNEE

SEQ ID NO: 1558 - protein, 350 aa, Saccharomyces cerevisiae [sequence omitted]

SEQ ID NO: 1559 - protein, 398 aa, Saccharomyces cerevisiae
  strain ATCC 204508 / S288c
MVSLTFKNFKKEKVPLDLEPSNTILETKTKLAQSISCEESQIKLIYSGKVLQDSKTVSECGLKDGDQVVFMVSQKKSTKTKVTEPPIAPESATTPGRENSTEASPSTDASAAPAATAPEGSQPQEEQTATTERTESASTPGFVVGTERNETIERIMEMGYQREEVERALRAAFNNPDRAVEYLLMGIPENLRQPEPQQQTAAAAEQPSTAATTAEQPAEDDLFAQAAQGGNASSGALGTTGGATDAAQGGPPGSIGLTVEDLLSLRQVVSGNPEALAPLLENISARYPQLREHIMANPEVFVSMLLEAVGDNMQDVMEGADDMVEGEDIEVTGEAAAAGLGQGEGEGSFQVDYTPEDDQAISRLCELGFERDLVIQVYFACDKNEEAAANILFSDHAD

SEQ ID NO: 1560 - protein, 387 aa, Saccharomyces cerevisiae
  strain ATCC 204508 / S288c
MSAPTPLAEASQIPTIPALSPLTAKQSKGNFFSSNPISSFVVDTYKQLHSHRQSLELVNPGTVENLNKEVSRDVFLSQYFFTGLRADLNKAFSMNPAFQTSHTFSIGSQALPKYAFSALFANDNLFAQGNIDNDLSVSGRLNYGWDKKNISKVNLQISDGQPTMCQLEQDYQASDFSVNVKTLNPSFSEKGEFTGVAVASFLQSVTPQLALGLETLYSRTDGSAPGDAGVSYLTRYVSKKQDWIFSGQLQANGALIASLWRKVAQNVEAGIETTLQAGMVPITDPLMGTPIGIQPTVEGSTTIGAKYEYRQSVYRGTLDSNGKVACFLERKVLPTLSVLFCGEIDHFKNDTKIGCGLQFETAGNQELLMLQQGLDADGNPLQALPQL

SEQ ID NO: 1561 - protein, 396 aa, Saccharomyces cerevisiae
  strain ATCC 204508 / S288c
MTVYTASVTAPVNIATLKYWGKRDTKLNLPTNSSISVTLSQDDLRTLTSAATAPEFERDTLWLNGEPHSIDNERTQNCLRDLRQLRKEMESKDASLPTLSQWKLHIVSENNFPTAAGLASSAAGFAALVSAIAKLYQLPQSTSEISRIARKGSGSACRSLFGGYVAWEMGKAEDGHDSMAVQIADSSDWPQMKACVLVVSDIKKDVSSTQGMQLTVATSELFKERIEHVVPKRFEVMRKAIVEKDFATFAKETMMDSNSFHATCLDSFPPIFYMNDTSKRIISWCHTINQFYGETIVAYTFDAGPNAVLYYLAENESKLFAFIYKLFGSVPGWDKKFTTEQLEAFNHQFESSNFTARELDLELQKDVARVILTQVGSGPQETNESLIDAKTGLPKE

SEQ ID NO: 1562 - protein, 414 aa, Saccharomyces cerevisiae
  strain ATCC 204508 / S288c
MAKTTKVKGNKKEVKASKQAKEEKAKAVSSSSSESSSSSSSSSESESESESESESSSSSSSSDSESSSSSSSDSESEAETKKEESKDSSSSSSDSSSDEEEEEEKEETKKEESKESSSSDSSSSSSSDSESEKEESNDKKRKSEDAEEEEDEESSNKKQKNEETEEPATIFVGRLSWSIDDEWLKKEFEHIGGVIGARVIYERGTDRSRGYGYVDFENKSYAEKAIQEMQGKEIDGRPINCDMSTSKPAGNNDRAKKFGDTPSEPSDTLFLGNLSFNADRDAIFELFAKHGEVVSVRIPTHPETEQPKGFGYVQFSNMEDAKKALDALQGEYIDNRPVRLDFSSPRPNNDGGRGGSRGFGGRGGGRGGNRGFGGRGGARGGRGGFRPSGSGANTAPLGRSRNTASFAGSKKTFD

SEQ ID NO: 1563 - protein, 403 aa, Saccharomyces cerevisiae
  strain ATCC 204508 / S288c
MLRNLVVRNACRNRPSIQVARGLCRHQTRRLMASSPQFGRNSNQEKTAGFIMGILSMAGALYFIAPNRKPLFASRKVESDKTAEEELSSGGEQSPENEDDNNSKSDENGDDNDSKNDETEAGPQLGGDKIGASKVAEDGELVVLAEEDNKSSEDKDTDESKVSTKDDEQSNEDNATANNQKDENISSENSEENTSDKTLDNNAGSSEKKDPEHSDDEKSQQGQSDDKTTTEDNNGEEESSKKTVSDSENSAKQSESSDEEKEELRKQEEKQMGPTEEEVQHEGAYNPDTGEINWDCPCLGGMAHGPCGEEFKSAFSCFVYSEAEPKGIDCVEKFQHMQDCFRKYPEHYAEQLKETSDDEEPQDKVKVNTIESAPNVSSAKENAAKKAEQSDVKKEPLNEESKP

SEQ ID NO: 1564 - protein, 418 aa, Saccharomyces cerevisiae
  strain ATCC 204508 / S288c
MSATLFNNIELLPPDALFGIKQRYGQDQRATKVDLGIGAYRDDNGKPWVLPSVKAAEKLIHNDSSYNHEYLGITGLPSLTSNAAKIIFGTQSDAFQEDRVISVQSLSGTGALHISAKFFSKFFPDKLVYLSKPTWANHMAIFENQGLKTATYPYWANETKSLDLNGFLNAIQKAPEGSIFVLHSCAHNPTGLDPTSEQWVQIVDAIASKNHIALFDTAYQGFATGDLDKDAYAVRLGVEKLSTVSPVFVCQSFAKNAGMYGERVGCFHLALTKQAQNKTIKPAVTSQLAKIIRSEVSNPPAYGAKIVAKLLETPELTEQWHKDMVTMSSRITKMRHALRDHLVKLGTPGNWDHIVNQCGMFSFTGLTPQMVKRLEETHAVYLVASGRASIAGLNQGNVEYVAKAIDEVVRFYTIEAKL

SEQ ID NO: 1565 - protein, 411 aa, Saccharomyces cerevisiae
  strain ATCC 204508 / S288c
MEEKEGIKDSSLLEKSNVPESINEDISKTTDVDLNSDGKKDNDTSAKDGTPKVEEKVNKSSGIDEDEVVTPAEDAKEEEEEHPPLPARRKSEEEPSKENPILQELKDAFPNLEEKYIKAVIIASQGVLSPAFNALLFLSDPESGKDIELPTQPVRKNPEAPARRRQTQLEQDELLARQLDEQFNSSHSRRRNRDRATRSMHEQRRRRHNPNEREQHHEDSEEEDSWSQFVEKDLPELTDRAGRSLQDTANKVSNWISDAYRRNFASGNEQNDNQHGHQDQQEWEPEIVDLSQGGKNSRPQQPERRRFNSFGVQVGDDSLESHGITLHNEDGFEDDEDVPPQLPTRTKSGESTGKVVAETTYIDTPDTETKKKWQPLPPEPLDTTPTKVNAVSRNKKNPDEDEFLINSDDEM

SEQ ID NO: 1566 - protein, 437 aa, Saccharomyces cerevisiae
  strain ATCC 204508 / S288c
MSEEQDPLLAGLGETSGDNHTQQSHEQQPEQPQETEEHHEEEPSRVDPEQEAHNKALNQFKRKLLEHRRYDDQLKQRRQNIRDLEKLYDKTENDIKALQSIGQLIGEVMKELSEEKYIVKASSGPRYIVGVRNSVDRSKLKKGVRVTLDITTLTIMRILPRETDPLVYNMTSFEQGEITFDGIGGLTEQIRELREVIELPLKNPEIFQRVGIKPPKGVLLYGPPGTGKTLLAKAVAATIGANFIFSPASGIVDKYIGESARIIREMFAYAKEHEPCIIFMDEVDAIGGRRFSEGTSADREIQRTLMELLTQMDGFDNLGQTKIIMATNRPDTLDPALLRPGRLDRKVEIPLPNEAGRLEIFKIHTAKVKKTGEFDFEAAVKMSDGFNGADIRNCATEAGFFAIRDDRDHINPDDLMKAVRKVAEVKKLEGTIEYQKL

SEQ ID NO: 1567 - protein, 463 aa, Saccharomyces cerevisiae; identical to SEQ ID NO: 752
  strain ATCC 204508 / S288c

SEQ ID NO: 1568 - protein, 457 aa, Saccharomyces cerevisiae
  strain ATCC 204508 / S288c
MREIIHISTGQCGNQIGAAFWETICGEHGLDFNGTYHGHDDIQKERLNVYFNEASSGKWVPRSINVDLEPGTIDAVRNSAIGNLFRPDNYIFGQSSAGNVWAKGHYTEGAELVDSVMDVIRREAEGCDSLQGFQITHSLGGGTGSGMGTLLISKIREEFPDRMMATFSVLPSPKTSDTVVEPYNATLSVHQLVEHSDETFCIDNEALYDICQRTLKLNQPSYGDLNNLVSSVMSGVTTSLRYPGQLNSDLRKLAVNLVPFPRLHFFMVGYAPLTAIGSQSFRSLTVPELTQQMFDAKNMMAAADPRNGRYLTVAAFFRGKVSVKEVEDEMHKVQSKNSDYFVEWIPNNVQTAVCSVAPQGLDMAATFIANSTSIQELFKRVGDQFSAMFKRKAFLHWYTSEGMDELEFSEAESNMNDLVSEYQQYQEATVEDDEEVDENGDFGAPQNQDEPITENFE

SEQ ID NO: 1569 - protein, 463 aa, Saccharomyces cerevisiae; identical to SEQ ID NO: 811
  strain ATCC 204508 / S288c

SEQ ID NO: 1570 - protein, 462 aa, Saccharomyces cerevisiae
  strain ATCC 204508 / S288c
MLDINQFIEDKGGNPELIRQSQKARNASVEIVDEIISDYKDWVKTRFELDELNKKFNKLQKDIGLKFKNKEDASGLLAEKEKLTQQKKELTEKEQQEDKDLKKKVFQVGNIVHPSVVVSNDEENNELVRTWKPEDLEAVGPIASVTGKPASLSHHEILLRLDGYDPDRGVKICGHRGYFFRNYGVFLNQALINYGLQFLAAKGYIPLQAPVMMNKELMSKTAQLSEFDEELYKVIDGEDEKYLIATSEQPISAYHSGEWFEKPQEQLPIHYVGYSSCFRREAGSHGKDAWGVFRVHAFEKIEQFVITEPEKSWEEFEKMISYSEEFYKSLKLPYRIVGIVSGELNNAAAKKYDLEAWFPYQKEYKELVSCSNCTDYQSRNLEIRCGIKKMGDREKKYVHCLNSTLAATQRALCCILENYQTEDGLVVPEVLRKYIPGEPEFLPFVNELPKNSTSSKDKKKKN

SEQ ID NO: 1571 - protein, 471 aa, Saccharomyces cerevisiae
  strain ATCC 204508 / S288c
MSICEQYYPEEPTKPTVKTESIPGPESQKQLKELGEVFDTRPAYFLADYEKSLGNYITDVDGNTYLDLYAQISSIALGYNNPALIKAAQSPEMIRALVDRPALGNFPSKDLDKILKQILKSAPKGQDHVWSGLSGADANELAFKAAFIYYRAKQRGYDADFSEKENLSVMDNDAPGAPHLAVLSFKRAFHGRLFASGSTTCSKPIHKLDFPAFHWPHAEYPSYQYPLDENSDANRKEDDHCLAIVEELIKTWSIPVAALIIEPIQSEGGDNHASKYFLQKLRDITLKYNVVYIIDEVQTGVGATGKLWCHEYADIQPPVDLVTFSKKFQSAGYFFHDPKFIPNKPYRQFNTWCGEPARMIIAGAIGQEISDKKLTEQCSRVGDYLFKKLEGLQKKYPENFQNLRGKGRGTFIAWDLPTGEKRDLLLKKLKLNGCNVGGCAVHAVRLRPSLTFEEKHADIFIEALAKSVNEL

SEQ ID NO: 1572 - protein, 488 aa, Saccharomyces cerevisiae
  strain ATCC 204508 / S288c
MLRFTNCSCKTFVKSSYKLNIRRMNSSFRTETDAFGEIHVPADKYWGAQTQRSFQNFKIGGARERMPLPLVHAFGVLKKSAAIVNESLGGLDPKISKAIQQAADEVASGKLDDHFPLVVFQTGSGTQSNMNANEVISNRAIEILGGKIGSKQVHPNNHCNQSQSSNDTFPTVMHIAASLQIQNELIPELTNLKNALEAKSKEFDHIVKIGRTHLQDATPLTLGQEFSGYVQQVENGIQRVAHSLKTLSFLAQGGTAVGTGLNTKPGFDVKIAEQISKETGLKFQTAPNKFEALAAHDAIVECSGALNTLACSLFKIAQDIRYLGSGPRCGYHELMLPENEPGSSIMPGKVNPTQNEALTQVCVQVMGNNAAITFAGSQGQFELNVFKPVMIANLLNSIRLITDAAYSFRVHCVEGIKANEPRIHELLTKSLMLVTALNPKIGYDAASKVAKNAHKKGITLKESALELGVLTEKEFDEWVVPEHMLGPK

SEQ ID NO: 1573 - protein, 514 aa, Saccharomyces cerevisiae
  strain ATCC 204508 / S288c
MPNASQVYRSTRSSSPKTISFEEAIIQGLATDGGLFIPPTIPQVDQATLFNDWSKLSFQDLAFAIMRLYIAQEEIPDADLKDLIKRSYSTFRSDEVTPLVQNVTGDKENLHILELFHGPTYAFKDVALQFVGNLFEYFLQRTNANLPEGEKKQITVVGATSGDTGSAAIYGLRGKKDVSVFILYPTGRISPIQEEQMTTVPDENVQTLSVTGTFDNCQDIVKAIFGDKEFNSKHNVGAVNSINWARILAQMTYYFYSFFQATNGKDSKKVKFVVPSGNFGDILAGYFAKKMGLPIEKLAIATNENDILDRFLKSGLYERSDKVAATLSPAMDILISSNFERLLWYLAREYLANGDDLKAGEIVNNWFQELKTNGKFQVDKSIIEGASKDFTSERVSNEETSETIKKIYESSVNPKHYILDPHTAVGVCATERLIAKDNDKSIQYISLSTAHPAKFADAVNNALSGFSNYSFEKDVLPEELKKLSTLKKKLKFIERADVELVKNAIEEELAKMKL

SEQ ID NO: 1574 - protein, 514 aa, Saccharomyces cerevisiae
  strain ATCC 204508 / S288c
MEEQREILEQLKKTLQMLTVEPSKNNQIANEEKEKKENENSWCILEHNYEDIAQEFIDFIYKNPTTYHVVSFFAELLDKHNFKYLSEKSNWQDSIGEDGGKFYTIRNGTNLSAFILGKNWRAEKGVGVIGSHVDALTVKLKPVSFKDTAEGYGRIAVAPYGGTLNELWLDRDLGIGGRLLYKKKGTNEIKSALVDSTPLPVCRIPSLAPHFGKPAEGPFDKEDQTIPVIGFPTPDEEGNEPPTDDEKKSPLFGKHCIHLLRYVAKLAGVEVSELIQMDLDLFDVQKGTIGGIGKHFLFAPRLDDRLCSFAAMIALICYAKDVNTEESDLFSTVTLYDNEEIGSLTRQGAKGGLLESVVERSSSAFTKKPVDLHTVWANSIILSADVNHLYNPNFPEVYLKNHFPVPNVGITLSLDPNGHMATDVVGTALVEELARRNGDKVQYFQIKNNSRSGGTIGPSLASQTGARTIDLGIAQLSMHSIRAATGSKDVGLGVKFFNGFFKHWRSVYDEFGEL

SEQ ID NO: 1575 - protein, 525 aa, Saccharomyces cerevisiae
  strain ATCC 204508 / S288c
MAAGEQVSNMFDTILVLDFGSQYSHLITRRLREFNIYAEMLPCTQKISELGWTPKGVILSGGPYSVYAEDAPHVDHAIFDLNVPILGICYGMQELAWINGKQVGRGDKREYGPATLKVIDDSNSLFKGMNDSTVWMSHGDKLHGLPTGYKTIATSDNSPYCGIVHETKPIYGIQFHPEVTHSTQGKTLLKNFAVDLCHAKQNWTMENFIDTEINRIRKLVGPTAEVIGAVSGGVDSTVASKLMTEAIGDRFHAILVDNGVLRLNEAANVKKTLVEGLGINLMVVDASEEFLSKLKGVTDPEKKRKIIGNTFIHVFEREAEKIKPKDGKEIQFLLQGTLYPDVIESISFKGPSQTIKTHHNVGGLLENMKLKLIEPLRELFKDEVRHLGELLGIPHDLVWRHPFPGPGIAIRVLGEVTKEQVEIARKADNIYIEEIKKAGLYNQISQAFACLLPVKSVGVMGDQRTYDQVIALRAIETTDFMTADWFPFEHSFLKKVASRIVNEVDGVARVTYDITSKPPATVEWE

SEQ ID NO: 1576 - protein, 554 aa, Saccharomyces cerevisiae
  strain ATCC 204508 / S288c
MVKVSLDNVKLLVDVDKEPFFKPSSTTVGDILTKDALEFIVLLHRTFNNKRKQLLENRQVVQKKLDSGSYHLDFLPETANIRNDPTWQGPILAPGLINRSTEITGPPLRNMLINALNAPVNTYMTDFEDSASPTWNNMVYGQVNLYDAIRNQIDFDTPRKSYKLNGNVANLPTIIVRPRGWHMVEKHLYVDDEPISASIFDFGLYFYHNAKELIKLGKGPYFYLPKMEHHLEAKLWNDVFCVAQDYIGIPRGTIRATVLIETLPAAFQMEEIIYQLRQHSSGLNCGRWDYIFSTIKRLRNDPNHILPNRNQVTMTSPFMDAYVKRLINTCHRRGVHAMGGMAAQIPIKDDPAANEKAMTKVRNDKIRELTNGHDGSWVAHPALAPICNEVFINMGTPNQIYFIPENVVTAANLLETKIPNGEITTEGIVQNLDIGLQYMEAWLRGSGCVPINNLMEDAATAEVSRCQLYQWVKHGVTLKDTGEKVTPELTEKILKEQVERLSKASPLGDKNKFALAAKYFLPEIRGEKFSEFLTTLLYDEIVSTKATPTDLSKL

SEQ ID NO: 1577 - protein, 587 aa, Saccharomyces cerevisiae
  strain ATCC 204508 / S288c
MLWKRTCTRLIKPIAQPRGRLVRRSCYRYASTGTGSTDSSSQWLKYSVIASSATLFGYLFAKNLYSRETKEDLIEKLEMVKKIDPVNSTLKLSSLDSPDYLHDPVKIDKVVEDLKQVLGNKPENYSDAKSDLDAHSDTYFNTHHPSPEQRPRIILFPHTTEEVSKILKICHDNNMPVVPFSGGTSLEGHFLPTRIGDTITVDLSKFMNNVVKFDKLDLDITVQAGLPWEDLNDYLSDHGLMFGCDPGPGAQIGGCIANSCSGTNAYRYGTMKENIINMTIVLPDGTIVKTKKRPRKSSAGYNLNGLFVGSEGTLGIVTEATVKCHVKPKAETVAVVSFDTIKDAAACASNLTQSGIHLNAMELLDENMMKLINASESTDRCDWVEKPTMFFKIGGRSPNIVNALVDEVKAVAQLNHCNSFQFAKDDDEKLELWEARKVALWSVLDADKSKDKSAKIWTTDVAVPVSQFDKVIHETKKDMQASKLINAIVGHAGDGNFHAFIVYRTPEEHETCSQLVDRMVKRALNAEGTCTGEHGVGIGKREYLLEELGEAPVDLMRKIKLAIDPKRIMNPDKIFKTDPNEPANDYR

SEQ ID NO: 1578 - protein, 592 aa, Saccharomyces cerevisiae
  strain ATCC 204508 / S288c
MSELENAHQGPLEGSATVSTNSNSYNEKSGNSTAPGTAGYNDNLAQAKPVSSYISHEGPPKDELEELQKEVDKQLEKKSKSDLLFVSVCCLMVAFGGFVFGWDTGTISGFVRQTDFIRRFGSTRANGTTYLSDVRTGLMVSIFNIGCAIGGIVLSKLGDMYGRKIGLMTVVVIYSIGIIIQIASIDKWYQYFIGRIISGLGVGGITVLAPMLISEVSPKQLRGTLVSCYQLMITFGIFLGYCTNFGTKNYSNSVQWRVPLGLCFAWSIFMIVGMTFVPESPRYLVEVGKIEEAKRSLARANKTTEDSPLVTLEMENYQSSIEAERLAGSASWGELVTGKPQMFRRTLMGMMIQSLQQLTGDNYFFYYGTTIFQAVGLEDSFETAIVLGVVNFVSTFFSLYTVDRFGRRNCLLWGCVGMICCYVVYASVGVTRLWPNGQDQPSSKGAGNCMIVFACFYIFCFATTWAPVAYVLISESYPLRVRGKAMSIASACNWIWGFLISFFTPFITSAINFYYGYVFMGCMVFAYFYVFFFVPETKGLTLEEVNEMYEENVLPWKSTKWIPPSRRTTDYDLDATRNDPRPFYKRMFTKEK

SEQ ID NO: 1579 - protein, 595 aa, Saccharomyces cerevisiae
  strain ATCC 204508 / S288c
MPTVSVNKQQLFDLLGKNYTSQEFDELCFEFGMEMDEDTTEEALKTGEEPELKLDISANRYDLLCIEGISQSLNEYLERKERPDYKLSKPTTKLIIDKSTEQIRPFATAAVLRNIKLNEKSYASFIALQDKLHANLCRNRSLVAMGTHDLDSIEGPFHYRALPPKDIKFVPLNQTQEFTGDKLIEFYKSPEQKNNIGRYVHIIEDSPVFPVIMDSKDRVCSLPPLINSEHSKISVNTRNILIDITATDKTKAEIVLNILTTMFSRYCDEPFTVEPVEIVSEHNGQSRLAPNFNDRIMDVSIKYINSCLGLDQSADEIAHCLKKMSLHAVQSKEDKDILHVDIPVTRPDILHACDIMEDAAVGYGFNNLPKGEKLSNANFIAKPLPINKVSDIFRVASSQATWVEVLPLTLCSHDENFKFLRQSDNGDLAVKLANPKTLEYQVVRTTLLPGILKTVKENRKHSLPIKVFETGDVVFKDDKLERKAYNERHWAAIYVGKNSGFEIIQGLLGKIMQTFRTEWIADYGAAASGRGYWIEEDDSVKTYFPGRGAKVMFRSKEGAEPKQIGHLGVLHPEVMMNFDVPFAASFVEVNAEVFL

SEQ ID NO: 1580 - protein, 693 aa, Saccharomyces cerevisiae
  strain ATCC 204508 / S288c
MSTPFGLDLGNNNSVLAVARNRGIDVVVNEVSNRSTPSLVGFGPRNRYLGESGKTKQTSNVKNTVENLKRIIGLKFKDPEFDIENKFFTSKLVQLKNGKVGVEVEFGGKTHVFSATQLTAMFIDKVKHTVQEETKSSITDVCLAVPVWYSEEQRYNIADAARIAGLNPVRIVNDVTAAAVSYGVFKNDLPGPEEKPRIIGLVDIGHSTYTCSIMAFRKGEMKVLGTAYDKHFGGRDFDRAITEHFADQFKDKYKIDIRKNPKAYNRILIAAEKLKKVLSANTTAPFSVESVMDDIDVSSQLSREELEELVEPLLKRVTYPITNALAQAKLTVNDIDFVEIIGGTTRIPVLKKSISDVFGKPLSSTLNQDEAVAKGAAFICAIHSPTLRVRPFKFEDIDPYSVSYTWDKQVDDEDRLEVFPANSSYPSTKLITLHRTGDFSMKAVYTHPSKLPKGTSTTIAKWSFTGVKVPKDQDFIPVKVKLRCDPSGLHIIENAYTTEDITVQEPVPLPEDAPEDAEPQFKEVTKTIKKDVLGMTAKTFALNPVELNDLIEKENELRNQDKLVAETEDRKNALEEYIYTLRAKLDDEYSDFASDAEKEKLKNMLATTENWLYGDGDDSTKAKYIAKYEELASLGNIIRGRYLAKEEEKRQALRANQETSKMNDIAEKLAEQRRARAASDDSDDNNDENMDLD

SEQ ID NO: 1581 - protein, 704 aa, Saccharomyces cerevisiae
  strain ATCC 204508 / S288c
MYNIPDNVKGAVEFDPWLKPFADVLSERRYLADKWLYDITHATPDGSYQSLSKFARDSYKSYGLHANPETKEITYKEWAPNAERAFLVGDFNNWDTTSHELKNKDEFGNFTITLHPLPNGDFAIPHDSKIKVMFILPDGSKIFRLPAWITRATQPSKETSKQFGPAYEGRFWNPENPYKFVHPRPKFSESVDSLRIYEAHVGISSPEPKITTYKEFTEKVLPRIKYLGYDAIQLMAIMEHAYYASFGYQVTNFFAASSRFGTPEELKELIDTAHSMGILVLLDVVHSHASKNVEDGLNMFDGSDHQYFHSISSGRGEHPLWDSRLFNYGKFEVQRFLLANLAFYVDVYQFDGFRFDGVTSMLYVHHGVGAGGSFSGDYNEYLSRDRSFVDHEALAYLMLANDLVHEMLPNLAVTVAEDVSGYPTLCLPRSIGGTGFDYRLAMALPDMWIKLIKEKKDDEWEMGSIVYTLTNRRYGEKVVAYCESHDQALVGDKTLAFWLMDAAMYTDMTVLKEPSIVIDRGIALHKMIRLITHSLGGEAYLNFEGNEFGHPEWLDFPNVNNGDSYKYARRQFNLADDPLLRYQNLNEFDRSMQLCEKRHKWLNTKQAYVSLKHEGDKMIVFERNNLLFIFNFHPTNSYSDYRVGVEKAGTYHIVLNSDRAEFGGHNRINESSEFFTTDLEWNNRKNFLQVYIPSRVALVLALKE

SEQ ID NO: 1582 - protein, 816 aa, Saccharomyces cerevisiae
  strain ATCC 204508 / S288c
MLFNINRQEDDPFTQLINQSSANTQNQQAHQQESPYQFLQKVVSNEPKGKEEWVSPFRQDALANRQNNRAYGEDAKNRKFPTVSATSAYSKQQPKDLGYKNIPKNAKRAKDIRFPTYLTQNEERQYQLLTELELKEKHLKYLKKCQKITDLTKDEKDDTDTTTSSSTSTSSSSSSSSSSSSSSSSDEGDVTSTTTSEATEATADTATTTTTTTSTSTTSTSTTNAVENSADEATSVEEEHEDKVSESTSIGKGTADSAQINVAEPISSENGVLEPRTTDQSGGSKSGVVPTDEQKEEKSDVKKVNPPSGEEKKEVEAEGDAEEETEQSSAEESAERTSTPETSEPESEEDESPIDPSKAPKVPFQEPSRKERTGIFALWKSPTSSSTQKSKTAAPSNPVATPENPELIVKTKEHGYLSKAVYDKINYDEKIHQAWLADLRAKEKDKYDAKNKEYKEKLQDLQNQIDEIENSMKAMREETSEKIEVSKNRLVKKIIDVNAEHNNKKLMILKDTENMKNQKLQEKNEVLDKQTNVKSEIDDLNNEKTNVQKEFNDWTTNLSNLSQQLDAQIFKINQINLKQGKVQNEIDNLEKKKEDLVTQTEENKKLHEKNVQVLESVENKEYLPQINDIDNQISSLLNEVTIIKQENANEKTQLSAITKRLEDERRAHEEQLKLEAEERKRKEENLLEKQRQELEEQAHQAQLDHEQQITQVKQTYNDQLTELQDKLATEEKELEAVKRERTRLQAEKAIEEQTRQKNADEALKQEILSRQHKQAEGIHAAENHKIPNDRSQKNTSVLPKDDSLYEYHTEEDVMYA

SEQ ID NO: 1583 - protein, 809 aa, Saccharomyces cerevisiae
  strain ATCC 204508 / S288c
MSSVEELTQLFSQVGFEDKKVKEIVKNKKVSDSLYKLIKETPSDYQWNKSTRALVHNLASFVKGTDLPKSELIVNGIINGDLKTSLQVDAAFKYVKANGEASTKMGMNENSGVGIEITEDQVRNYVMQYIQENKERILTERYKLVPGIFADVKNLKELKWADPRSFKPIIDQEVLKLLGPKDERDLIKKKTKNNEKKKTNSAKKSSDNSASSGPKRTMFNEGFLGDLHKVGENPQAYPELMKEHLEVTGGKVRTRFPPEPNGYLHIGHSKAIMVNFGYAKYHNGTCYLRFDDTNPEKEAPEYFESIKRMVSWLGFKPWKITYSSDYFDELYRLAEVLIKNGKAYVCHCTAEEIKRGRGIKEDGTPGGERYACKHRDQSIEQNLQEFRDMRDGKYKPGEAILRMKQDLNSPSPQMWDLIAYRVLNAPHPRTGTKWRIYPTYDFTHCLVDSMENITHSLCTTEFYLSRESYEWLCDQVHVFRPAQREYGRLNITGTVLSKRKIAQLVDEKFVRGWDDPRLFTLEAIRRRGVPPGAILSFINTLGVTTSTTNIQVVRFESAVRKYLEDTTPRLMFVLDPVEVVVDNLSDDYEELATIPYRPGTPEFGERTVPFTNKFYIERSDFSENVDDKEFFRLTPNQPVGLIKVSHTVSFKSLEKDEAGKIIRIHVNYDNKVEEGSKPKKPKTYIQWVPISSKYNSPLRVTETRVYNQLFKSENPSSHPEGFLKDINPESEVVYKESVMEHNFGDVVKNSPWVVDSVKNSEFYVEEDKDSKEVCRFQAMRVGYFTLDKESTTSKVILNRIVSLKDATSK

SEQ ID NO: 1584 - protein, 946 aa, Saccharomyces cerevisiae
  strain ATCC 204508 / S288c
MAGQVLDGKACAQQFRSNIANEIKSIQGHVPGFAPNLAIIQVGNRPDSATYVRMKRKAAEEAGIVANFIHLDESATEFEVLRYVDQLNEDPHTHGIIVQLPLPAHLDEDRITSRVLAEKDVDGFGPTNIGELNKKNGHPFFLPCTPKGIIELLHKANVTIEGSRSVVIGRSDIVGSPVAELLKSLNSTVTITHSKTRDIASYLHDADIVVVAIGQPEFVKGEWFKPRDGTSSDKKTVVIDVGTNYVADPSKKSGFKCVGDVEFNEAIKYVHLITPVPGGVGPMTVAMLMQNTLIAAKRQMEESSKPLQIPPLPLKLLTPVPSDIDISRAQQPKLINQLAQELGIYSHELELYGHYKAKISPKVIERLQTRQNGKYILVSGITPTPLGEGKSTTTMGLVQALTAHLGKPAIANVRQPSLGPTLGVKGGAAGGGYSQVIPMDEFNLHLTGDIHAIGAANNLLAAAIDTRMFHETTQKNDATFYNRLVPRKNGKRKFTPSMQRRLNRLGIQKTNPDDLTPEEINKFARLNIDPDTITIKRVVDINDRMLRQITIGQAPTEKNHTRVTGFDITVASELMAILALSKDLRDMKERIGRVVVAADVNRSPVTVEDVGCTGALTALLRDAIKPNLMQTLEGTPVLVHAGPFANISIGASSVIADRVALKLVGTEPEAKTEAGYVVTEAGFDFTMGGERFFNIKCRSSGLTPNAVVLVATVRALKSHGGAPDVKPGQPLPSAYTEENIEFVEKGAANMCKQIANIKQFGVPVVVAINKFETDTEGEIAAIRKAALEAGAFEAVTSNHWAEGGKGAIDLAKAVIEASNQPVDFHFLYDVNSSVEDKLTTIVQKMYGGAAIDILPEAQRKIDMYKEQGFGNLPICIAKTQYSLSHDATLKGVPTGFTFPIRDVRLSNGAGYLYALAAEIQTIPGLATYAGYMAVEVDDDGEIDGLF

SEQ ID NO: 1585 - protein, 983 aa, Saccharomyces cerevisiae
  strain ATCC 204508 / S288c
MTSTTGLRNLTLSFKKQLTTSTRTIMTIGDKQKWTATNVRNTFLDYFKSKEHKFVKSSPVVPFDDPTLLFANAGMNQYKPIFLGTVDPASDFYTLKRAYNSQKCIRAGGKHNDLEDVGKDSYHHTFFEMLGNWSFGDYFKKEAITYSWTLLTEVYGIPKDRLYVTYFEGDEKLGLEPDTEARELWKNVGVPDDHILPGNAKDNFWEMGDQGPCGPCSEIHYDRIGGRNAASLVNMDDPDVLEVWNLVFIQFNREQDGSLKPLPAKHIDTGMGFERLVSVLQDVRSNYDTDVFTPLFERIQEITSVRPYSGNFGENDKDGIDTAYRVLADHVRTLTFALADGGVPNNEGRGYVLRRILRRGARYARKYMNYPIGNFFSTLAPTLISQVQDIFPELAKDPAFLFEILDEEEASFAKTLDRGERLFEKYASAASKTESKTLDGKQVWRLYDTYGFPVDLTELMAEEQGLKIDGPGFEKAKQESYEASKRGGKKDQSDLIKLNVHELSELNDAKVPKTNDEFKYGSANVEGTILKLHDGTNFVDEITEPGKKYGIILDKTCFYAEQGGQEYDTGKIVIDDAAEFNVENVQLYNGFVFHTGSLEEGKLSVGDKIIASFDELRRFPIKNNHTGTHILNFALKETLGNDVDQKGSLVAPEKLRFDFSHKKAVSNEELKKVEDICNEQIKENLQVFYKEIPLDLAKSIDGVRAVFGETYPDPVRVVSVGKPIEELLANPANEEWTKYSIEFCGGTHVNKTGDIKYFVILEESGIAKGIRRIVAVTGTEAFEAQRLAEQFAADLDAADKLPFSPIKEKKLKELGVKLGQLSISVITKNELKQKFNKIEKAVKDEVKSRAKKENKQTLDEVKTFFETNENAPYLVKFIDISPNAKAITEAINYMKSNDSVKDKSIYLLAGNDPEGRVAHGCYISNAALAKGIDGSALAKKVSSIIGGKAGGKGNVFQGMGDKPAAIKDAVDDLESLFKEKLSI

SEQ ID NO: 1586 - protein, 1014 aa, Saccharomyces cerevisiae
  strain ATCC 204508 / S288c
MLRFVSSQTCRYSSRGLLKTSLLKNASTVKIVGRGLATTGTDNFLSTSNATYIDEMYQAWQKDPSSVHVSWDAYFKNMSNPKIPATKAFQAPPSISNFPQGTEAAPLGTAMTGSVDENVSIHLKVQLLCRAYQVRGHLKAHIDPLGISFGSNKNNPVPPELTLDYYGFSKHDLDKEINLGPGILPRFARDGKSKMSLKEIVDHLEKLYCSSYGVQYTHIPSKQKCDWLRERIEIPEPYQYTVDQKRQILDRLTWATSFESFLSTKFPNDKRFGLEGLESVVPGIKTLVDRSVELGVEDIVLGMAHRGRLNVLSNVVRKPNESIFSEFKGSSARDDIEGSGDVKYHLGMNYQRPTTSGKYVNLSLVANPSHLESQDPVVLGRTRALLHAKNDLKEKTKALGVLLHGDAAFAGQGVVYETMGFLTLPEYSTGGTIHVITNNQIGFTTDPRFARSTPYPSDLAKAIDAPIFHVNANDVEAVTFIFNLAAEWRHKFHTDAIIDVVGWRKHGHNETDQPSFTQPLMYKKIAKQKSVIDVYTEKLISEGTFSKKDIDEHKKWVWNLFEDAFEKAKDYVPSQREWLTAAWEGFKSPKELATEILPHEPTNVPESTLKELGKVLSSWPEGFEVHKNLKRILKNRGKSIETGEGIDWATGEALAFGTLVLDGQNVRVSGEDVERGTFSQRHAVLHDQQSEAIYTPLSTLNNEKADFTIANSSLSEYGVMGFEYGYSLTSPDYLVMWEAQFGDFANTAQVIIDQFIAGGEQKWKQRSGLVLSLPHGYDGQGPEHSSGRLERFLQLANEDPRYFPSEEKLQRQHQDCNFQVVYPTTPANLFHILRRQQHRQFRKPLALFFSKQLLRHPLARSSLSEFTEGGFQWIIEDIEHGKSIGTKEETKRLVLLSGQVYTALHKRRESLGDKTTAFLKIEQLHPFPFAQLRDSLNSYPNLEEIVWCQEEPLNMGSWAYTEPRLHTTLKETDKYKDFKVRYCGRNPSGAVAAGSKSLHLAEEDAFLKDVFQQS

SEQ ID NO: 1587 - protein, 1083 aa, Saccharomyces cerevisiae
  strain ATCC 204508 / S288c
MSSEDIIYDPQFKPVQGIYENRLRQFIDTGGDYHDLNLPKFYDKKRISLDHDHVKVWWYQVSFERGSSPVSPDKRPSWKSIIERDKKGELEFREANINQPFGPSWSTTWFKVKISLPEDWVKSNEQLLFQWDCSNEGIVIDPKTLIPVTAFSGGERTEYVLPKTSDGKHFFYIEAGNNGMFGCGAGSTINPPDDNRFFHLRKADIVWPDLDARALYIDFWMLGDAARELPGDSWQKHQARQLGNAVMNLFDPNDRSSVRKCRELLQREYFDSFLESSKVYEQGESQVLTNVYGIGNCHIDTAWLWPFAETRRKIVRSWSSQCTLMDRFPEYKFVASQAQQFKWLLEDHPEFFNKVLIPKIQQSQFFAVGGTWVENDTNIPSGESLARQFFFGQRFFLKHFGLKSKIFWLPDTFGYSSQMPQLCRLSGIDKFLTQKLSWNNINSFPHSTFNWAGIDGSQLLTHMPPGNTYTADSHFGDVLRTAKQNKTPEYYGSGLMLYGKGDGGGGPTEEMLQKMRRIRSMNNRNGNVIPKLQVGITVDEFYDDILKRTNQGHDLPTWSGELYFEFHRGTYTSQAQTKKLMRLSEIKLHDLEWIAAKTSVLYPDSYKYPSKQINELWENVLLCQFHDVLPGSCIEMVYKYEAVPMLHNVVKECTSLIDKTVQFLQSQSKADLVEMRTLTWSKPEKVSEECSLNGSYTSSVTGYDDYIVLANGKLKVIICKKTGVITSITDETLGVEYLDTEHGRNKLGANQFVIYDDKPLGWQAWDTELYSVNQYKYVTKPKKVQVSCNTKEKCAVEVIFQISEKCKIKSVISLNATAVTDAKLSKVDISTTVENWDARNKFLKVEFPVNIRNDFASYETQFGITKRPTHYNTSWDVAKFEVCHHKFADYSEYSKGVSILNDCKYGFSTHGNLMRLSLLRSPKAPDAHADMGTHEIKYAIYPHRGALSSDTVKLAHEFNYCFKYKLPKDIGMNFDDIISISGDENVILSNIKRGEDDSAVKSNYSLNPRDEQSIVVRVYESLGGESFASLNTTLNLKRIEKVDNLEMKVYKSLTATRDESNHAINRIPIKLRPFEIASFRLYF

SEQ ID NO: 1588 - protein, 589 aa, Lactobacillus acidophilus
  strain 30SC
MKKTKIVSTLGPASNDIETITALAKAGANVFRFNFSHGDHPEHLARMKMVRQVEKDTGLLLGIDLDTKGAEIRTTEQEGGKFTINTGDMIRVSMDATKKGNKDMIHVTYDGLYDDTHVGGHVLIDDGLVDLLIKEKDDSKRELVCEAQNTGVIGSKKGVNAPGVEIRLPGITEKDTDDIKFGLKFGINFITASFARKAQDILDIRKLCEEAGADYVKIFPKIESQEGIDNADEILQVSDGLMVARGDMGVEIPFMEVPFVQKSLIRKANALGKPVITATQMLDSMQENPRPTRAEVSDVANAVLDGTDATMLSGESANGLYPVKAVKAMAEIDERTEKQMLKRNTLALQRFEAYKGSNVTEAIGESVVRTAQELGVKTIITATNSGYTARMISKYRPNADIIALTFDEKIQHSLGIVWGVQPVLTEKPKSTDDMFEVAAKVAKEKGFVKDGDLVIIVAGVPVGDSGTTNLMKLQIIGDKLVQGLGVGNGSVIGKAVVANSAEEANSKVKEGDILVAKTTDPDYNPAIKKASGLVVEASGLTSHAAVIGLSLGIPVVVGATDATSKISDGSTITVDARRGAIYQGEISNL

SEQ ID NO: 1589 - protein, 1217 aa, Lactobacillus acidophilus
  strain 30SC
MIDVNKFESMQIGLASPNKIRSWSYGEVKKPETINYRTLKPEKDGLFDERIFGPTKDWSCACGKYKGVRYRGIVCDRCGVEVTSSKVRRERMGHIELAAPVTHIWYFKGIPSRMGLVLDISPRLLEEVIYFAAYIVIDPGDTDLEPKQLLTEAEYREQKAKYGNRFVAKMGAEAIRDLLKKVDLDKEVKDLKKELQTATGQKRTRAIRRLDILDAFKNSGNKPEWMVMDAVPVIPPDLRPMVQLEGGRFATSDLNDLYRRVINRNNRLKRLLDLNAPNIIVQNEKRMLQEAVDALIDNGRRGRPVVGPGNRPLKSLSHMLKGKQGRFRQNLLGKRVDYSGRSVIDVSPKLKFYQCGVPRPMALELFKPFVMHELVKRGIASNIKNAKRKIDREDDDIWDVLEDVIKERPVLLNRAPTLHRLSIQAFEPVLVSGKSIRLHPLACEAYNADFDGDQMAIHVPLSDEAVAESRLLMLAAHHILAPKDGKPIVTPSQDIVLGNYWLTQAERGREGEGMIFSSPAEATVAYENGDIHYHTIIGMSADSMPKKPWPKGHEHGIFITTYGKIVFNQLFPDDYFYINEPTEKNLNNPLDAKYFLDEGEDIKDRIDKVADYLIASPFKSSFLSDSIATIYKYYKVQRTSEYLDDLKKLGYTSSTTSGITIGMNDVPEIHDKDEKVAKARKQVDIVSKQFRRGLITEQERHDRVISIWNACKDEIQNEIAQIHSPRNPISIMADSGARGNISNFTQLAGMRGLMATPNGGLFEIPVTSNFKEGLSVLELFMSTHGARKGMTDTALKTAQSGYLTRRLVDVAQDVIIREDDCGTDRGITVSAIMEGDELIEPLFDRLLGRFTAETVKDPKTGEAIVGKDVMMDEAMAHKICDAGVTHVKIRSILTCDTPHGVCRKCYGMNLATGEEVEVGEAVGTVAAQSIGEPGTQLTLRTFHNGGVAGAEDITQGLPRVQELFEARNPKGRATVSEVDGVVDSIQENPAEHTREITVKGKIDTRSYSVPYTASVAVAEGDTVHRGDKLTLGSVDPKELIQVTDTLTTEKYILAEVQKAYRMQGVDISDKHVEVLTRQMLQKVRVLDPGETDILPGEVMDIGQFRDRNKEVIISGGIPATAQSVILGITKAALETNSFLSAASFQETTRVLTDASIRGKNDPLLGLKENVIIGKIIPAGTGMPVYRSMEPEADVKKPDSVYSIADIEKQMKEKDKAK

SEQ ID NO: 1590 - protein, 278 aa, Lactobacillus acidophilus
  strain 30SC
MAIKIYKPTTNGRRHMTSSDFAEITKTKPEKTLLESQSHTAGRNSYGHITVRHRGGGHKQKYRIIDFKRNKDNAKAVVKAIEYDPNRTANIALLHYTDGIKAYILAPKGLKVGDIVESGDEVDIKPGNALALKNIPTGTAIHNIELKPGKGGQLVRSAGASAQVLGVDGDYTLIRLQSGEVRKILSSCRATIGVVGNEQHSLIQLGKAGRKRWLGKRPQSRGSVMNPNDHPHGGGEGKAPVGRPQPMTPWGKKARGIKTRDIKKASEKLIIRHRKGSK

SEQ ID NO: 1591 - protein, 338 aa, Lactobacillus acidophilus
  strain 30SC
MTVKIGINGFGRIGRLAFRRIMDLGEKTKDIEVVAINDLTTPAMLAYLLKYDTTHGTFNHEVSSTDDSIVVDGKKYRVYAEPQAQNIPWVKNDGVDFVLECTGFYTSKAKSQAHLDAGAKRVLISAPAGNDLKTIVYSVNENTLTADDKIVSAASCTTNSLAPMANALDKEFGIEVATMTTIHAYTGTQMTLDGPSRSGKEQDARAAAENIIPHTTGSAKAIGLVLPNLNGKMNGHAQRVPVPDGSETELVSILKKKVTADEVNEAMKKYESPSFAYNGDHIVSSDVINMTAGSIFDPTQTMVTTAGDKQLVKTVAWYDNEYSFTCQMVRTLLHFATL

SEQ ID NO: 1592 - protein, 428 aa, Lactobacillus acidophilus
  strain 30SC
MLKSVIENVHALEIFDSRGNPTVEVHVTLSNGVVGKAEVPSGASTGENEAVELRDGGSRLGGKGVSKAVNNVNTEINDALKGMDPFDQAKIDQTMIDLDGTPNKGRLGANAILGVSMATAVAAAKANHQPLYRYLGGIDLEMPQTFHNVINGGEHADNGIDIQEFMITPIAKTSFRDGFEKIVNVYHTLKKVLEDMGYETGLGDEGGFAPNMKNSEEALKALHESIVKAGYKPGEDIGIACDCAASYFYNKEDGKYHLEGKVLDDEELAAYYDKLLDEFPELMSMEDPYDENDVEGMVKFTQSHKDRIQIVLDDFICTNPALLKKAIKEGAGNASLIKLNQIGTVTETLETIRMSRKNGYNTMISHRSGETGDTFIADLAVAINGGQLKTGAPARSERVEKYNRLLEIEEELGKGERLAFFPDDVDHD

SEQ ID NO: 1593 - protein, 396 aa, Lactobacillus acidophilus
  strain 30SC
MAEKEHYVRTKPHVNIGTIGHVDHGKTTLTAAITTVLAEKGLAKAEDYSQIDAAPEEKERGITINTAHVEYETENRHYAHMDAPGHADYIKNMITGAAQMDGAILVVAATDGPMPQTREHILLARQVGVNYIVVFLNKCDLVDDPELIDLVEMEVRDLLTEYDYPGDDIPVVRGSALKALQGDKEAQEQILKLMDIVDEYIPTPERQTDKPFLMPVEDVFTITGRGTVASGRIDRGTVKIGDEVEIVGLVDKVLKSVVTGLEMFHKTLDLGEAGDNVGVLLRGIDRDQVVRGQVLAAPGSIQTHEKFKGQVYVLKKDEGGRHTPFFSDYRPQFYFHTTDITGEIELPEGTEMVMPGDNTEFTVTLIKPAAIEKGTKFTIREGGRTVGAGQVTEILD

SEQ ID NO: 1594 - protein, 403 aa, Lactobacillus acidophilus
  strain 30SC
MSENSNQFLDALKQMQGVEVGDIVNVEVLDVEDGQIDVGVENAGVEGVITRREYTSDRNADLRDLVKPGDKFKALVLRRAGGDKENGEFFFSVTRLKEREAYDKLQKDFEEGKAIEGTVTSSVRGGLLVDVGTRGFLPASLISNRYVSDLKPYIGKTMKLKITEIDPNKNRLILSHKDLVEEEREEAFDKVASQLVVGDVIEGKVSRLTNFGAFIDVGGVDGLVHISEISYKHVDKPSDALKAGQDVKVKVIGIDNDRHRISLSIKQTEPSPFEQATANLNEGDVFEGEVKSLTNFGAFVEVADGIQGLVHVSEISNKHVDKPSDVLKVGQTVKVKVLNIDPSDRRISLSIKAADSNTSSSDNNSSRPRRSRNENSVNKKYMSDNDNGFALGDIIGDQLKDRK

SEQ ID NO: 1595 - protein, 257 aa, Lactobacillus acidophilus
  strain 30SC
MADVVTMKQLLEAGVHFGHQTRRWNPKMAPYIFTQRNGIYIIDLQKTIKMLDDAYNFMKAVAQDGGVFLFVGTKKQAQDSIAEEATRAGQYYVNQRWLGGTLTNWTTIQSRVRRLKQLKEMSQDGTFDVLPKKEVALLTKEMDKLEKFLGGIEDMPRIPDVLFVVDPKKEKIAVHEANILGIPVVAMVDTNTDPDPIDVVIPSNDDAIRAIRLIAGAMADAIVEGKQGQDDETVEVDFKENADGSDEIVSAEENPED

SEQ ID NO: 1596 - protein, 118 aa, Lactobacillus acidophilus; identical to SEQ ID NO: 580
  strain 30SC

SEQ ID NO: 1597 - protein, 230 aa, Lactobacillus acidophilus
  strain 30SC
MPKHGKKYLDAAKKVDSNKLYSVAEAMKLVKETSYANFDATVDVAYNLSVDPKQADQQIRGSLVLPNGTGKTQTVVVFAEGPQADQAKAAGADFVGSDDLVQKIQDGWLDFDVVVATPMMMAKVGRLGRILGPKGLMPNPKTGTVTMDIEKAVKNVKAGQVEYRVDRQAAIHTPIGKVSFTEDQLVENFDALRDVILRARPASAKGQYIKSVAISATFGPGIKLDPLNLN

SEQ ID NO: 1598 - protein, 337 aa, Lactobacillus acidophilus
  strain 30SC
MELILPEDYRPTLTVRDTEAAIVYIRETFQDKLASILGVQRMSAPMFVEKNTGLNDNLNGVERPVAFDMKAMPKDDTIEVVHSLAKWKRLALKRYGFGMHEGLYTNMNAIRRDEDLDNFHSIYVDQWDWEKIIRKEERNTDTLEITVNKIFRAIKETEKLVSARYPGSTYRLGDHVSFITTQELEDRWPELSPEEREDRIAKEEKAVFIMKIGDKLKRSGKPHDGRAPDYDDWQLNGDLVFWYEPLQKKLEISSMGIRVSEESLREQLKKAHCEERAKLPFHQMLLKGKLPYTIGGGIGQSRLCMLLLGKAHIGEVQASIWPKNMVEKCEADHIHLL

SEQ ID NO: 1599 - protein, 744 aa, Lactobacillus acidophilus
  strain 30SC
MPSTRIELDQNFIDQVKHEIKPHWGELGWVTYKRTYARWLPDQDRSENWDETVKRVIEGNINLDPRLKDSPSKEVISELTNEAKRLFRLVYGLSATPSGRNLWISGTDYQKRTGDSLNNCWFIAIRPQEYGDSHIVPSYVDKREKAVSMPFSFLFDQLMKGGGVGFSVVNDNIKQIPKVNNKIDLTVVIDKGSKSHDASIKVGAVDKDEWKKQNPDQDDVIYYRLPDTREGWVLANARLIDMHFNPTNPDRKTKLVLDITDIRPYGAKIHGFGGTASGPMPLVEMFIDINNVINARAGKNLTAVDATDICNLIGKTVVAGNVRRSAELALGSSDDQDFIKMKQDKKKLYHHRWASNNSVAINSKFNNYGPIADGILHNGEPGIVNLDLSRNYGRIVDGYQPGIDDDVEGTNPCGEISLANGEPCNLFEVFPYIAEMQGWDLKEAFALATRFAKRVTFSHYDWEVSRKIIQKNRRIGISMSGIQDWLLNDLGHRVVTGFEDAVDAETGEKIKKPIYDSQAVERVDGLYKAVVDADKAYSKELGTHPSIKHTTVKPSGTVAKLAGVSEGMHFHYAGYLIQRIRFQASDPLLPALRECGYHTEPDIYTKNTICVEFPLRAAHADSKNFASAGTVSIAEQFATQAFLQTYWSDNAVSCTITFQSDESDEIAPLLHQYRHTIKSTSLLPYYGGSLKQAPKEPIDKKTYKERAALITDDVEEVFAKQNDDQKGLEIVGQTDCEGGACPIK

SEQ ID NO: 1600 - protein, 323 aa, Lactobacillus acidophilus
  strain 30SC
MARVEKPRKVILVGDGAVGSTFAFSMVQQGIAEELGIIDIAKEHVQGDAIDLADATPWTYPKNIYAADYPDCKDADLIVITAGAPQKPGETRLDLVNKNLKILSSIVEPIVESGFDGIFLVVANPVDILTHATWKISGFPKDRVIGSGTSLDTGRLQKVIGEMEHVDPRSVNAYMLGEHGDTEFPAWSYNNVGGVKVSDWVKAHGMDESKLEDIHKEVANMAYDIINKKGATFYGIGTASAMIAKAILNDEHRVLPLSVAMDGQYGLHDLHIGTPAVVGRKGLEQIIEMPLSDDEQAKMEASAKQLKEVMDKAFKETGVKVRQ

SEQ ID NO: 1601 - protein, 176 aa, Lactobacillus acidophilus
  strain 30SC
MSRIGLKTIEVPDSVTVTKEGDNITVKGPKGELTRYFDPKITFEQKDGKINFSRSSESDKALHGTERANLASMIEGVVDGYKKTLKLIGVGYRAQAQGNKITLNVGYSHPVVLTAPEGVSVKATSATDVEVEGVSKQDVGQFAAEIRAVRPPEPYKGKGIRYVDEYVRRKEGKTGK

SEQ ID NO: 1602 - protein, 320 aa, Lactobacillus acidophilus
  strain 30SC
MKRIGILTSGGDAPGMNAAIRAVTKTAIHHGLEVFGIRYGFAGLVAGDFVPLTTENVDHKINEGGTFLYSARFPEFAQEEVQQKGVEQLKKHGIDAVIVIGGDGSYHGALALTRHGVNSVGLPGTIDNDIPYTDYTIGFDSACRTAMDAIDKIRDTASSHHRVFIVNVMGRECGDIAMRVGVASGADAIVIPERPYDIKEIAETLKRGFADGKDHGIIVLAEGVMAADKFKDELLKYGDFDARANVLAHMQRGGSPTVTDRVNATKMGNYAVKLLLDGKGGLAVGIENSKLETHDILDLFDGKHQGDYALMDVNEEMTKY

SEQ ID NO: 1603 - protein, 867 aa, Lactobacillus acidophilus
  strain 30SC
MAKKRIYEVAKEVGVDNKVVVQKAKDLGFDVKNHMSSIDDVQAAKLKSSFQNSAPAKKNNKIKISVSSIRKNEKKQENNNSSKKPRRRNNKRRQNNDRNRDNRNERGNNRANSGKPKAAALLQQFKQKQRAEEGQLNKEAQKAKKEYHEQLKHPKQEQPVKNNKKTNNDNNKKKSAPVEKKVIGPKILKPSPARLKQNQPSANERVAAKVTMPEAPKDDRRGNGHGRNTGKPGRKGKNQFFNGHSEHSDRSERKRRKNKKKQQEQKPKKQPTKRKERPLPEVLVYEEGMNAQDLGKLLHREPAEIVKKLFMLGVLTNQNQSLDKDTIELLAAEYGIDAKQKVHEDISDIDTLYNKRMEESKKSKNQVKRPPVVTIMGHVDHGKTTLLDRLRHTHVSAHEAGGITQKIGAYQVRLDNRLITFLDTPGHAAFSNMRARGAEITDIVVLVVAADDGVMPQTVEAIDHAKSANVPIIVAINKMDKPGANPQHVTEELMKYNLIPEDYGGDTIFVNISAKTGQNVDDLLQMILLQADVMELKANPTEMAIGTVIEARLSRGRGPVADVLIQQGTLNIGDPIVVGDTFGRVRTMTNDRGRQVKKATPSEPVEITGLNDVPESADKLVEFKDEKTARSVGEARAQQSLQKSREKVQHVTLDNLFDTMKKENMKEVDIVLKADVQGSVEALQQSLEKIEVEGVRVNIIHSGVGAINESDVTLAGASNAFIIGFNVRPTATAKSQAETDSVDIRLYSVIYKAIDDVTAAMKGMLEPTYEEKVIGNLTVRETWKVSKVGTIAGSFVDKGVVKNDSKIRVIRDGIVKYDGEIASLKRFKDDVKEVKQGNDCGLTIKDYNDIKVGDEFEVYEMQQVEPK

SEQ ID NO: 1604 - protein, 473 aa, Lactobacillus acidophilus
  strain 30SC
MKKNLRIVSVAAAALLAVAPVAASAVSTVSAADATTTTTATTTTNKPTVDLSGAGSVSESKDTVNVTPSFTLTSAIGANGAVTTPATLKGTTPATLKGTITASLNGTSVTADVASAAKSVELTNQSGAPVYSYDAKADKIVNHLGDWDKSANSVYVVAGQTYTMTLSDVGFNFGKANAGKTLTFNVPGNVKVEGGTYKDGKVTVDQYGNVTGLKFTLSVKAYNSANTSAVSFYDVKSGLVATQGSYMTLAENGDLNVTTLLKELNGKYEALQFQNGKFQSFAATTTADDVKAELEKAGIKVDPAGNFEAPDTFTVTLNAKSEDNGKTASLPVVVTVPNGKSTVVPSVAKTVMHNAYYYDKDAKRVGTDKLTRYNSVTVSPKTTTISGKAYYEVVENGKLSGKFINADNIDGTKRTLKHNAYVYASSKKRANKVVLKKGTEVTTYGGSYTFKNGKQYYKIGNNTDKTYVKASNF

SEQ ID NO: 1605 - protein, 135 aa, Lactobacillus acidophilus; identical to SEQ ID NO: 574
  strain 30SC

SEQ ID NO: 1606 - protein, 697 aa, Lactobacillus acidophilus
  strain 30SC
MANKREFPLAKTRNIGIMAHIDAGKTTTTERILYYTGKIHKIGETHEGDSQMDWMDEEKERGITITSAATTAQWKDHRINIIDTPGHVDFTIEVERSLRVLDGAVTVLDAQAGVEPQTENVWRQAETYGVPRIVFVNKMDKIGADFDKSVKSLHERLNANAHAVQMPIGSADTFEGVIDLINMVADIYDEDKLGSKWDTVPVPDEYKEEAEARRNDLIEAVADVDDGIMEKFLGGEEISNDELKAAIRKATLDLKFFPVYAGSAFKNKGVQMMLDGVIDYLPSPLDVKPYVAHDPKTGDEVELMADDKKPFAALAFKIATDPFVGRLTFIRVYTGSLESGSYVLNASKNSRERVGRLLQMHANSRTEIPEVFSGDIAGAIGLKNTTTGDSLTDPDHPLILESLKVPDPVIQVSVEPKSKADRDKMDVALQKLTEEDPTFRAETNPETGQTLISGMGELHLDIMVERMRREFNVDAKIGEPQVAYRETFTKEAKAQGKFVRQSGGKGQYGDVWIDFTPNEEGKGYEFEDAIVGGVVPREFIPSVDQGLQEAMKNGVLAGYPLIDVKAKLYDGSYHEVDSSEAAFKVAASLALKNAASKAGAVILEPIMKVQVTTPEEYLGDVMGSITARRGTMEGMEDRAGAKIINSFVPLSEMFGYATTLRSSTQGRGTFTMVFDHYSPTPKSIQAEIIKKRGGEAE

SEQ ID NO: 1607 - protein, 168 aa, Lactobacillus acidophilus
  strain 30SC
MANRNDSRNNRRNKDDIEDQLVAVNRITKVVKGGRRMRFAALVVVGDKKGRVGFGTGKAQEVPEAIRKAVEDGKKKMINVPKVGTTIPHEVIGHYGSGNILLKPAEAGSGVAAGGAVRIVMDMAGISDVTSKSLGSNTPINVVRATIDGLKKLRTSEEVEKLRQPERA

SEQ ID NO: 1608 - protein, 212 aa, Lactobacillus acidophilus; identical to SEQ ID NO: 518
  strain 30SC

SEQ ID NO: 1609 - protein, 224 aa, Lactobacillus acidophilus
  strain 30SC
MGQKINPNGFRLGVIRDWESKWYADKGYKETLNEDLRIRKFISEKLKDASVSTVEIERAANRINISIHTAKPGMVIGKGGSEVEALRKQLNALTGKQVHINIVEIKKPDLDAELVADGIARQLEARIAFRRAMRQATQRAMRAGAKGIKVQTSGRLNGADMARREWHTEGRVPLQTLRADIDYAWVNAFTTYGEIGVQVWINRGEVLPTRKNKPASKPAKGGNR

SEQ ID NO: 1610 - protein, 614 aa, Lactobacillus acidophilus
  strain 30SC
MSEKRRDDLRNIAIIAHVDHGKTTLVNQLLKQSDTLPEHMNLEDRAMDSNAIERERGITILSKNTAVRYKDTTINILDTPGHADFGGEVERVMHMVDGALLLVDAYEGPMPQTRFVLKKALEAGVKPIVVLNKIDRPGARPKKVLDDVLELFIELGANDEQLDFPVVYASALNGTSSYDPDPSTQKETMDPIFDTILKYIPAPIDNSDEPLQFQITMLDWDDYVGRIGVGRIYRGKVKVGDNITVMKRDGSTQNFRVTKLFGYFGLKRNEIKEAKAGDIVAISGINDIYVGETIASADHPEALPLLKIDPPTLQMDFVANDSPFAGREGDQVTPKKLEDRLIRQTRTDVSLKVEPTDQLNAWTVSGRGELHLSILVEELRREGFELQLSRPKVIYREIDGTMCEPFESVQVDTPDEYVGSVIDSLSQRKGEMQNMESTGNGQTRLEFLVPSRGLIGYNNEFMSQTGGYGIMNHTFAAYKPVVKNWNPGRRNGALVSINQGQSTTYSLQSVEQRGELFIGAGVEVYEGMIVGQSSRERDIAVNVTKGKNLTNTRAAGKDHAAAIKTPKTLTLEEAIEFLNDDEYCEVTPESIRLRKKILNTSERQKADKKRNRTK

SEQ ID NO: 1611 - protein, 252 aa, Lactobacillus acidophilus
  strain 30SC
MSRTPIIAGNWKLHMNPEQTTEFVDAVKDKLPDPSKVESLICAPAVDLDALRKAAKGSNLHIGAENCYFEDEGAYTGETSPKVLKEMGMDYVIIGHSERRGYFHETDEDINKKAKAIFANGLKPIICCGESLETREANKQEDWVVAQIKAALDGLTAEQVSSLVIAYEPIWAIGTGKTASSDQAEEMCKTIRETVKDLYNEETAENVRIQYGGSVKPANVKELMSKPDIDGGLVGGASLKPESYLELVNYQD

SEQ ID NO: 1612 - protein, 283 aa, Lactobacillus acidophilus
  strain 30SC
MSTIYNSVTELIGNTPLLKLNRVVPEDAADVYVKLEFENPAGSTKDRIALAMIEKAERDGNLKPGGTITSLNTGIGLAMVAAAKGYHIIIVMPETMSVECRKLMKGYGAELILTPGSEGMKGSIAKAEELVKEKSYYMPMQFDNPENPNIHELTTGPEIISAMNGIGKSVDAFVAGVGTSGTLSGISRALKKENPNTKVYALEPSESPLLKDGKTGKHGIAAGFIPKNLDKDVYDGIVEVSTDEAMKIACEVAKNEGFLPGILIVTFQLLYLTNKQNITEIIV

SEQ ID NO: 1613 - protein, 305 aa, Lactobacillus acidophilus
  strain 30SC
MAYFDNGNQIFKDARRNHYAVGAYNTNNLEWTRAELRAAEETRTPLLIQVSTGAAKYMGGYKFVKDMVADQMDSMNISVPVILNLDHGDFESAKECIALGYSSVMFDGHKLDTEENLAKTKEIIKLAHERGISVEAEIGKIGENQGADGGELASVEDAKTFVAAGVDKLACGIGNIHGVYPEGWKGLNFDRLKEIAEAVPEEPLVLHGGSGIPEDQVKKAISLGIAKVNINTEFQLAFQKATREYIEAGKDLDKGNKGYDPRKLLLPGTEAITDAMKEMIGWLGTKTIDDELKDASFDRSSLNEE

SEQ ID NO: 1614 - protein, 544 aa, Lactobacillus acidophilus
  strain 30SC
MSKFRKLMAAGVVTLAGAALAACGNNSSSSSAGGGKKTLNWMDKTEIEGMDVAKVTDATSFTQLNNTMEGLYRLGKNSKVENALATKTTTSKDGRTWTFTLRKDDKWSNGDPVTAKDFVYSWRRTVTPSTGSQYSYLFSGIENADAIVAGKKKPNTLGVKAVGDDKLVVTLDKRIPYFKLLMGFPLFFPQSQKAVEQYGKSYGTSSKTTVYNGPFVQKGWTGSNLSWKLVKNKNYWDKKNVKLNTINYSVQKTPSTDYNLYQSGKLDAALLGPQASKELKNQKGYTLRKTASTIYLEMNQKKAPFNNENFRKALSLAINRKELANSVGGAAEPADTLSPENMTEVKGKDYTNLVRGTATKQFNTYNKKQAQAYWKKAQKELGKKSVSFSILTYDDDASKKGGEFLQSSIESALKGVNVRVQSIPKKTALDHAGSGDYDVFLMGWTADFSDPISFLDLNTSKNSQNWEKYSDSTYDKLVAESKVTPSETTRWNDLVKAEQRIISTQGVTPLYHPEEAWMVRSTVKGVVYNGAGAPYNFKEAYIAN

SEQ ID NO: 1615 - protein, 649 aa, Lactobacillus acidophilus
  strain 30SC
MDHRKVAERVIKDVGRDNIIAGAHCATRLRLVLKDDSKVDQKALDNDPDVKGTFKTNGQYQVIIGPGDVNDVYDEFIKITGLKELSTDDLKKVAAEGQKKNPIMDFIKLLSDIFVPIIPALVAGGLLMALNNFLTSPGLFGPKSVVQMAPNIAGMSEMIQVMSAAPFIFMPILVGMSAAKRFGANQFLGATIGMIMTTPGLQGANHFWNIFGLHVAQTNYQYQVIPVLVAVWVLSILEKFFHKHLPSAVDFTFTPLLSIMITGFLTFTIIGPVFKGVSDAITNAIVWLYNTTGAFGMGVFGLTYSAIVTTGLHQSFPAVETQLLAAFAKNPASSGDFIFVTACMANVAQGAATFAIYFLTKNKKMKGLASSSGVSALLGITEPALFGVNLKYKFPFFCALIGSGVAAAFAGFTHVTAAALGSAGFLGFLSIYPKTIPMWIVSVLISFAVAFILTYVYGKGHLKEEVAEQDVPVNDAADYAEENQKAEKLGKEELSLKDEIIVSPVTGTPESLTKVNDQVFSAKLMGDGAAVIPSDGTIYSPVNGTVTIAYETKHAYGIKSDNGAEVLIHIGLDTVNLKGEHFESFVKQGQRVEKGDKLGSVDLDAVKKAGYDTTVMVVITNTANYANVQRITDAGDKHGDKLIAVTAHE

SEQ ID NO: 1616 - protein, 501 aa, Lactobacillus acidophilus
  strain 30SC
MKKNLRIISVAAAALLAVAPVVSTAIPVNADTAVNVGSSTGTGANTTNTNTQAPQNKPYFTYNNEIIGESTQSNPLGNVVRTTVSFKSGDKVSDLISKISKAVQFHKDNYAGGENVTINEQDFINQLKNNGVTTKTINPSKKGEKSYEEIDKVPSTSFNITLSASANNQTATIQIPMVPEGASAPVDTTQNPQINWTKGGQAQSASLNGQVFQVAVGSSFNPLSFTNSNGDTISISAQQSKDNSTYASIEATSNPVNTSEAGRYYNVTLTATGNTGKKTTATYTVLITSSQKQTLYANGASSIPTYSIYGGNVLSNSTTFKDGDQVYVSDKTETIGNVSYSQVSTKSKSDANGSNMWVKTSALVKPAGDTNVKTYPVMIDSRAYDKNGNYLGHMYYAYDNIDVVPTVVTINGKTYYKVANKDEYVRVTNITGNKRTLTHNAYIYWSSYRRTPGTGKMYKGQTVTTYGPAMRFKNGKKYYRIEGCRNNNKRYIKAANLSAAQ

SEQ ID NO: 1617 - protein, 180 aa, Lactobacillus acidophilus
  strain 30SC
MLKYNVRGENIEVTDALRSYVEKRLNKLEKYFELNQDVLAHVNLRVYRDHSAKVEVTIPLPYLVLRAEETTDDMYRSIDFVSEKLERQIRKYKTRVNRKSREKGLQDFFVEEPQEEKKPSEFDIVRNKRVSLKPMDPEEAILQMDMLEHDFFVFEDAETNGTSVVYRRNDGRYGLIETNE

SEQ ID NO: 1618 - protein, 203 aa, Lactobacillus acidophilus
  strain 30SC
MSRYTGPSWKRSRRLGISLSGTGKEIARRNYAPGQHGPNSRGRLSEYGQQLHEKQKLRWMYGLNERQFRTLFARAGKIREGQHGVNFMILLERRLDNIVYRLGLATTREQARQLVNHGHITVDGKRVDIPSYEVSVGQTIGLKEKSKNLQQVKDALDAVTARPSFVSFDDNKMEGSLVRLPERDEMEPEIDESLVVEYYNKLL

SEQ ID NO: 1619 - protein, 403 aa, Lactobacillus acidophilus
  strain 30SC
MAKLIVDDLDVNGKKVLMRVDFNVPIKDGVIGDDNRIVAALPTIKYIIEHGGKAILLSHLGRVKSDADKKELSLKPVAERLSELLKKPVTFVPSNEGKEVEDAINAMKDGDVVVLENTRFQDIDNDFGKRESGNDPKLGEYWASLGDMFVNDAFGTAHRSHASNVGIATAMKKDGKPVAAGFLMEKEIKFLGNAVENPVHPFVTILGGAKVSDKIAVIKNLIPKSDHILIGGGMAYTFLAAQGHKIGKSLFEKDRVELAKELLKEADGKIVLPVDNVAATEFSNDASREVVGDDIPDNMMGLDIGPKTVEKFTEILKDAKTVVWNGPMGAFEMPNFAKGTYAIADALANLTDATTIIGGGDSTSAVKKSGVADKITHISTGGGASLQYLEGNELPGIACISDK

SEQ ID NO: 1620 - protein, 445 aa, Lactobacillus acidophilus
  strain 30SC
MSLIKFDSSKLTPFVHENELSEMQAMVNAANTELREGTGAGNDFRGWLNLPVDYDKDEFARIKKAAKKIQNDSDVLICIGIGGSYLGAQAAIEFLNSNFYGKVDSDMPTVVFCGNSLSGSYLYDLIEWLGDKDFSVNVISKSGTTTEPSVAFRIFKDKLIKKYGKEEAAKRIYATTDRQKGALKTEADAEGYEEFVVPDDVGGRYSVLSAVGLLPIAASGADIDELMKGAADARADYTDTDLSKNSPYQYAALRNILYRKGYTTEIVENYEPSLRMFGEWCKQLMGESEGKDQKGIYPSSANFTTDLHSLGQYIQEGLRNLFETVIRVENPRHDVKIPGDEKNLDQLNFLEGKSLNYVNDRAYEGVVLAHTDGGVPVMTVNIPDQSAHTLGYMIYFFELAIAISGYLNGINPFNQPGVEAYKRNMFGLLNKPGYENLHDDLAKRL

SEQ ID NO: 1621 - protein, 91 aa, Lactobacillus acidophilus; identical to SEQ ID NO: 590
  strain 30SC

SEQ ID NO: 1622 - protein, 588 aa, Lactobacillus acidophilus
  strain 30SC
MNPEKVLKQTFGYDSFRPGQKKVIDLVLNKQNVLAVMPTGAGKSLCYQVPALMNAGVTLVISPLISLMKDQIDTLKQNGINAAALNSATPQEEVNPILRQAYEGKIKLIYITPERLAIDYFRYQLNFLDIDLVAVDEAHCISQWGHDFRPAYRQLLDGINSLKSRPNILALTATATPAVQDDICEQLNIPKQNMIITSFARPNLSFKVVNSPQNTPLYIAQYIKMHPDEAGIIYTNTRKKVESLTDYLAKKGISVGAYHGGMETKERDEVQEAFQFDQVQVIVATNAFGMGIDKSNVRFVIHASSARNIESYYQEAGRAGRDGEESEAIMIYHPGDLRQYRFFIDESTADEKYRELQYQKLQAITDYANTGECLQQFIVRYFGQDCEPCGKCSNCLNQDELTDITADAQKVISMVYELDGRFGKNVVAQCLVGSNNQKMKEMNASQYDYFGSLKMNQKETISLIDYLIASRYLEIEGTKYPLVHVTNRGWDVLDGKITVKRRIAKVQKKKQIFAQDENPDLYEALRKKRMELARKQRVPAFMIFSDRSLHDMAKIKPQNEAEFLEVSGVGQAKMQKYGATMIQVIKSF

SEQ ID NO: 1623 - protein, 115 aa, Lactobacillus acidophilus
  strain 30SC
MDPLIQELTKEQIRDDIPAFRAGDTVTVHVRVVEGTHERIQLFEGVVIKKKGTGIGATYTVRKIASGVGVERTFPVNDPRVAKVEVKRHGRVRRAKLYYLRERHGKSARIAEARR

SEQ ID NO: 1624 - protein, 590 aa, Lactobacillus acidophilus
  strain 30SC
MKKAKVFAGITLLSGVALTLAACGKPSNQNANEASTAAKFSSVVPKKATKNGGTVKVAVETDTPFTGIFNDELSTSATDTEVMQYGAESLFSTDDHYVFTNKGAATIKIDQKAKTATINIKKGVKWSDGKQVTAKDYEYAYEIIANKDSKSQRYTASLADLVGLKEYHEGKASTISGLEMPDGENGRKVVLHFKTMKPGMNTSGNGYIWEAAAPYHYLKDVKFSDLMSSDKIRKKPLFFGPYKLQKLVRGQSATWVPNKYYYKGKPKLSKITATVINPNSVAQSIKSNKFDVIQVINSQWPNVKNTKGVNFIATVPLSYSYLGFKVGKWDAKKGENVMNPKSKMNNKALRQAIGYGMNVNQVAKRYSYGLSFRIPTLIPKQFGDYFDKDVKGYSYNIKKGNEILDKAGYKKKGTYRVQPNGKPLTIHLAAMSGNANQEPIIQNYIQQWKKEGLNVKLTGGRLIEFNSFYDKVQNDDPSVDMFMGAWSLSSEPSPNDLYSKTAPMNYSRFVTKKNTQLLDEMDSQKAFNHQYRIDKFHEWQKYMDDEAYVLPVSNSYTITAVNKKLTGYSLKPSASMGNGFPNWYNVAYAK

SEQ ID NO: 1625 - protein, 301 aa, Lactobacillus acidophilus; identical to SEQ ID NO: 602
  strain 30SC

SEQ ID NO: 1626 - protein, 667 aa, Lactobacillus acidophilus
  strain 30SC
MRIKDILSPESMIMDLKAKNKEDAIKEMADLEVATDIVNDEDAFIKSIWDRENESTTGIGGGIAMPHARNKSINKARVLFAKSKDGIDYNSLDGQPVHLFFMITAPAGADNTHLQALAKLSGLLIDPDLVEKLKATKTPEEVIDLFEKAEAKKDEEDKKAAEAKKAKEAAKAEGKNDDDDNKPLIVGVTACINGIAHTYMAQEALIKEGKKRGIEVRIETNGSEGVKDKLTPDEIKRAKGVIIASDKKVDMPRFDGKPLVNRPVVDGINKPGELIDDIMDGKADVYHASASDKSEESSSSTEKPGVWAGIYKNLMNGISHMLPFVIGGGILMAISFIVENYGGGAKTPAFIFLNNAGNLAFAFMVPVLSAYIAESIGDLPALMPGFVGGYMASIANGQFQVNVQAHATSPAGFLGGIAAGFIAGYLMVGLKKLFANLPHSVEGMKPMLFYPILGLLFIAAIMFYIINPIFSGINFAITHFLNSMGTGNLVLLTTILAGMMSIDMGGPFNKAAYVFASGAFANDPHSTTAAILMAAVMVGGMVPPFATAIGTTFFKNKYTQEERRAGVSNWVLGFSFITEGAIPFAAADPGRVIPSCIIGSAVGGALVGLWHVGVPAPHGGLWVSPLAGNIGGPSHILFYFLATIIGSIVAGLIMSFWKKNIKEDPNE

SEQ ID NO: 1627 - protein, 431 aa, Lactobacillus acidophilus
  strain 30SC
MINRYTRPEMGKIWTDENRYAAWLEVEIAATRAWAEQGEVPKEDAEKIAKNASFTAERVAELEQVTHHDVVAFTRTVSESLGPEKKWVHFGLTSTDVVDTAQGLLLKQADNIIRKDLHELKETIAEKARKYKYTVEMGRTHGVQAEPTTFGLKLARWYAEINRDIERFEHAAKGVESGKISGAVGTFANVPPEIETSVMKQLGLTQQPITSQVLPRDLHAEYIAMLALIATSIENWATEIRGLQRSEIHEVEEHFRAGQKGSSAMPHKRNPIGSENLCGMARVLRGHVVTAYEDVALWHERDISHSSAERVILPDTTIGIDYMLHRFNRILSNLDVFPETMLKNMDRTYGLIYSQRVLLKLIDEAGLSREKAYDMVQKLTAKSWNEQKQFKPLVENSEIMNYLSKEDVDDAFDYHYHLRHVDEIFKKCGLD

SEQ ID NO: 1628 - protein, 102 aa, Lactobacillus acidophilus
  strain 30SC
MASQTIRIRLKSYEHGILDESAAKIVATAKRTGAEISGPVPLPTERTLFTVLRSPHMNKDSREQFEMRTHKRLIDILNPTPKTVDSLMKLDLPSGVDIEIKL

SEQ ID NO: 1629 - protein, 88 aa, Lactobacillus acidophilus; identical to SEQ ID NO: 640
  strain 30SC

SEQ ID NO: 1630 - protein, 122 aa, Lactobacillus acidophilus
  strain 30SC
MIQNESRLKVADNSGARELLVIRVLGGSKRKTGNIGDIVVCTVKQATPGGVVKKGDVVKAVIVRTKSGARREDGSYIKFDENAGVIINADKSPRGTRIFGPVARELREHDFMKIVSLAPEVL

SEQ ID NO: 1631 - protein, 132 aa, Lactobacillus acidophilus; identical to SEQ ID NO: 626
  strain 30SC

SEQ ID NO: 1632 - protein, 116 aa, Lactobacillus acidophilus; identical to SEQ ID NO: 631
  strain 30SC

SEQ ID NO: 1633 - protein, 127 aa, Lactobacillus acidophilus
  strain 30SC
MAYRKLGRDSAHRKAMLREMTTQLIMNERIVTTETRAKEVRKTAEKMITLGKRGDLASRRKAAAFVRDEVADIHEEKDTVVVKSALQKLFSDVAPRYKDRNGGYTRILKLAVPRKGDAAPMVILELV

SEQ ID NO: 1634 - protein, 338 aa, Lactobacillus acidophilus
  strain 30SC
MSEKKDVRILAYESSCDETSTAVIKNGRDIKSLIVATQIKSHQRFGGVVPEVASRHHIEVISQITKEALSEANCTWKDIDAIAVTYGPGLVGALLIGVSAAKAASMATGISLIGVDHIMGHIMAAQLKDEIEYPALALQVSGGHTEIVLLKDPVHFEIIGDTRDDAAGEAYDKIGRVLGVNYPAGKTIDAWAHEGKDTFNFPRAMMEDDDYDFSFSGLKSAFINTCHHADQIHEKLNKYDLAASFQAAVIDVLAHKTIRAIKQYKPKTFIMGGGVAANHGLRDRMSAEIAKLPKQDQPKVILPDIKLCGDNAAMIGAAAYNLQYLEFIWFTKRFTKIG

SEQ ID NO: 1635 - protein, 570 aa, Lactobacillus acidophilus
  strain 30SC
MVDNTSLTGAALLIDALQANGLNNMYGVVGIPVTDFARLAELKGMKFYGFRREDSAVDAAAAAGFITGKPGVALTVSAPGFLNGLTALAQATKNCFPLIMISGSSDRHIIDLDRGDYEGLDQYNVAKPFCKAAYRVDRAEDMGLAVARAVRTAVSGRPGGVYLDLPAATVSDTVAQKSDANIYKVVDPAPKQLPSDEAINRAVELLNNAKHPVLLLGKGAAYAQAEDEIRELVAKTNIPFLPMSMAKGVVPDDSPASAASARSFTLGQADVVLLVGARLNWMLSNGGSPLFSPDAKFIQVDIDATEFDSNRKIDAPLQGDIKSVMQKFNSAVIDAGVKAPQDWLDQIKTESEKNNTKFAKRISASEAKPTLGFYSAIEPINDLLQKHPDTYIVSEGANTLDIGRNLISMQKPRHRLDTGTWGVMGVGMGYAIATAVETGKPVIALEGDSAFGFDGMEMETICRYHLPVIVVVVNNGGIYNGDVNVVPDQPGPTVLDHDAHYGDIAKAFGGDSYRVNNYTEMKDALEKAYESGNPTIIDAQIPASMGKESGHIGNLNPKLDLSSLEEKENK

SEQ ID NO: 1636 - protein, 543 aa, Lactobacillus acidophilus
  strain 30SC
MAKDIKFSENARRSLLKGVDKLADTVKTTIGPKGRNVVLEQSYGNPDITNDGVTIAKSIELKDHYENMGAKLVAEAAQKTNDIAGDGTTTATVLTQAIAREGMKNVTAGANPVGIRRGIEKATQAAVDELHKISHKVESKDQIANVAAVSSASKEVGDLIADAMEKVGHDGVITIEDSRGINTELSVVEGMQFDRGYLSQYMVTDNDKMEADLDNPYILITDKKISNIQDILPLLQEIVQQGKALLIIADDVSGEALPTLVLNKIRGTFNVVAVKAPGFGDRRKAQLQDIAALTGGTVITDDLGLELKDAKIDQLGQARRVTVTKDSTTIVDGAGSKDAIQEREDSIRKQIEESTSDFDKKKLQERLAKLTGGVAVIHVGAATETELKERRYRIEDALNSTRAAVDEGYVAGGGTALVDVEKAIKDLKGDTPDEQTGINIVLRALSAPVRQIAENAGKDGAVVLNKLENQENEVGYNAATDKWENMVDAGIIDPTKVTRTALQNAASIAALLLTTEAVVAEIPEEKPAAPQGGAGAGAPGMGM

SEQ ID NO: 1637 - protein, 124 aa, Lactobacillus acidophilus; identical to SEQ ID NO: 562
  strain 30SC

SEQ ID NO: 1638 - protein, 1939 aa, Gallus gallus
MASPDAEMAAFGEAAPYLRKSEKERIEAQNKPFDAKSSVFVVHPKESFVKGTIQSKEGGKVTVKTEGGETLTVKEDQVFSMNPPKYDKIEDMAMMTHLHEPAVLYNLKERYAAWMIYTYSGLFCVTVNPYKWLPVYNPEVVLAYRGKKRQEAPPHIFSISDNAYQFMLTDRENQSILITGESGAGKTVNTKRVIQYFATIAASGEKKKEEQSGKMQGTLEDQIISANPLLEAFGNAKTVRNDNSSRFGKFIRIHFGATGKLASADIETYLLEKSRVTFQLPAERSYHIFYQIMSNKKPELIDMLLITTNPYDYHYVSQGEITVPSIDDQEELMATDSAIDILGFSADEKTAIYKLTGAVMHYGNLKFKQKQREEQAEPDGTEVADKAAYLMGLNSAELLKALCYPRVKVGNEFVTKGQTVSQVHNSVGALAKAVYEKMFLWMVIRINQQLDTKQPRQYFIGVLDIAGFEIFDFNSFEQLCINFTNEKLQQFFNHHMFVLEQEEYKKEGIEWEFIDFGMDLAACIELIEKPMGIFSILEEECMFPKATDTSFKNKLYDQHLGKSNNFQKPKPAKGKAEAHFSLVHYAGTVDYNISGWLEKNKDPLNETVIGLYQKSSVKTLALLFATYGGEAEGGGGKKGGKKKGSSFQTVSALFRENLNKLMANLRSTHPHFVRCIIPNETKTPGAMEHELVLHQLRCNGVLEGIRICRKGFPSRVLYADFKQRYRVLNASAIPEGQFMDSKKASEKLLGSIDVDHTQYRFGHTKVFFKAGLLGLLEEMRDDKLAEIITRTQARCRGFLMRVEYRRMVERRESIFCIQYNVRSFMNVKHWPWMKLFFKIKPLLKSAESEKEMANMKEEFEKTKEELAKSEAKRKELEEKMVVLLQEKNDLQLQVQAEADSLADAEERCDQLIKTKIQLEAKIKEVTERAEDEEEINAELTAKKRKLEDECSELKKDIDDLELTLAKVEKEKHATENKVKNLTEEMAVLDETIAKLTKEKKALQEAHQQTLDDLQVEEDKVNTLTKAKTKLEQQVDDLEGSLEQEKKLRMDLERAKRKLEGDLKLAHDSIMDLENDKQQLDEKLKKKDFEISQIQSKIEDEQALGMQLQKKIKELQARIEELEEEIEAERTSRAKAEKHRADLSRELEEISERLEEAGGATAAQIEMNKKREAEFQKMRRDLEEATLQHEATAAALRKKHADSTAELGEQIDNLQRVKQKLEKEKSELKMEIDDLASNMESVSKAKANLEKMCRTLEDQLSEIKTKEEQNQRMINDLNTQRARLQTETGEYSRQAEEKDALISQLSRGKQGFTQQIEELKRHLEEEIKAKNALAHALQSARHDCELLREQYEEEQEAKGELQRALSKANSEVAQWRTKYETDAIQRTEELEEAKKKLAQRLQDAEEHVEAVNAKCASLEKTKQRLQNEVEDLMVDVERSNAACAALDKKQKNFDKILAEWKQKYEETQTELEASQKESRSLSTELFKMKNAYEESLDHLETLKRENKNLQQEIADLTEQIAEGGKAVHELEKVKKHVEQEKSELQASLEEAEASLEHEEGKILRLQLELNQIKSEIDRKIAEKDEEIDQLKRNHLRIVESMQSTLDAEIRSRNEALRLKKKMEGDLNEMEIQLSHANRMAAEAQKNLRNTQGTLKDTQIHLDDALRTQEDLKEQVAMVERRANLLQAEVEELRGALEQTERSRKVAEQELLDATERVQLLHTQNTSLINTKKKLETDIVQIQSEMEDTIQEARNAEEKAKKAITDAAMMAEELKKEQDTSAHLERMKKNMDQTVKDLHVRLDEAEQLALKGGKKQLQKLEARVRELEGEVDSEQKRSAEAVKGVRKYERRVKELTYQCEEDRKNILRLQDLVDKLQMKVKSYKRQAEEAEELSNVNLSKFRKIQHELEEAEERADIAESQVNKLRVKSREIHGKKIEEEE

SEQ ID NO: 1639 - protein, 1928 aa, Gallus gallus
AMSSDSEMAIFGEAAPYLRKSEKERIEAQNKPFDAKSSVFVVHPKESFVKGTIQSKETGKVTVKTEGGETLTVKEDQVFSMNPPKYDKIEDMAMMTHLHEPAVLYNLKERYAAWMIYTYSGLFCVTVNPYKWLPVYNPEVVLAYRGKKRQEAPPHIFSISDNAYQFMLTDRENQSILITGESGAGKTVNTKRVIQYFATIAASGEKKKEEQPGKMQGTLEDQIISANPLLEAFGNAKTVRNDNSSRFGKFIRIHFGATGKLASADIETYLLEKSRVTFQLKAERSYHIFYQIMSNKKPELIDMLLITTNPYDYQFVSQGEITVPSINDQEELMATDSAIDILGFTPDEKTAIYKLTGAVMHYGNLKFKQKQREEQAEPDGTEVADKAAYLMGLNSADLLKALCYPRVKVGNEYVTKGQTVQQVHNAVGALAKAVYEKMFLWMVVRINQQLDTKQPRQYFIGVLDIAGFEIFDFNSLEQLCINFTNEKLQQFFNHHMFVLEQEEYKKEGIEWEFIDFGMDLAACIELIEKPMGIFSILEEECMFPKATDTSFKNKLYDQHLGKSNNFQKPKPGKGKAEAHFSLVHYAGTVDYNISGWLEKNKDPLNETVIGLYQKSSVKTLALLFASAGGELSEASGGGGKKGGKKKGSSFQTVSALFRENLNKLMTNLRSTHPHFVRCIIPNETKTPGKMLQQRYRICRKGFPSRVLYADFKQRYKVLNASAIPEGQFIDSKKASEKLLGSIDVDHTQYKFGHTKVFFKAGLLGLLEEMRDEKLAQLITRTQARCRGFLMRVEYQRMVERRESIFCIQYNVRSFMNVKHWPWMKLFFKIKPLLKSAESEKEMANMKEEFEKTKEELAKSEAKRKELEEKMVSLLQEKNDLQLQVQAEADSLADAEERCDQLIKTKIQLEAKIKEVTERAEDEEEINAELTAKKRKLEDECSELKKDIDDLELTLAKVEKEKHATENKVKNLTEEMAALDENIAKLTKEKKALQEAHQQTLDDLQAEEDKVNTLTKAKTKLEQQVDDLEGSLEQEKKLRMDLERAKRKLEGDLKLAHDSIMDLENDKQQLDEKLKKKDFEISQIQSKIEDEQALGMQLQKKIKELQARIEELEEEIEAERTSRAKAEKHRADLSRELEEISERLEEAGGATAAQIDMNKKREAEFQKMRRDLEEATLQHEATAAALRKKHADSTAELGEQIDNLQRVKQKLEKEKSELKMEIDDLASNMESVSKAKASLEKTCRALEDQLSEIKTKEEEHQRMINDLNAQRARLQTESGEYSRQVEEKDALISQLSRGKQAFTQQIEELKRHLEEEIKAKSALAHALQSARHDCDLLREQYEEEQEAKGELQRALSKANSEVAQWRTKYETDAIQRTEELEEAKKKLAQRLQDAEEHVEAVNAKCASLEKTKQRLQNEVEDLMIDVERANAACAALDKKQKNFDKILSEWKQKYEETQTELEASQKESRSLSTELFKMKNAYEESLDHLETLKRENKNLQQEISDLTEQIAEGGKAIHELEKVKKQIEQEKSEIQAALEEAEASLEHEEGKILRLQLELNQVKSEIDRKIAEKDEEIDQLKRNHLRIVESMQSTLDAEIRSRNEALRLKKKMEGDLNEMEIQLSHANRVAAEAQKNLRNTQGVLKDTQIHLDDALRTQEDLKEQVAMVERRANLLQAEIEELRAALEQTERSRKVAEQELMDASERVQLLHTQNTSLINTKKKLETDISQIQSEMEDTIQEARNAEEKAKKAITDAAMMAEELKKEQDTSAHLERMKKNLDQTVKDLQLRLDEAEQLALKGGKKQIQKLEARVRELEGEVDSEQKRSAEAVKGVRKYERRVKELTYQSEEDRKNILRLQDLVDKLQMKVKSYKRQAEEAEELSNVNLSKFRKIQHELEEAEERADIAESQVNKLRVKSREFHSKKIEEE

SEQ ID NO: 1640 - protein, 1939 aa, Gallus gallus
MSSDAEMAIFGEAAPYLRKSEKERIEAQNKPFDAKTSVFVVHAKESYVKSTIQSKESGKVTVKTESGETLTVKEDQIFSMNPPKYDKIEDMAMMTHLHEPAVLYNLKERYAAWMIYTYSGLFCVTVNPYKWLPVYNPEVVLAYRGKKRQEAPPHIFSISDNAYQFMLTDRENQSILITGESGAGKTVNTKRVIQYFATIAASGDKKKEEQPAGKMQGTLEDQIISANPLLEAFGNAKTVRNDNSSRFGKFIRIHFGATGKLASADIETYLLEKSRVTFQLKAERSYHIFYQIMSNKKPELIEMLLITTNPYDYHYVSQGEITVPSINDQEELMATDSAIDILGFTPDEKTAIYKLTGAVMHYGNLKFKQKQREEQAEPDGTEVADKAAYLMGLNSADLLKALCYPRVKVGNEFVTKGQTVQQVYNSVGALAKAVFEKMFLWMVVRINQQLDTKQPRQYFIGVLDIAGFEIFDFNSLEQLCINFTNEKLQQFFNHHMFVLEQEEYKKEGIEWEFIDFGMDLAACIELIEKPMGIFSILEEECMFPKATDTSFKNKLYDQHLGKSNNFQKPKPGKGKAEAHFSLVHYAGTVDYNISGWLDKNKDPLNETVVGLYQKSSLKTLALLFASAGGEAESGGGGKKGGKKKGSSFQTVSALFRENLNKLMTNLRSTHPHFVRCIIPNETKTPGAMEHELVLHQLRCNGVLEGIRICRKGFPSRILYADFKQRYKVLNASAIPEGQFIDSKKASEKLLGSIDVDHTQYKFGHTKVFFKAGLLGLLEEMRDEKLAQLITRTQARCRGFLMRVEYRRMVERRESIFCIQYNIRSFMNVKHWPWMKLFFKIKPLLKSAESEKEMANMKGEFEKTKEELAKSEAKRKELEEKMVSLLQEKNDLQLQVQAEADALADAEERCDQLIKTKIQLEAKIKEVTERAEDEEEINAELTAKKRKLEDECSELKKDIDDLELTLAKVEKEKHATENKVKNLTEEMAALDENIAKLTKEKKALQEAHQQTLDDLQAEEDKVNTLTKAKTKLEQQVDDLEGSLEQEKKLRMDLERAKRKLEGDLKLAHDSIMDLENDKQQLDEKLKKKDFEISQIQSKIEDEQALGMQLQKKIKELQARTEELEEEIEAERTSRAKAEKHRADLSRELEEISERLEEAGGATAAQIDMNKKREAEFQKMRRDLEEATLQHEATAAALRKKHADSTAELGEQIDNLQRVKQKLEKEKSELKMEIDDLASNMESVSKAKASLEKTCRALEDQLSEIKTKEEEHQRMINDVNAQRARLQTESGEYSRQVEEKDALISQLSRGKQAFTQQIEELKRHLEEEIKAKNALAHGLQSARHDCDLLREQYEEEQEAKGELQRALSKANSEVAQWRTKYETDAIQRTEELEEAKKKLAQRLQDAEEHVEAVNSKCASLEKTKQRLQNEVEDLMIDVERANSACAALDKKQKNFDKILSEWKQKYEETQAELEASQKESRSLSTELFKMKNAYEESLDHLETLKRENKNLQQEISDLTEQIAEGGKAIHELEKVKKQIEQEKSELQASLEEAEASLEHEEGKILRLQLELNQVKSEIDRKIAEKDEEIDQLKRNHLRIVESMQSTLDAEVRSRNEALRLKKKMEGDLNEMEIQLNHANRMAAEAQRNLRNTQGVLKDTQIHLDDALRSQEDLKEQVAMVERRANLLQAETEELRAALEQTERSRKVAEQELLDASERVQLLHTQNTSLINTKKKLESDISQIQSEMEDTIQEARNAEEKAKKAITDAAMMAEELKKEQDTSAHLERMKKNLDQTVKDLQHRLDEAEQLALKGGKKQIQKLEARVRELEGEVDAEQKRSAEAVKGVRKYERRVKELTYQSEEDRKNVLRLQDLVDKLQMKVKSYKRQAEEAEELSNVNLSKFRKIQHELEEAEERADIAESQVNKLRVKSREFHKKIEEEE

SEQ ID NO: 1641 - protein, 1942 aa, Gallus gallus
MASSDAEMAVFGEAAPYLRKSEKERIEAQNKPFDAKSSVFVAHPKESFVKGTIQSRETGKVTVKTEGGETLTVKEDQVFSMNPPKYDKIEDMAMMTHLHEPAVLYNLKERYAAWMIYTYSGLFCVTVNPYKWLPVYNPEVVLAYRGKKRQEAPPHIFSISDNAYQFMLTDRENQSILITGESGAGKTVNTKRVIQYFATIAASGEKKKEEQSGKMQGTLEDQIISANPLLEAFGNAKTVRNDNSSRFGKFIRIHFGATGKLASADIETYLLEKSRVTFQLKAERSYHIFYQVTSNKKPELIEMLLITTNPYDYPFVSQGEITVPSIDDKEELMATDSAIDILGFTADEKTAIYKLTGAVMHYGNLKFKQKQREEQAEPDGTEVADKAAYLMGLNSADMLKALCYPRVKVGNEYVTKGQTVQQVHNAVGALAKAVYERMFLWMVVRINQQLDTKQPRQYFIGVLDIAGFEIFDFNSFEQLCINFTNEKLQQFFNHHMFVLEQEEYKKEGIEWTFIDFGMDLAACIELIEKPMGIFSILEEECMFPKATDTSFKNKLYDQHLGKSSNFQKPKPTKGKVEAHFSLIHYAGTVDYNITGWLEKNKDPLNETVIGLYQKSSLKTLALLFANYGGAEAEASAGAGKKGGKKKGSSFQTVSALFRENLNKLMTNLRSTHPHFVRCIIPNETKTPGAMEHELVLHQLRCNGVLEGIRICRKGFPNRVLYADFKQRYKVLNASAIPEGQFIDSKKACEKLLGSIDIDHTQYKFGHTKVFFKAGLVGLLEEMRDEKLAQLITRTQARCRGFLMRVEYQKMVERRESVFCIQYNIRAFMNVKHWPWMKLFFKIKPLLKSAESEKEMANMKQEFEKTKEELAKSEAKRKELEEKMVKLVQEKNDLQLQVQAEADALADAEERCDQLIKTKIQLEAKVKEVTERAEDEEEINAELTAKKRKLEDECSELKKDIDDLELTLAKVEKEKHATENKVKNLTEEMAALDETIVKLTKEKKALQEAHQQTLDDLQAEEDKVNTLTKAKTKLEQQVDDLEGSLEQEKKLRMDLERAKRKLEGDLKLAHDSIMDLENDKQQLDEKLKKKDFEISQIQSKIEDEQLLGMQLQKKIKELQARIEELEEEIEAERTSRAKAEKHRADLSRELEEISGRLEEAGGATAAQIEMNKKREAEFQKMRRDLEEATLQHEATAAALRKKHADSTAELGEQIDNLQRVKQKLEKEKSELKMEIDDLASNMESVSKAKANLEKMCRTLEDQLSEFKTKDEQNQRMISDLSAQRARLQTESGEYARQADEKDGLISQLSRGKQAFTQQIEELKRQLEEEIKAKNALAHSLQSARHDCDLLREQYEEELEAKGELQRALSKANSEVAQWRTKYETDAIQRTEELEEAKKKLAQRLQDAEEHVEAVNAKCASLEKTKQRLQNEVEDLMIDVERANAACAALDKKQKNFDKILAEWKQKYEETQAELEASQKESRSLSTELFKMKNAYEESLDHLETLKRENKNLQQEISDLTEQIAEGGKAIHELEKVKKQIEQEKSEIQAALEEAEASLEHEEGKILRLQLELNQVKSEIDRKIAEKDEEIDQLKRNHLRIVESLQSSLDAEIRSRNEALRLKKKMEGDLNEMEIQLSHANRVAAEAQKNLRNTQAVLKDTQIHLDDALRTQEDLKEQVAMVERRANLLQAEIEELRAALEQTERSRKVAEQELMDASERVQLLHTQNTSLINTKKKLETDIAQIQSEMEDTIQEARNAEEKAKKAITDAAMMAEELKKEQDTSAHLERMKKNLDQTVKDLQHRLDEAEQLALKGGKKQIQKLEARVRELEGEVDAEQKRSAEAVKGVRKYERRVKELTYQSEEDRKNILRLQDLVDKLQMKVKSYKRQAEEAEELSNVNLSKFRKIQHELEEAEERADIAESQVNKLRVKSREFHSKKIEEEE

SEQ ID NO: 1642 - protein, 6591 aa, Gallus gallus
KMEEEEYEEVVEYYIEETIVEEGEPYEVVTEITDSTSTEFTGPTTITRTIEYEKTSGEGAATPVRKKTIRTKMDTSKFLTPYLQHSNKMKDLFSENKYKEKFNKERGKPYASTIDTPEIRRIKKVQEQLSEVKYRMAGEAARTICHVDEKAWDIEHAKKVSQQVSKVLYKQNWEENKDKYLLPPDAPELVNAIKNTAMFSKKLYTEDWEGDKTLFYPYNDSPELRRVAQAQKALSDIVYKKGHDERKSKYTSLPDPPDVEQAKKVTRQLSDIIYHDDYKNKIKGKWSQTPCYDVVIAKMNAENLSMKKYQEDFENVKDQIYFMQTETPEYEANKRVSDNVSKIKYRADYEKNKAIADYNVLPATENPLLRQLKTAGDVLSDKLYKEAYERSKGTSMNYCETPKFQTDNALKNFSDVKYKDAYQKNILGHYLGSFEDPHQIHCMKVEAMKSDKNYKADYEEEKTKCYFPQTITQEYEAIKKLEQCKDHTYKKHPDQIKFTPVTDSPVQKQAEINSKQLSDKLYRSSGEEVKHKYTLPPDVPQFIQARYNAANVSDAYYKQDYHDLIAKGNNVSLDAIPITRAKASRNIASDVSIYSRYTYFRHLVKMSTTSGCMVDSKYSISLTRVTNQSVGLYKTSFILIMFALDKQMLLYCFLNHSSRLINELEGHIAQIVEVDYDSVISDKLYSFCYSFQVREMDCLNCFNIFHTPLSTVILRKLWLMNHCYVYNLLCIVLDGGKRKADIANVPEQVAAFLSSESHNRFSSPYKYKEAYEKAKGQQVGFKSLQDDPKLVHYMHVAKIQSDREYKKDYEKSKTNYHTPPDTFSIQAAKKSQDVASTAHYKNLIHHYTYLPDAMDVELAKNMMQIQSDNVYKQDYNSWFKGIGWSPLGSLDVEKAKKAGDALNEKKYRQHPDTIKFTSVPDSMTMVLAQHNTKQLSDVAYKQEGEKVKHKYKLDPDVPQFIQARVNAFNLSDANYKADWKKTIAKGYDLKPDAIPIIAAKASRNIASDYKYKESYEKDKGRQVGYRSLQDDPKLVHYMHVAKMQSDREYKKDYEVTKTKYHTPLDMFSVTAAKKAQEAVTNTGYKQLIHHYTLLPDSVNLELSRNMMQLQSDNMYKADFNNWLRGVGWLPIQSLEVEKAKKASEILSEKKYRQHPDKLKYSIPLDAMEQVLAKQNAKTMNKRLYTDKWNKEKTSIHVMPDTPEILQSRVNQITMSNKLYKAGWEEDKKKGYDMRPDAIPIKAAKTSQDIASDYKYKLAHEKAKGKHIGFRSLEDDPKLVHFMQVAKMQSDREYKKDYEKAKTNFHTPVDMLSVVAAKKAQEVATNANYKNLIHVYNVLPDAMSLELAKNMMQIQSNNQYRAEYDESMKGVGWMPLGSLEAEKNKKAMEILSEKKYRQHPDKLKYSVPVDSMNMALALHNAKIMDEHQYKQAWEEDKKKVHMTPDIPQFALAKANAFNISDKMYRHSFEEARKKGYDLRSDAIPIKAAKASRDIASDYKYKLGYEQDKGKLVGFRSLQDDPKLVHYMQVAKMQSDREYKKAYETSKTHYQTPSDALSIMAAKEAQDRVTNANYKRLIHHYMLLPDAMSFELYRNMNQIQSNNEYKQDYNEWFKGIGWSPAGSLDVEKSKKATEIASDQKYRQHPSIFPFTKQIDAMDMVLAKHNADIMNKHAYTQAWEKDKTQVHVMPDTPDILQAKQNKANYSQKQYKLDWQEMIKKGYDLTPEAISVKAAKASRDIASDYKYKEGYRKQQGHHIGFRSLQDDPKMMWSMQVAKMQSEREYKKDFEKWKTKFNMPVDMLGFLLAKKCQELVSDIDYKHMLHRWTCLPDQNDVTQAKRVYELQSDNLYKSDLQWLKGIGWSPLGSLESEKNKKASEILSEKKYRQHPDTIKFTSIPDAMNIILAKSNAKNRSDILYREAWDKDKTQVHIMPDTPEILLAKSNLINTSDKHYKLGYEELRRKGYDLPPDAIPLKSAKASRDIASEYQYKTAYRKQLGHHVGARNIEDDPKMMWSMHVAKIQSDREYKKAFEKTKTHFSSPVDMLGIVLAKKCQELVSDVDYKHLLHRWTCLPDQNDVVQARKVYDLQSDNVYKSDLQWLRGIGWSPLGSLDEEKNKRASMILSDKKYRQHPDTIKFTSLPDSMPMVLAKHNSEIMNHRSYIAAWEKDKTSIHIMPDTPGILLAQQNKVNYSEKMYRLAMEEDKKKGYDLRADAIPIKAAKASRDIASDYKYKEGYRKQLGHHIGARNIEDDPKMMWSMHVAKVQSDREYKKAFEKTKTHFSSPVDMLGIVLAKKCQELVSDVDYKHLLHRWTCLPDQNDVVQARKVYDLQSDNVYKSDLQWLRGIGWSPLGSLDEEKNKRASMILSDKKYRQHPDTIKFTSLPDSMPMVLAKHNSEIMNHRSYIAAWEKDKTSIHIMPDTPGILLAQQNKVNYSEKMYRLAMEEDKKKGYDLRADAIPIKAAKASRDIASDYKYKEGYRKQLGHHIGARNIEDDPKMMWSMHVAKIQSDREYKKAFEKTKTHFSSPVDMLGIVLAKKCQELVSDVDYRHYLHQWICLPDQNDVIHARKAYDLQSDNFYKSDLEWMRGIGWVPIGSLDIEKAKRAGQILSDKVYRQPPDTIKFTSVTDSLEMTLAKHNAEMMNKRLYTEAWDKDKTQIHIMPDTPEITLAKQNMHNYSEKLYKQAMEEAKKKGYDLRSDAIPIQAAKASRQIASDYKYKEGYRKQLGHHIGARNIEDDPKMMWSMHVAKIQSDREYKKAFEKTKTHFSSPVDMLGIVLAKKCQELVSDVDYRHYLHQWICLPDQNDVIHARKAYDLQSDNFYKSDLEWMRGIGWVPIGSLDVEKAKRAGQILSDKVYRQPPDTIKFTSVTDSLEMTLAKHNAETMNKRLYTEAWNKDKTTIHVMPDTPEILLAKQNQAHYSQKMYKLALEESKKKGHDLRFDAIPIQAAKASREIASDYKYKEGYRKQLGHHIGARNIEDDPKMMWSMHVAKIQSDREYKKAFEKTKTHFSSPVDMLGIVLAKKCQELVSDVDYRHYLHQWICLPDQNDVIHARKAYDLQSDAVYKSDLEWLKGIGWVPIGSLDVEKAKKAGEILSDRKYRQPADQIKFTSVTDSLAMMLAKHNAEIMNKRLYTEAWDADKTSIHVMPDTPTILLAKANAANVSHKHYVQAWEDAKKKGYDMRADAIPIRSAKASRDIASDYKYKEAHEKQKGHYIGCRTAKEDPKLSWAARAMLLQNDRIYRKAYNDSKAHIHMPVDAMSLQAAKECQTLVSDVDYRHYLHQWTCLPDQNDVMHARKAYDLQSDNVYKSDLEWLRGIGWLTEGSVDVIKAKKAQEILSDRLYRTQPDKMKFTSITDTPDVVQAKINAMQLSNHLYREVWDKDKTQISIPSDTPELLQSKLNALNISNKHYQKAWDEAKAKNYDLRADAIPIKHAKASRDIASEYKYKEAHEKQKGHYIGCRTAKEDPKLSWAARAMLLQNDRIYRKAYNDSKAHIHMPVDAMSLQAAKECQTLVSDVDYRHYLHQWTCLPDQNDVMHARKAYDLQSDNVYKSDLEWLRGIGWLTEGSVDVVKAKKAQEILSDRLYRTQPDKMKFTSVTDAPDVVQAKINAMQLSNRLYREAWDKDKTQISIPSDTPEMLQSKVNALNISNKHYQKAWDEAKAKNYDLRADAIPIKHAKASRDIASEYKYKEAHEKQKGHYIGCRTAKEDPKLSWAARAMLLQNDRIYRKAYNDSKAHIHMPVDAMSLQAAKECQTLVSDVDYRHYLHQWTCLPDHNDVVHARKAYDLQSDAVYKSDLEWLRGIGWLPNDSPGVQRVKHAQDLLSDKVYRTPIDSVKYTSVVDSPDILLAKMNAEQLSIPKYKEAWEKDKTMIHIMPDTPEITLARSNAHNYSQKLYKEAWDEVKMSYDLRADAIPIKAAKASREIASDYKYKLDHEKQKGHYVGVPNAKADTKIRFALGIGKVQSELEYKKHFAKWKTQCHLPVDMLSIQSAKHGQSLVSDVDYRHYLHQWICLPDQNDVIHARKAYDLQSDAVYKSDLEWLRGIGWLPNDSLGINHVKHAGDLLNERKYRTKAETLHFTPVADRVDYVTAKKSGEILSDIKYHKDWNEVKSNYTLTDTPQLDMAREAARILNQSLYKESWEKEKATGYLLPPDTVQIRHAKHSNDVQSELKYKADYVKQRGHYVGVASMRDDPKLVWFEHAGEIQNDRLYKSNYHKTKSKIHIPADIMSVVAAKECQALVSDVDYRHYLHQWTCHPDQNDCIQARKAYDLQSDNIYKSDLEWLRGCGWIPLGSVEHKKVKHAQELINKRAYTKDAIENFSKYTSVVDTPDIVLAKINSVNQSDLKYKETFNLEKGQYIGSDDTPELNHARDMSLLYSDKLYKRDWEVCKPIGYTLDAKYIPLVGAKHANYVNSELKYKEIYEKLKGHYLAGKDIGDFPSVVHSLAFQKIRSALAYRKNYEDTKTRVHIPSDMMNHVLAKKCQYILSDLEYRTYLHHWNCSPEEHDVIQARRAQEILSDVVYKDDLNWLKGIGCYVWDTPQILHAKKSYDLQSQIKYTAAGKENFQNFGVVTDTPVYVTAVQSGINASDVKYKEDYHKTKDKYTTVTETADSERVQNLKHLFSNNLYKEAWDRVKATSYIMPSDAVSLARAKELKHNASIVKYREEYDKFKALYTLPRSVEDDPNTARCLRVGKLNIDRLYKETYEKNKAKVHIIPDMVDIIAAKDAQKKISEIDYRTHLHDWICLPDLQINAHVRKVADQISDVVYKDDLNWLKGIGCFVWDTPEILHAKHAYDLRSDIKYKSDADKMKSKYTVVMDTPVYVQNILSGLNASEVIYRGDYLKKVRGKMIPTDKTVDLQRAHHANKIQSENLYRWAGLKALPTGYSLPKDTPGFQHAKHVQHIGSDLKYKEAYEHMKAKGYTLGPNDVGFENVKKVNQVINERLYRATYHKNKDKIHTTPDTPEIRQVRATQEAVSDLIYKSDFFKLQGHLISLPFTPQVLHCRYVGDITSDNKYKEDLKWLQGLGCFLYDTPDMVRARQLRKLWSNYVYTDSAKKMRDKYSVVLDTPGYRTVQELKTHLSDLVYRAAGKELKTKYTSVLNTPDFLRAKEGQRIQSQYLYVALATKERPHHHAGNQTPAFTHARHVKDMVSETKYKIQYEKMKDKYTPVLDTPILIRAKRAYLNASDLRYKETFENTKGKYHTVKDALDIVYHRKVTDDISSVKYKENYMSQLGIWRSIPDRPEHFHHRAVTDAISDVKYKEDLSWLRGIGCYAWDTPDFALAEKNKVLYSGHKYKETFEKTKSHFKYVADSPINRHFKHATQLLDAKLYKAAYEKLKDRYSVIVDDPKNLLAKWGTTLSSQVEYKKDYEKKKDKYTTVVDTPENIRTAKVNKQISDIIYKLEYNKAKPKGYTTIHDTPMLLHVRKVKDRISDLKYKELYERNKSHCNVVADSVHIKTPRHAYKLNSNLDYKKKYEAAKAHWHWIADRPDFVQAAKSSLQQSDYEYKLDREYLKGCKLSVTDDKNTVLALNNAILASDIKYKEKHNKARGTCLVVPDTPQILLAKNVSSLVSENKYKEHSKKQLPRGSYTTLPETRDTAHVKEVTKNVSDTNYKKKFVKEKGKSNYSIMLEPPEVKHAMEVAKKQSTVEYKKDAKSKLHYTPIADRPDIKKATQAAKLISDIEYKKRGEAGLGVTMLGRPDIELAKEVSKLTSQVKYKENFSKEKGKKPKYDLKEAKIYKTMKDAHNIASEVKYKADLKKLHKPVTDMSESLIMNHVLNTSQLASAYQYKKQYEKSKGHYHMVPDNLEQVHLREASELQSHVKYKEKYEKEKGKPMLDFETPTYLTAKESQLMQSEKEYKRDFEESIKGRNLTGLEITPSLLHVKYATKIASEKEYRKDLEEGVKGKGLSVLEETPDMLRAKNATQILNEKEYKKALELEIKGKGLSELALETPDFVRAKNATDIASQIKYKQLAEMEKANYTSVVDTPEIIHAQQVKNLSSQKKYKEEAEKTMPYYVPVADTPEMQRVRENQKNFSTLQYQWDLQNSKGKVTVVQDTPEMLRVKENQKNFSSILYKEDIGTGTTIEKTPEMQRVKRTQDAISSIKYKESIGKGTPIPDLPEVKRVKETQKHISSVLYKEDLGTGIPTPVTPEIERVKRNQEHISSVAYKEGLGTGIPTPVTPEMERVKRNQENISSVLYKENVGMGTPTPVTPEMERVKRNQEHVSSVLYKENVGKVTPTPITPEMERVKRNQEIISSVLYKESLGRATPTPITPEMERVKRNQEQISSVLYKEHLAKGTPTPMTPEMERAKRNQENISSVLYSDSFRKQVQGKAAYVLDTPEMRRVRETQKHISTVKYHEDFEKNKGTFTPVVTDPITERVKKNMHDFSDISYRGIQRRVVEMEQKRVDQDQENLTGLRVWRTNPGSVFDYDPAEDNIQSRSLHMISVQAQRRSREHSRSASALSISGGDEKSEPSEGVNQHLSYYSSGGFFTTTATVGYKHAKTIELPQQRSASVATQQTTVSSVPSHPSTAGKTYRAMYDYTAADADEVSFKDGDTIVNVQAIDEGWMYGTVQRTGKTGMLPANYVEAV

SEQ ID NO: 1643 - protein, 4162 aa, Gallus gallus
MTTKAPTFTQPLQSVVALEGSAATFEAHISGFPVPEVSWYRDGQVLSAATLPGVQISFSDGRAKLVIPSVTEANSGRYTIQATNGSGQATSTAELLVTAGTAPPNFSQRLQSMTARQGSQVRLDVRVTGIPTPVVKFYRDGVEIQSSPDFQILQEGDLYSLIIAEAYPEDSGTYSVNATNNVGRATSTAELLIQGEEEAVPAKKTKTIVSTAQISQTRQARIEKKIETHFDARSLTSVEMVIEGAAAQQLPHKAPPRMPPRPTSKSPTPPVITAKAQMARQQSPSPVRQSPSPVRHVRAPTPSPVRSVSPAGRISTSPIRPVKSPSPIRKAQVVTPGAEVLPPWRQEGYSATAEAQMKETRVSTSATEIRTEERWEGRYGLQEQVTISGAAAGEVAAGAKEVRKEPEKTPVPTVIIATDKAKEQERISTAREEISARHEQVHVSHEQIEAGKRAEAVATVVAAVDQARVRSPWETEQVDETYVKKKTLEYGYKEHAVKDHEAQAEHHVATKEVKTVYVPPEKHIPAAEKKEVHVSTEIKRETEAKIEKTIHIEHPRPRTASPHFTVSKIAVPKPDHTYEVSIAGSAMATLEKELSATSAAQKITKPVKPPQLKPHEVKIKPESAPPQFPFTEAAETYKAHYDVETKKEVDVSIKGEAVREDHLLLRKESEAKVTETARVPVPAEIPVTPPTLVWGLKNKTVTEGESVTLECHISGHPQPTVTWYREDYKIESSMDFQITFKAGLARLVIREAFAEDSGRFTCTATNKAGSVSTSCHLHVKVSEETETRETISEKVVTEEKSYVETKDVVMEDVSAAAEEVSGEPVPPFFIRKPVVHKLIEGGSIIFECQVGGNPKPHVLWKKGGVPLTTGYRYKVSYKRETGECKLEISMTFADDAGEYTIVIRNKFGEASATVSLLEEADYEAYIKSQQEMMYQTQVTAYVQEPKVAEVAPPISYGDFDKEYEKEQALIRKKMAKDTVMVRTFVEDEEFHISSFEERLIKEIELRIIKTTLDELLEEDGEEMMIDISESEAIGAGFDLRLKNYRTFEGTGVTFHCKTTGYPLPKIAWYKDGKRIRHGERYHMEVLQDGSASLRLPVVLPEDEGIYTVFASNMKGNAICSAKLYVEPVAPTATPGYMPGPEVMRRYRSISPRSPSRSPARSSPSRSPARRLDETDEGQLERLYKPVFVLKPTSVKCSQGQTARFDLKVVGRPMPETYWFHNGQQVVNDYTHKIVIKEDGTQSLIIVPAMPEDSGEWAVIAQNRAGKASVSVTLSVEAKEDLVRPRFVERLRNVSVKKGSRLHMAVKATGNPNPDIVWLKNSDIIVPHKYPRIRIEGTKGAAALNIESTARQDAAWYTATAINKAGRDTTRCKVNVEVEHAEPEPERRLIIPKGTYKAKEIAAPELEPLHLRYGQEQWEEGDLYDKEKQQKPFFKKKLTSLRLKQFGPAHFECRLTPIGDPTMVVEWLHDGKPLEAANRLRMINEFGYCSLDYGVAYSRDSGVITCRATNKYGTDHTSATLIVKDEKSLVEESQLPEGRRGMQRIEELERMAHEGALPAVAVDQKEKQKPELVLVPEPARVLEGETARFRCRVTGYPLPKVNWYLNSQLIRKSKRFRLRYDGIHYLDIVDCKSYDTGEVKVTAENPEGFIEHKVKLEIQQREDFRSVLRRAPEPRHEPVVTEPGKLLFEVQKIDKPAEATTKEVVKLKRAERITHEKLSEESEELRSKFKRRTEEGYYEAITAVELKSRKKDESYEEMLKKTKEELLHWTKEIPEEEKKALPPEGKITIPTFKPEKVELSPSMEAPKIFERIQSQTVAQGTDAHFRVRVVGKPDPECQWFRNGVQIERTDRIYWYWPEDNVCELVIRDVTADDSASIMVKAVNIAGETSSHAFLLVQAKQLISFIQNLQDVVAKERDSMATFECETSEPFIKVKWFKNGIEIHSGEKYRMHSDRKAHFLSVLAVEMSDADDYSCALVEDESVKTTAKLIVEGAVVEFIKELEDVEVPESFTGELECEVSPEDIEGKWYHGDVELSSNHKYVLASRRGRRILTIKDVNKDDQGEYSFVVDGKRTHCKLKMKPRPMTILQGLTDQKVCEGDIVQLEVKVSVENVEGVWMKDGHEIQSSDRIHIVLDKQSHMLLIEDATQEDSGTYSFSIPGLELSTTGQVTVYSVEIIVPLKDVHVVEGTKAILECKVSAPDVTSSKWYLNDHQIKPDERVQAVCKGTKQRLVITRTHASDEGHYKLMVGKVETSCNVTVEEIEIIRGLHDITCTETQNVSFEVELSHSGIDVIWHFKGQEIKAGPKYKIEARGKIYKLTVVKMMKDDEGEYVFYAGGKKTSGKLIVAGGAISKPLADLTVAESQRAVFECEVANPESEGQWLKNGKPLPMTDQYRAETDGVKRRLNIPAAKMDDMGEYSYEIASSKTSAKLHVEAVKIKKTLKNLTVTETQEAVFSVELSHPDVKGALWIKNGVELESNDKYEISVKGTVHTLKIKHCVVTDESVYSFKLGKIGANARLHVETVKIIKKPKDVTALENAVVSFELSVSHDTVPVRWFHKNVELKQSDKYKMISQRKVHKLMLHNISPADAGEYTAFVGQLECKAKLFVETIHITKTMKSIEIPETKTASFQCEVSHFNVPSVWLKNGVEIEMSEKFKIVVQGKLHQLNIMNTSSEDSAEYTFVCGNDRVSATLTVKPILITSMLEDINAEEKDTITFEVTVNYEGISYKWLKNGVEIKSTDKCQIRTKKLTHSLSIRNVHFGDAAEYSFVAGKAASSATLYVEARHIEFRKHIKDIKVVEKKRAIFECEISEPDVQVQWMKDGQELQIGDRMKIQREKYVHRLIIPSTKMSDAGQYTVVAGGNTSSANLIVEGRDIRIRSIRKEIQVIERQRAEIEFEVNEDDIEPQWYKDGIEINFHYEERYSYVVERRIHRMSIFETTYSDAGEYTFVAGRNRSSVVLYVNAPEPPQIIQELQPTTVESGKPARFCAIISGKPQPKVSWYKDDQQLSPGFKCKFLHDAQEYTLLLIETFPEDSAVYTCEAKNDYGVATTSASLSVEIPEVVSPELEVPVYPPAVIVPLRDAVTSEGQSARFQCRVTGTDLKVSWYSKDREIKPSRFFRMTQFEDTYQLEIAEAYPEDEGTYTFVASNSVGQVTSTAILKLEAPEKIMYEKLEEEIEMEVKVAPILRRRLEPLEVAVNHVAKFTCEVETTPNVKFQWYKAGREIYDGDKYSIRSSNYLSTLEIPRPQVVDCGEYSCKASNQHGSVSSTAFLTVTEPPRFIKKLDSSRLVKQHDSTRYECKVGGSPEIKVTWYKGETEIHPSEKYSMSFVDSVAVLEMHNLSVEDSGDYSCEAQNPAGSASTSTSLKVKAPPAFTKKPHPVQTLKGSDVHLECELQGTPPFQISWYKDKREIRSSKKYKVMSENYLASIHILNVDTADVGEYHCKAVNDVGSDSCIGSVTLRAPPTFVKKLSDVTVVVGETIELQAAVEGAQPISVLWLKDKGEIIRESENLWISYSENVASLKIGNAEPTNAGKYICQIKNDAGFQECFAKLTVLEPAVIVEKPGPVKVTAGDSCTLECTVDGTPELTARWFKDGNELSTDHKYKISFFNKVSGLKILNAGLEDSGEYTFEVKNSVGKSSCTASLQVSDRIMPPSFTRKLKETYGQLGSSAVLECKVYGSPPILVSWFHDGQEITSGDKYQATLTDNTCSLKVNGLQESDMGTYSCTATNVAGSDECSAFLSVREPPSFVKKPEPFNVLSGENITFTSIVKGSPPLEVKWFRGSIELAPGHKCNITLQDSVAELELFDVQPLQSGDYTCQVSNEAGKISCTTHLFVKEPAKFVMKVNDLSVEKGKNLILECTYTGTPPISVTWKKNGVILKHSEKCSITTTETSAILEIPNSKLEDQGQYSCHIENDSGQDNCHGAITILEPPYFVTPLEPVQVTVGDSASLQCQVAGTPEMIVSWYKGDTKLRGTATVKMHFKNQVATLVFSQVDSDDSGEYICKVENTVGEATSSSLLTVQERKLPPSFTRKLRDVHETVGLPVTFDCGIAGSEPIEVSWFKDNVRVKEDYNVHTSFIDNVAILQILKTDKSLMGQYTCTASNAIGTASSSGKLVLTEGKTPPFFDTPITPVDGIIGESADFECHISGTQPIRVTWAKDNQ

SEQ ID NO: 1644 - protein, 377 aa, Gallus gallus; identical to SEQ ID NO: 898

SEQ ID NO: 1645 - protein, 381 aa, Gallus gallus
MPFSSTHNKHKLKFSAEEEFPDLSKHNNHMAKVLTPELYKRLRDKETPSGFTLDDVIQTGVDNPGHPFIMTVGCVAGDEESYEVFKDLFDPVIQDRHGGYKPTDKHRTDLNHENLKGGDDLDPKYVLSSRVRTGRSIKGYSLPPHCSRGERRAVEKLSVEALNSLEGEFKGRYYPLKAMTEQEQQQLIDDHFLFDKPVSPLLLASGMARDWPDARGIWHNDNKTFLVWVNEEDHLRVISMEKGGNMKEVFRRFCVGLKKIEEIFKKAGHPFMWTEHLGYILTCPSNLGTGLRGGVHVKLPKLSQHPKFEEILHRLRLQKRGTGGVDTAAVGAVFDISNADRLGFSEVEQVQMVVDGVKLMVEMEKKLEQNQPIDDMIPAQK

SEQ ID NO: 1646 - protein, 530 aa, Gallus gallus
MSKHHDAGTAFIQTQQLHAAMADTFLEHMCRLDIDSEPTIARNTGIICTIGPASRSVDKLKEMIKSGMNVARLNFSHGTHEYHEGTIKNVREATESFASDPITYRPVAIALDTKGPEIRTGLIKGSGTAEVELKKGAALKVTLDNAFMENCDENVLWVDYKNLIKVIDVGSKIYVDDGLISLLVKEKGKDFVMTEVENGGMLGSKKGVNLPGAAVDLPAVSEKDIQDLKFGVEQNVDMVFASFIRKAADVHAVRKVLGEKGKHIKIISKIENHEGVRRFDEIMEASDGIMVARGDLGIEIPAEKVFLAQKMMIGRCNRAGKPIICATQMLESMIKKPRPTRAEGSDVANAVLDGADCIMLSGETAKGDYPLEAVRMQHAIAREAEAAMFHRQQFEEILRHSVHHREPADAMAAGAVEASFKCLAAALIVMTESGRSAHLVSRYRPRAPIIAVTRNDQTARQAHLYRGVFPVLCKQPAHDAWAEDVDLRVNLGMNVGKARGFFKTGDLVIVLTGWRPGSGYTNTMRVVPVP

SEQ ID NO: 1647 - protein, 1132 aa, Gallus gallus
MPEPSKAAPKKEAKKKEEKKEEKKEAPPPQEHKDEAPDDVHPPETPDPEGLFLSKPQNVMVESGRDVTVSARVAGAALPCAPAVKWFKGKWAELGDKSARCRLRHSVDDDKVHTFELTITKVAMGDRGDYRCEVTAKEQKDSCSFSIDVEAPRSSEGNVLQAFKRTGEGKDDTAGELDFSGLLKKREVQVEEKKKKKDEDDQFPPEIWELLKGVTKKSEYERIAFQYGITDLRGMLKRLKKVHVEPKKSEAFIRKLDPAYQVDKGNKIKLVVELSDPDLPLKWYKNGQLLKPSTKYVFENVGLKRILTIHKCSLADDAAYECRVNDEKCFTEVFVKEPPVTVVRGLEDQQVVVGDRVVLEAEVSEEGAQVMWLKDGVDVTRDDAFKYRFKKDGKKHFLIINEAELSDSAHYKIMTNGGESEAELSVEEKQLEVLQDMADLTVKASEQAVFKCEVSDEKVTGRWFRNGVEVKPSKRIHISHNGRFHKLVIDDVRPEDEGDYTFIPDGYALSLSAKLNFLEIKVEYVPKQEPPKIHLDCSGKAAENTIVVVAGNKVRLDVPISGEPAPTVTWKRGDQLFTATEGRVHIDSQADLSSFVIESAERSDEGRYCITVTNPVGEDSATLHVRVVDVPDPPQSVRVTSVGEDWAVLSWEAPPFDGGMPITGYLMERKKKGSMRWMKLNFEVFPDTTYESTKMIEGVFYEMRVFAVNAIGVSQPSLNTQPFMPIAPTSEPTHVVLEDVTDTTATIKWRPPERIGAGGVDGYLVEWCREGSNEWVAANTELVERCGLTARGLPTGERLLFRVISVNMAGKSPPATMAQPVTIREIVERPKIRLPRHLRQTYIRRVGEQVNLVIPFQGKPRPQVTWSREGGALPAEVQTRTSDVDSVFFIRSAARPLSGNYEMRVRIDNMEDCATLRLRVVERPGPPQAVRVMEVWGSNALLQWEPPKDDGNAEISGYTVQKADTRTMEWFTVLEHSRPTRCTVSELVMGNEYRFRVYSENVCGTSQEPATSHNTARIAKEGLTLKMVPYKERDLRAAPQFLTPLVDRSVVAGYTVTLNCAVRGHPKPKVTWLKNSVEIGADPKFLSRHGLGVLSLLIRRPGPFDGGTYGCRAVNEMGEATTECRLDVRVPQ

SEQ ID NO: 1648 - protein, 375 aa, Gallus gallus; identical to SEQ ID NO: 862

SEQ ID NO: 1649 - protein, 417 aa, Gallus gallus
MSLSNKLTLDKVDVKGKRVVMRVDFNVPMKDHKITNNQRIKAAVPTIKHCLDHGAKSVVLMSHLGRPDGVPMPDKFSLAPVAVELKALLGREVSFLKDCVGPEVEKACANPANGSVILLENLRFHVEEEGKGKDASGNKIKADAAKVEAFRASLSKLGDVYVNDAFGTAHRAHSSMVGVHLPQKAAGFLMKKELDYFAKALESPERPFLAILGGAKVQDKIQLISNMLDKVNEMIIGGGMAFTFLKVLNNMQIGNSLFDEEGSKIVKDLMAKAEKNGVKITLPVDFITADKFDEHAQTGEATVASGIPAGWMGLDCGPESVKKFVEVVGRAKQIVWNGPVGVFEWDKFSKGTKALMDKVVEVTGKGCITIIGGGDTATCCAKWNTEDKVSHVSTGGGASLELLEGKVLPGVDALSSV

SEQ ID NO: 1650 - protein, 434 aa, Gallus gallus
MSIQKIHAREILDSRGEPTVEVDLHTAKGHFRAAVPSGASTGIHEALEPRDGDKKRFLGKGVLKAVEHINKTIGPALIEKKISVVEQEKIDKVMIEMDGTENKSKFGANAILGVSLAVCKAGAAEKGVPLYRHIADLAGNTELILPVPAFNVINGGSHAGNKLAMQEFMVLPVGAASFHDAMRVGAEVYHSLKGVIKAKYGKDATNVGGEGGFAPNILDNHEALELLKAAIAQAGYTDKVVIGMDVAASEFCRDGRYHLDFKSPPHTKRYITGEQLGEIYRGFIKDYPVVSIEDPFDQDDWEAWKRFVFHVDIQVVGDDLTVTNPKRIAHGAEQHACNCLLLKVNQIGSVTESIQACKLAQSHGWGVMVSHRSGETEDTFIADLVVGLCTGQIKTGAPCRSERLAKYNQLMRIEEALGDKAKFAGRKFRNPKAK

SEQ ID NO: 1651 - protein, 897 aa, Gallus gallus
MNSMNQIETNMQYTYNYEEDEYMTQEEEWDRDLLLDPAWEKQQRKTFTAWCNSHLRKAGTQIENIEEDFRNGLKLMLLLEVISGERLPKPDRGKMRFHKIANVNKALDYIASKGVKLVSIGAEEIVDGNVKMTLGMIWTIILRFAIQDISVEETSAKEGLLLWCQRKTAPYRNVNIQNFHLSWKDGLGLCALIHRHRPDLIDYSKLNKDDPIGNINLAMEIAEKHLDIPKMLDAEDIVNTPKPDERAIMTYVSCFYHAFAGAEQAETAANRICKVLAVNQENERLMEEYERLASELLEWIRRTIPWLENRTPEKTMQAMQKKLEDFRDYRRKHKPPKVQEKCQLEINFNTLQTKLRISNRPAFMPSEGKMVSDIAGAWQRLEQAEKGYEEWLLNEIRRLERLEHLAEKFRQKASTHEQWAYGKEQILLQKDYESASLTEVRAMLRKHEAFESDLAAHQDRVEQIAAIAQELNELDYHDAASVNDRCQKICDQWDSLGTLTQKRREALERTEKLLETIDQLHLEFAKRAAPFNNWMEGAMEDLQDMFIVHSIEEIQSLISAHDQFKATLPEADGERQAILSIQNEVEKVIQSYSMRISASNPYSTVTVEEIRTKWEKVKQLVPQRDQSLQEELARQHANERLRRQFAAQANVIGPWIQTKMEEIARSSIEMTGPLEDQMNQLKQYEQNIINYKHNIDKLEGDHQLIQEALVFDNKHTNYTMEHIRVGWELLLTTIARTINEVETQILTRDAKGITQEQMNDFRASFNHFDRRKNGLMDHDDFRACLISMGYDLGEAEFARIMSLVDPNGQGTVTFQSFIDFMTRETADTDTAEQVIASFRILASDKPYILADELRRELPPEQAQYCIKRMPQYTGPGSVPGALDYTSFSSALYGESDL

SEQ ID NO: 1652 - protein, 994 aa, Gallus gallus
MENAHAKTAEECLAFFGVNESVGLSGEQVRRALEKYGHNELPAEEGKTIWELVVEQFEDLLVRILLLAACISFVLAWFEEGEETITAFVEPFVILLILIANAVVGVWQERNAENAIEALKEYEPEMGKVYRADRKAVQRIKARDLVPGDIAEVAVGDKVPADIRIISIKSTTLRVDQSILTGESVSVIKHTEPVPDPRAVNQDKKNMLFSGTNIGAGKAVGIVVATGVNTEIGKIRDEMAATEQDKTPLQQKLDEFGEQLSKVISLICVAVWLINIGHFNDPVHGGSWIRGAIYYFKIAVALAVAAIPEGLPAVITTCLALGTRRMAKKNAIVRSLPSVETLGCTSVICSDKTGTLTTNQMSVCKMFIVDKVEGDVCSLNEFSITGSTYAPEGDVLKNEKHIKAGQHDGLVELATICALCNDSSLDYNEAKGIYEKVGEATETALTCLVEKMNVFNTDVRSLSKVERANACNSVIKQLMKKEFTLEFSRDRKSMSVYCSPAKASRAAVGNKMFVKGAPEGVIDRCNYVRVGTTRVPLTPAVKEKILAVIKEWGTGRDTLRCLALATRDTPPKMEDMMLVDSTKFAEYETDLTFVGCVGMLDPPRKEVMGSIRLCRDAGIRVIMITGDNKGTAIAICRRIGIFTEDEEVSGRAYTGREFDDLPPAEQREACRRACCFARVEPTHKSKIVEFLQSFDEITAMTGDGVNDAPALKKAEIGIAMGSGTAVAKTASEMVLADDNFSTIVAAVEEGRAIYNNMKQFIRYLISSNVGEVVCIFLTAALGLPEALIPVQLLWVNLVTDGLPATALGFNPPDLDIMDKPPRSPKEPLISGWLFFRYLAIGGYVGAATVGAAAWWFLYAEDGPSLTYHQLTHFMQCTHHNAEFEGVDCDIFESPVPMTMALSVLVTIEMCNALNSLSENQSLLRMPPWVNIWLVGSICLSMSLHFVILYVDPLPMIFKLTHLDLAHWLVVLRISFPVILLDEALKFVARNYLEA

SEQ ID NO: 1653 - protein, 333 aa, Gallus gallus
MVKVGVNGFGRIGRLVTRAAVLSGKVQVVAINDPFIDLNYMVYMFKYDSTHGHFKGTVKAENGKLVINGHAITIFQERDPSNIKWADAGAEYVVESTGVFTTMEKAGAHLKGGAKRVIISAPSADAPMFVMGVNHEKYDKSLKIVSNASCTTNCLAPLAKVIHDNFGIVEGLMTTVHAITATQKTVDGPSGKLWRDGRGAAQNIIPASTGAAKAVGKVIPELNGKLTGMAFRVPTPNVSVVDLTCRLEKPAKYDDIKRVVKAAADGPLKGILGYTEDQVVSCDFNGDSHSSTFDAGAGIALNDHFVKLVSWYDNEFGYSNRVVDLMVHMASKE

SEQ ID NO: 1654 - protein, 817 aa, Gallus gallus
RESDHRAWTPVSYTVTRQNAVVQGLTEGKAYFFRIAAENIIGMGPFTETTKELIIRDPITVPDRPEDLEVKAVTKNSVTLTWNPPKYNGGSDITMYVLESRLIGKEKFHRVTKEKMLDRKYTVEGLKEGDTYEYRVSACNIVGQGKPSFCTKPITCKDEIAPPTLDLDFRDKLIVRVGEAFSLTGRYSGKPTPKITWLRDDIVLKEDDRTKIKTTPTTLCLGILKSVREDSGKYCVTVENSTGSRKGFCQVTVVDRPSPPVGPVIFDEVHKDHMIVSWKPPLDDGGSEITNYIIEKKDTHRDLWMPVTSATVKTTCKIPKLLEGREYQVRIYAENLYGISDPLISDEMKAKDRFSVPDAPEQPVIKDVTKDSAVVVWNKPYDGGKPITNYIVEKKETMATRWVRVTKDPIFPSTQFKVPDLLEGCQYEFRVSAENEIGVGNPSPPSKPIFARDPIVKPSPPVNPEAVDKTKNSVDLTWQPPRHDGNGKIIGYLVEYQKVGDEEWKKANLTPDSCPETKYKVTGLTEGLTYKFRVMAVNAAGESEPAYVPDPVEVKDRLEPPELILDANMAREQHVRAGDTLRLSAVIKGVPFPKVSWKKEDKEVSPKADIEVTGVGSKLEIRNTVHEDGGIYSLTVENPAGSKTVSVKVLVLDKPGPPRNLQVSDVRSDSCYLTWKEPEDDGGSVITNYVVERKDVASAQWVSVSSSSKKRSHMAKYLMEGTQYLFRVAAENLFGRGPYVETLKPIKAMDPLHPPGPPKNLHHIDVDKTEVSLVWNRPDRDGGAEITGYLVEYQEDGADEWTKFQTVPMLDCVVTGL

SEQ ID NO: 1655 - protein, 602 aa, Gallus gallus
MVHIETVKTKAYADQKPGTSGLRKRVTVFQNNAHYAENFIQSILATVPPAERQEATLVVGGDGRFYMKDAIQIIVRIAAANGIGRLVIGQNGILSTPAVSCIIRKIKAIGGIILTASHNPGGPNGDFGIKFNTANGGPAPEGITDKIFQISKKIEEYAICPDLKVDLGTIGKQQFDLENKFKPFTVEIVDSVEAYANMLRNIFDFNALKELLSGKNHLKIRIDAMHGVVGPYVKKILCEELGAPANSAVNCTPLEDFGGHHPDPNLTYAADLVQTMKTGEYDFGAAFDGDGDRNMILGKHGFFVNPSDSVAVIAANIFSIPYFQQTGVRGFARSMPTSGALDRVAHATKIALYETPTGWKFFGNLMDANKLSLCGEESFGTGSDHIREKDGLWAVLAWLSILAARKQSVEDIMKDHWQKYGRNFFTRYDYEEVDADAAGKMMKDLETVMFDRSFVGKQLSAGDKVYTVEKADNFEYNDPVDGSVSRNQGLRLIFSDGSRIIFRLSGTGSAGATVRLYIDSYEKDAKKIHEDPQVMLAPLISIALKLSQLHERTGRTGPCYNIKARPGTKGKKPARRLFYCRVCRYKRNINFICVFKNTARYR

SEQ ID NO: 1656 - protein, 615 aa, Gallus gallus
MKWVTLISFIFLFSSATSRNLQRFARDAEHKSEIAHRYNDLKEETFKAVAMITFAQYLQRCSYEGLSKLVKDVVDLAQKCVANEDAPECSKPLPSIILDEICQVEKLRDSYGAMADCCSKADPERNECFLSFKVSQPDFVQPYQRPASDVICQEYQDNRVSFLGHFIYSVARRHPFLYAPAILSFAVDFEHALQSCCKESDVGACLDTKEIVMREKAKGVSVKQQYFCGILKQFGDRVFQARQLIYLSQKYPKAPFSEVSKFVHDSIGVHKECCEGDMVECMDDMARMMSNLCSQQDVFSGKIKDCCEKPIVERSQCIMEAEFDEKPADLPSLVEKYIEDKEVCKSFEAGHDAFMAEFVYEYSRRHPEFSIQLIMRIAKGYESLLEKCCKTDNPAECYANAQEQLNQHIKETQDVVKTNCDLLHDHGEADFLKSILIRYTKKMPQVPTDLLLETGKKMTTIGTKCCQLPEDRRMACSEGYLSIVIHDTCRKQETTPINDNVSQCCSSSYANRRPCFTAMGVDTKYVPPPFNPDMFSFDEKLCSAPAEEREVGQMKLLINLIKRKPQMTEEQIKTIADGFTAMVDKCCKQSDINTCFGEEGANLIVQSRATLGIGA

SEQ ID NO: 1657 - protein, 1532 aa, Gallus gallus
AMPSHKETRLLHLNEMEKLDKTLFRLEQGFELQFRLGPTLQGKHVTVCTNYPASGEVFDRHKFRTLSWHNPTGKEDDSDKYCKLDLQISGSYQYYFNLGNEKSGGGYIVVDPILRVGADNHVLPLDCVTLQTFLAKCLGPFHEWENRLKVAKETGYNMIHFTPLQKLGLSRSCYSLADQLEVNPEFSSHNKKCTWNDIGALVEKMKNEWNMLCITDVVYNHTAANSEWLRMHPECGYNLVNSPHLKPAWVLDRALWHLSCMVADGRCIDKGVPPLIENDHHLNCIRKIIWEDIYPKIKLWEFFQVDVNKAVQQFRTLLTKGKIGTKSDPNQHLQIVQDPDYRRFGCTVDMNIALATFIPHSNGPGAIEECCNWFRKRIEELNAEQYRHIHHHQEQAVNCLAGTVVYERLAGHGPKLGPISRKYPLVTRYFTYPFKDLTVEEEQSMMHQPDKACYFMAHNGWVMGDDPLRNFAEPGSNVYLRRELICWGDSVKLRYGNKPEDCPYLWAHMKKYTEITAKHFHGVRLDNCHSTPIHVAEYMLDTARKLRADLFVVAELFTGNEELDNIFVNSLGITSLIREAMTAYNSHEEGRLVYRFGGEPVGSFVQPRLRPLVPAIAHALFMDITHDNECPIQHRSAYDALPSAMIVSMACCATGSTKGYDELVPHQISVVSEERFYSTWNPQAHLNSGEVNFQTGILAGRLAMNRLHQELGTKGFNQVYVDQVDEDIVAVTRHCPNTHQSVVAVSRTAFRDPKTSFYSKEVPEMCIPGKIEEVVFEARTIERSVSPYTKDEHFINGLPNFTVELREHIQIKDSKIIKQAGTAIKGPNEFVQEIEFENLTPGSVIVFRVSLDPKAQEAVGVLRNHLIQFSPHFKSGSLPDDHSAPILKTLFSSIASKLTLADLNQVLYRCESEEQEDGGGCYNIPNWSSLKYAGLQGLMSVMADIRPKNDLGHPFCDNLRSGDWMIDYVSNRLISRAGACAEVGKWLKAMFVYLKKIPRYLIPCYFDAILVGAYTTLLDVGWHQMSSFVQNGSTFVKHLSLGSIQMCGIGKYACLPDLSPSLHDVPYRLNEITHEKEQCCVTLAAGLPHFSSGIFRSWGRDTFIALRGLMLLTGRYIEARNIILAFGGTLRHGLIPNLLGQGTHARYNCRDAVWWWLQCIQDYCKIVPNGLDILRCPVSRMYPRDDSAPQPAGSVDQPLYEVIQEAMQRHMEGINFRERNAGPQIDQNMRDEGFNIIAGIDRETGFVFGGNRFNCGTWMDKMGESDRARNKGIPATPRDGSAVEIVGLCKSAVRWLLDLSRKNEYPFHGVTIKRYGREETITYDEWNRKIQGHFERLFFVSENPADQNEKHPNLVHKRGIYKDSYGASSPWCDYQLRPNFTIAMVVAPELFTPERAWKALRIAEEKLLGPLGMKTLDPDDMVYCGIYDNALDNDNYNVARGFNYHQGPEWLWPIGYFLRAKLYFSKLIGPEIYAKTVVMIKNVLSRHYVHLESRSSWKGLPELTNENGQYCPFSCETQAWSIGVILEVLYDL

SEQ ID NO: 1658 - protein, 248 aa, Gallus gallus
MAPRKFFVGGNWKMNGDKKSLGELIHTLNGAKLSADTEVVCGAPSIYLDFARQKLDAKIGVAAQNCYKVPKGAFTGEISPAMIKDIGAAWVILGHSERRHVFGESDELIGQKVAHALAEGLGVIACIGEKLDEREAGITEKVVFEQTKAIADNVKDWSKVVLAYEPVWAIGTGKTATPQQAQEVHEKLRGWLKSHVSDAVAQSTRIIYGGSVTGGNCKELASQHDVDGFLVGGASLKPEFVDIINAKH

SEQ ID NO: 1659 - protein, 1323 aa, Gallus gallus
EPFNVLSGENITFTSIVKGSPPLEVKWFRGSIELAPGHKCNITLQDSVAELELFDVQPLQSGDYTCQVSNEAGKISCTTHLFVKEPAKFVMKVNDLSVEKGKNLILECTYTGTPPISVTWKKNGVILKHSEKCSITTTETSAILEIPNSKLEDQGQYSCHIENDSGQDNCHGAITILEPPYFVTPLEPVQVTVGDSASLQCQVAGTPEMIVSWYKGDTKLRGTATVKMHFKNQVATLVFSQVDSDDSGEYICKVENTVGEATSSSLLTVQERKLPPSFTRKLRDVHETVGLPVTFDCGIAGSEPIEVSWFKDNVRVKEDYNVHTSFIDNVAILQILKTDKSLMGQYTCTASNAIGTASSSGKLVLTEGKTPPFFDTPITPVDGIIGESADFECHISGTQPIRVTWAKDNQEIRTGGNYQISYVENTAHLTILRVDRGDSGKYTCYASNEVGKDSCTAQLNVKERKTPPTFTRKLSEAVEETEGNELKLEGRVAGSQPLTVSWYKNNQEVHSSPHCEISFKNNTLLLHIKSVGQSDAGLYTCKVSNEAGSVLCTSSVVIREPKKPPVFDQPLQPAATEEGDTLQLSCHVRGSEPIRIQWLKAGREIRASERCSFSFANGVALLELAAVTKSDSGEYVCKASNVAGTDTCRSKVTVKEKAAAVSAAKKADIEGKLYFVSEPQSIKVMEKTVATFIAKVGGDPIPNVKWMKGKWRQLNQGGRIIIQQRGDEAKLEIKDTTKTDSGLYKCVAFNQHGEIERSVNLQVEERKQEVVEEDVRGKLKRIPTKKKEDEEQTIDILELLKNVDPKEYEKYARMYGITDFRGLLQAFELLKQTREEESHRLEIELTEKAQKEDQEFEELVAFIQQRLTQTEPVTLIRDIENQTVLTDEDAIFECEIKINYPEIKLSWYKGTQKLDSSDKYKIKIEGDRHILKIKNCQLEDQGNYRIVCGPHIASARLTVIEPAVERHLHDTTFKEGNTCTLSCQFSIPNAKSQWYRNGRPIKIGGRYSTQVSDKVHKLIIKDVRTEDQGQYTCKLDNLETTADLTIEAEPIQFTKSIQNIVVSEHQSATFECEVSFDDAVVTWYKGPTELTESPKYSFRSEGRCHYMTIHNVTAEDEGVYSVIARLEPRGEARSTAELYLVTKEIKLELKPPDVPDAKVAVPPQKPAEAAPIPILLPLIPTPEEKKPAEKKVPVKKVSKKVVKKGPKEIPPPEVPEILPEKPKEVKITSMARREEIHEEKMEIYEKPKKVYEEWEEDYGEDHDYYFKEEGYDEGEEEWEETYDKREVAYEEEQIIHEEVVEVPKKPVPERKPPAITAEKKEKK

SEQ ID NO: 1660 - protein, 844 aa, Gallus gallus
MAAPLSDGERRKQISVRGIAGLGDVAEVRKSFNRHLHFTLVKDRNVATPRDYFFALAHTVRDHLVGRWIRTQQHYYERDPKRIYYLSLEFYMGRTLQNTMVNLGLQNACDEAIYQLGLDLEELEEIEEDAGLGNGGLGRLAGAHEDQGQPELCLPSYGYGIRYEFGIFNQKIIDGWQVEEADDWLRYGNPWEKARPEYMLPVHFYGRVEHSPEGVKWVDTQVVLAMPYDTPVPGYKNNTVNTMRLWSAKAPNDFNLQEFNVGDYIEAVLDRNLAENISRVLYPNDNFFEGKELRLKQEYFVVAATLQDIIRRFKSSKFGCQDPVRTSFETFPDKVAIQLNDTHPALSIPELMRILVDVEKVDWDKAWEITKQTCAYTNHTVLPEALERWPVSMFEKLLPRHLEIIYALNQMHLDRVAALYPGDVDRLRRMSVIEEGDCKRINMAHLCVIGSHAVNGVARIHSDIVKNTVFKDFYELEPEKFQNKTNGITPRRWLLLCNPGLADVIAEKIGEDFVTDLSQLKKLLDFINNETFIRDVAKVKQENKLKFSAYLEERYKVKINPSSMFDIQVKRIHEYKRQLLNCLHAITLYNRIRSDPSKSFVPRTIMIGGKAAPGYHMAKMIIKLITSIGEVVNNDPYVGDKLKVIFLENYRVSLAEKVIPAADLSQQISTAGTEASGTGNMKFMLNGALTIGTMDGANVEMAEEAGEENLFIFGMRVEEVEALDRRGYNAREYYDRIPELRQAIDQISSGFFSPRDPGCFRDVVNMLMHHDRFKVFADYEAYIKCQGQVDQLFMDPREWTKKVIRNIACSGKFSSDRTITEYAREIWGVEPSATKIPPPNLPRD

SEQ ID NO: 1661 - protein, 1450 aa, Gallus gallus
MSSVAVPFYQRRHKHFDQSYRNIQTRYVLEEYAARKAASRQAAHYESTGLGKTTCRLCARRARSLAHEAMQESRKRTHEQKSHASDEKRIKFASELSSLEREIHMARHHAREQLDRLAIQRMVEENMALERHVVEEKISRAPEILVRLRSHTVWEKMSVRLCFTVQGFPSPVVQWYKNEELITPASDPAKYSVENKYGVHVLHINRADFDDSATYSAVATNIHGQASTNCAVVVRRFRESEEPHPAGIMPFHLPLSYDVCFTHFDVQFLEKFGVTFATEGETLTLKCSVLVTPELKRLRPRAEWYRDDVLIKDSKWTKLYFGEGQAALSFTHLNKDDEGLYTLRMVTKGGVNECSAFLFVRDADALIAGAPGAPMDVKCHDANRDYVIVTWKPPNTTSQNPVIGYFVDKCEVGLENWVQCNDAPVKICKYPVTGLYEGRSYIFRVRAVNSAGISRPSRVSEPVAALDPVDLERTQTVHVDEGRKIVISKDDLEGDIQIPGPPTNVHASEISKTYVVLSWDPPVPRGREPLTYFIEKSMVGSGSWQRVNAQVAVKSPRYAVFDLAEGKPYVFRVLSANKHGISDPSEITEPIQPQDIVVVPSAPGRVVATRNTKTSVVVQWDKPKHEENLYGYYIDYSVVGSNQWEPANHKPINYNRFVVHGLETGEQYIFRVKAVNAVGFSENSQESEAIKVQAALTCPSYPHGITLLNCDGHSMTLGWKAPKYSGGSPILGYYIDKREANHKNWHEVNSSVISRTIYTVEDLTEDAFYEFKIAAANVVGIGHPSDPSEHFKCKAWTMPEPGPAYDLTVCEVRNTSLVLLWKAPVYEGKSPITGYLVDYKEVDTEDWITANEKPTSHRYFKVTDLHQGHTYVFKVRAVNDAGVGKSSEISEPVFVEASPGTKEIFSGVDEEGNIYLGFECKEATDASHFLWGKSYEEIEDSDKFKIETKGDHSKLYFKHPDKSDLGTYCISVSDTDGVSSSFVLDEEELERLMTLSNEIKNPTIPLKSELAYEVLDKGEVRFWIQAESLSPNSTYRFVINDKEVENGDRHKISCDHSNGIIEMVMDKFTIDNEGTYTVQIQDGKAKNQSSLVLIGDAFKAILAESELQRKEFLRKQGPHFSEFLYWEVTEECEVLLACKIANTKKETVFKWYRNGSGIDVDEAPDLQKGECHLTVPKLSRKDEGVYKATLSDDRGHDVSTLELSGKVYNDIILALSRVSGKTASPLKILCTEEGIRLQCFLKYYNEEMKVTWSHRESKISSGEKMKIGGGEDVAWLQITEPTEKDKGNYTFEIFSDKESFKRTLDLSGQAFDDALTEFQRLKAAAFAEKNRGKVIGGLPDVVTIMDGKTLNLTCTVFGNPDPEVVWFKNDKALELNEHYLVSLEQGKYASLTIKGVTSEDSGKYSIYVKNKYGGETVDVTVSVYRHGEKIPEVNQGQLAKPRLIPPSSST

SEQ ID NO: 1662 - protein, 333 aa, Gallus gallus
TMSLKDHLIHNVHKEEHAHAHNKISVVGVGAVGMACAISILMKDLADELTLVDVVEDKLKGEMLDLQHGSLFLKTPKITSGKDYSVTAHSKLVIVTAGARQQEGESRLNLVQRNVNIFKFIIPNVVKYSPDCKLLIVSNPVDILTYVAWKISGFPKHRVIGSGCNLDSARFRHLMGERLGIHPLSCHGWIVGEHGDSSVPVWSGVNVAGVSLKALHPDMGTDADKEHWKEVHKQVVDSAYEVIKLKGYTSWAIGLSVADLAETIMKNLRRVHPISTAVKGMHGIKDDVFLSVPCVLGSSGITDVVKMILKPDEEEKIKKSADTLWGIQKELQF

SEQ ID NO: 1663 - protein, 6635 aa, Gallus gallus
MDYSSFSGVPRFLTRPKAFMVSVGKDATLSCQIIGNPIPVVSWEKDKLPIQSGGRFKTTEDGDLYQLTIYDLSLEDSGQYICRAKNTIGEAFAAVSIKVGEETTVTESAPYFIQKPSSIKVTLGEDAMFKCKVQGSPPLSVNWEKDGRHLRNRADAGRFQIESAGESNALTIQCTRLGDSGTYTCRAENPIGSASASAALVVESLGSSNPGSHFDPSCGKTTSLLSHLQKRREEITTKGARNAMFGTLTRTCSVTEGKHAKLSCYVTGEPKPEIVWKKDNEVIVEGRRHVIYEDDQENFVLKILYCKQVDNGLYTCTASNLAGQTYSSVLVTVKEPPIPFKEKLKDLEVWEKESATFQCEVPVPSTETSWFKEETKLRQSKKYNIEEEGTYRRLTVQNVTADDDAVYICEMKEGSRTIAELSVQGNIIKKLPRKTAVSVNDTATFCVELDNECQNICWLKNTEEVKPSDRISIIRSGKQHTMIIRECTMEDAGEIVFLADESRTSTQFTVTTPRKPPTQPPVDPVVKNKTETSVTLAWSPPKMHRPIPIDGYIVERKKLTGFTWVRCHESHVPVPEFTVSDLSEEADYQFRVSAVNAHGQSPYLEFPGSMHLEPVLAVKSPLTTGEAVPGGDAMFTIDLTTICSGTWYLNGKVLQESETCIIKRTQTTHSLIIKNVTKNDDGAEVKFVAKNIDVSTKMRVRGAAVRFTNKSKDVEKISARLREEARLQAEISDTDAAVKWMKDGKELKANEKYELQIVGKRHILKIHNVAMEDAGTYQCTCEGDKMLYQLSVKALATFVNKEKTGGVIRAIAGKQAEFVFETSEANVMVKWYKNGKEITTSKKFTMEDKGKLHKLVASAVTKEDEGTYICKIGDDTLIFDLKVSEKEDVFTNKEKVQKEVKAVLTQNATLSCEVGQEKTEVKWYKEGKLITSSKKFRVESEGKLRRLVVSQVEKKDAGEYTCEAAGQKLTFKITVTVPEAEDAFINKEKVQKEVKAAPTENATLSCEVAQEKTEVKWYKEGKLITSSKKFRVESEGKLRRLVVSQVEQRDAGEYTCEAAGQKLTFKITVTEAEDAFINKEKVQKEVKAAPTENAMLSCEVGQEKSEVKWYKEGKLITSSKKFRVESEGKLRRLVVSQVEQRDAGEYTCEAAGQKLTFKITVTEAEDAFINKEKVQKEVKAAPTENATLSCEVGQEKSEVKWYKEGKLITSSKKFSVESEGKLRRLVVSQVEKRDAGEYTCEAAGQKLTFKITVTEPEVVFINKEKVQKEVKAAPTENATLSCEVGQEKTEVKWYKEGKLITSSKKFRVESEGKLRRLVVSQVEKKDAGEYTCEAAGQKLTFKITVTEAEDAFINKEKVQKEVKAAPTENATLSCEVGQEKSEVKWYKEGKLITSSKKFRVESEGKLRRLVVSQVEKRDAGEYTCEAAGQKLTFKITVTEPEVVFINKEKVQKEVKAAPTENATLSCEVGQEKTEVKWYKEGKLITSSKKFRVESEGKLRRLVVSQVEKKDAGEYTCEAAGQKLTFKITVTEPEVVFINKEKVQKEVKAAPTENATLSCEVGQEKTEVKWYKEGKLITSSKKFRVESEGKLRRLVVSQVEKKDAGEYTCEAAGQKLTFKIDVTDSEPKPVFINQEKVQREVSAVLAESAALSCEVAQDTTEVKWYKDGRLLASSRKFKMETVGKTRRLVVEQLEKKDAGEYVCEAAGQRLTFKLEATEPEAKFEKEFVQKEPLIVQEHESITLTTSVTPETAVVKWYKDGREIKASKKYEIKSDGASRTLTVNLAESTDTAVYACQTKNDKQEFKVEVKEIPVKFTKKLEAVNAEIGGSVTLTCEVSHAKGKVVWRRNAVEIKPSKRFQIHEEGVRRTLTITGIRAEDEGEYFCESRDDKSSITITPKAPRVVKFVTSLNNVASEEGKEAVFKCTVSPSDAVVTWFRNGVKIEASKKYVISQKDTNHSLTITDLTLEDAAEISANAEGVESTANLRVREASISFKKKLEPKTVEEKDTVTLEVELTKPAEVKWMRNSIVLKPSEKIEIKAEGTKHILIVKDISFADRGFYCCESPDDKTQAKINVEMRQIKLVKGLQPLEVSEKGTVTFSVEVSHEDVEGTWQKDGVRLKPAPNVTMAVQGKKHSLTLSSVTLEDAGLISFKAEGINSSGKLTVTELPVKISKPLADINITQKDKVTFECELSRPNVDVKWFKDGKELRQSKKVGIISQGNKRSLVIHKCEYEDQGTYTCQAAEDKTSATLKVHAGKTYSLTYTRVQVKDAAEIKFVAEKAESRAHLTVKELPVKIVKPLRDKIALEKHRGFLECQVSRANAEVKWYKKDVEIHPSDKYEIVSDGVYRKLIINDADYEDEDTYTCDAFDDKSSAHFFVEEQSISIVKELCDEDVTEPEEAKFECEISIPSVKPPKWYLRGEVLQAGRNIIMQQEGTIHRLTILKTTTDMTGTIQFSIGKSKSTANLLVRDYHIQITRKLEDKTALERHSVILSCDFRPSPKVVKWFKGHTPIEPSEKYKIKRDKHSAELKILKLKPDDAGVYKCKAGIAETEATLTVEARNVEVTKHLQDVEIEEESSAIFSCELSHDDEDVEWFLNGTLLYTNNYNDIKNVGNCYTLTMKQVKPEDAGTVTMKSDKVSESARLKVIEKPAVFLKSLDDVFGEERGVIKLECEVSKEKVKPVWKKDGVVLTSGNKYELVQSGKTLYLLIHDLEKADAGLYTCDIGTDVAKSKVGVQELNIGITKRLKNTEIQEGEDCTFECILSHESIDDFNWTLNGSRVESGGRFKASNVGRKYTLSIKSVIPADSGEVVFTARGLTSKASLVVKEKPTEVTKQLEDKTSAAGQDISLSCELSKPDVNIRWYKDGKAIRKSQKYDLQQEGTRAILIIHDSTVKDSGEYTCETEDSKTKARVTVQEKPNYFIKELSDLKIEESGTAVFICQSEKAASSVIWRKGIAELRPGRKYEMTQKGQDLQLTIKNLEKSDSDTYTCDIGDAQSRAKLVVQGQKVLITEDLEDVTVLEGESAMFKCRISPVEYSKVQWFLDKTPLHTNELNDIQSQPGGYHLLTLKKLSLKDSGVITFEAGDKKTSASLVVKEKPCIFTKELVDTEVTEGEDVILHCETSKSDSPVKWCKDGKSLRNSSKYNISRSGFEAKLVIYGAEERDSGRYECEAGAAKSSAVITVKAISALIEEELKNLEAPEGGTATLHCQLSREAPVEWRKGHTVLRPSNKYRMRQEGLVAELLIHDLETKDAGDYTCVVGSQKTTATLTVNALPILFQEEMVDKEATEGQAVTLHCKLSKSAPVEWRKGNKVLKPSEKYKIEQEGPFAELVIQDLDSADAGDYSCVCGNQQTTATLTVNVLPILFTKELSNEEAMEGKSVSLRCELNKAAANVEWKKGLKTLKSSDKYKMKREGVTVELLIQNLDMTDAGNYSCVCGDQQTMAVLTVHALPAFFKEGLKNREATDGGTATLRCELSKVGVPVEWKKGDKTLKSSDKYRMRQEETSAELLIRDLEVEDTGEYTCVCGDQKTSAVLTVHALPVLFKKELVDVEATESGTAVLQCELTKSTPVEWRKGRELLKPSDKYKLRLKDTIAELTIQNLKEEDAGDYTCVCGDKTTTASLTVHALPAHFKEEMKNEEATEGGTATLQCELSRAVPVEWKKKHKVLKSSEKYSMRQEGAIAQLLIHALEVKDAGEYTCVCGDKKTTAVLTVHALPALFREELRDEEATEGDTVTLHCELTKAAPVEWKKGHAVLKPTSEKYIMRQDDVLAELQIRELDLQDAGDYTCVCGDQHTTASLTVNALPAVFKEELKNEEVTEGASVCLHCELSKAAPVQWKIGSKVLEASDKYQMSQPGTTAELVIRDLDITDAGDYTCVCGDQKTTATLTVHDFAALPVTFKQILQNKESEEGSTATFCCELSKPNAAVEWMKGGVGLQPDEKYEMRQRECLVELLIHNLQLEDTGEYSCDTGDQETKASLLVKALPVLFKKELKDEEVEEGAAVKFQCELTKENATVQWRKGTMEIFPCSKYEMKLSGCTAELVIHNAEPEDASDYTCDTGDQQSTAILRVNAIKPQLKQHLKNEEVEVGGTAKLRCEISISKAEVEWRKDGVILHSSSKYEMWQQGTIRELRVHHLEPGDAGEYSCKAGDETTSAKLTVKEPDVTIVSRLKDMVVFEGDDVTFQCQVSHENARDVEWKLQDVALQNNEMNEISVEKGKIHKLTLRKVTEQDTGTITFRVGPYTSTAELTVKEPAATIVEMLKDVTSYEGEDAVFECRLSQETTQDTQWFLGDVPLQSNEMNEIKVEGTRHTLILRKVTLEDCGPISFKVGQHTTGAQLTVQAKNSIVQGLENVEAVEGGEALFECYLSKPECYNYNWLIDDEPAKTTENTEMVYFENGRRHLLLLKNLTLQDNCRVTFMCSDAVTSAFLTVKGWRLQILQPLTDVEVSPGQKATFSCTLSEAVPINEVTWYFNDTEIQPDEDWEIQADGNKYKLILNKAQPHHSGEVTFASREAIASAKLSVLAQPDPPEEPKVLCTSSHSVTLSWYKPLSDGGCNILGYQVERKIPGVGWQSCSESTIQSMEFVVDNLTPGEPYRFRVSAVNKVGASEPAQFPQMVQLVTEPSITVTHPLVGGSVSEGEVARLECKLSSEIKENVTWLKGKEPIQTGGRYEILSDGKKQILIIHAFKAEDQDTYTCMVSPEQMCEELKTCCLALFYEELVDGHVQPSLPPEAAQEGDLHLLWEALAKKRRMSREPTLDSISEVPEEDEKLQKLRKEEAEMSHYYSEEYSTCDELARTGEADFSFTSSDDESRAGTPSLVNYLKKAEKRSVSVTTKVQSTSTGKLWKQWEKSSAETVVAAPGAKPTEPEIADLDDPSMNNAAVKIQAAFKGYKVRKEIKQQECPVFTETFKDFSGEPGSTLHLECVAHSKTDMKVRWLKDGEELSDGRYYHIDNYSDGTCSLIITGLDRKDAGKYTCEASNKFGKVSHSAKVVIGAEEPQTESSSGSELDDAFRKAGRRLHRLFRAKISTEMSDVEEELFVSADEGDVEVVDHQTYREDDRYIYIKFEVLSEAKTAATRFREMFGALGIPVEIDILEQGPRKVELRIGKATPPTLGKFAPPVLRPPPPLLTSDTAPMFLTELQNQEVQDGYPVSFDCIVVGKPLPTVRWFKDGKAIEENDHYMINEDQEGCHQLIITAVVPTDMGVYRCLAENNMGVASTKAELRVDLTSTDYETAADATETSSYYSAKEYVSSREQEESTTEEEQLPQILDDLHDIHVAPGAPLAKFHLKVKGYPEPRLYWFKNGQPLKASDRILKIDKKEFHSLEILNVIKSDAGQYSIFLINSAGSAYSSARLVVKDPDEKEEVSETDSHEQLIPPRFLERFTNKKVKKGASITLSVKVEGHPPPTITWLKEESQEDILWIKPDTPGYKLASSNMHHSLILLDVKKNYSGAYTCIATNKAGQSICTANLEVADVKEAEVLTQERVMVSEAIMTTLGSKTERIISSQLSRKVVTRDLEAGREGVPRTPISLADVGTEEFFQKLTSRISEMVSAKISQATLRVPGAESDDESKTPSASPRHGRSRPSSIAQESSSESDDGDSRGEIFDVYMVTADYVPAAPDKETITLKEGQYVEVLDSAHPLKWLVRTKPTKSSPSRQGWVSPAYLDKRLKLSPEWGTVEVPEFPGECVSEDEYKRKLSVLIQELLISEEDYVQDLQFLQTHHLRYTETCPNVPGAIASQKSTIFRNIDDITRFHSSIFLRGLQKCDTDDDVAMCFIKHEAEFNKYIQYLVGRVQAESIVVSKAVQDFYKRYTDEILTNEDPSQTLIPPLQHYLEKPINRIQQYQTIIKELIRNKARNSQNCTLLEQAYAIVSALTRRAENNLHVSLIENYPGALESLGEPIRQGHFVVWEGAPGARMAWKGHKRHVFLFRNYLVICKPKRDTRTDTYSYIFKNIMKLNNIDVNDIVEGDDRAFEIWHEREDSVRKYLLQARTVNIKNSWVKEICGIQQRISQPVWIPPDFEEELADCTAELGETVKLACKVTGAPKPSVCWYKDGKPVEVDPHHIIIEDPDGSCTLILDNLTGVDSGQYMCFASSPAGNASTLGKILVQVPPRFVNKVRNAYFVEGEDAQFTCTVEGAPRPQIRWYKDGILLKDTNKYQTFSEPRSGIIVLVVKNPSNEDMGHYECELVNRLGSAKSGAELYHHSAAALTQERRGDQAITIEVTEQETKVPKKTIIIEETITTVVKSPRQRGRVSPARSSSGHSPSLSPRAEPTPEPVFVSKIRQPVHRHEQEAASKSAVPMLYVTEPEDRQGAAAREITVETKMEEQKPKWVEVEEIIEFKVKKSPKPARKRGSSPVKQEKDDSGVLTFTFPSSRPTRSPEDDPNTNNSNNKLVEQSKSSLPQESLSEVNIQPLVYATDQEGPQGSNEDRSSPCESEQETKEENVIIIDEPEELQAEDISTRNLKILTHNGKMLTLEDLEDYVPGEGETYGCDDKNHKTDKPCEISVLQTEIREPTIGKPVLLNLGSTLEEHIPGSVFVSTSRVTGVQSVGSSNISIHVSDACMEVKPGVHAAASSAPSFTVKPSFCTEVQLSADNGQSSFKTEVSTRTLSYGTVGEPVTLHISTEDLSQS

SEQ ID NO: 1664 - protein, 168 aa, Gallus gallus
MAPKKAKRRAAEGSSNVFSMFDQTQIQEFKEAFTVIDQNRDGIIDKDDLRETFAAMGRLNVKNEELDAMIKEASGPINFTVFLTMFGEKLKGADPEDVIMGAFKVLDPDGKGSIKKSFLEELLTTQCDRFTPEEIKNMWAAFPPDVAGNVDYKNICYVITHGEDKEGE

SEQ ID NO: 1665 - protein, 553 aa, Gallus gallus
MPLSADPHFKKLLEWHKANASKLVLRQLFEADKDRFHKFSLTLNTDHGDILLDYSKNLVTEEVMKMLIELAKSRGVESARERMFSGEKINFTENRAVLHIALRNRSNTPILVDGKDVVPEVNKVLDKMKHFCQKVRSGEWKGYTGKAITDVVNIGIGGSDLGPLMVTEALKPYSKGGPRVWFVSNIDGTHIAKTLAELHPETTLFIIASKTFTTQETITNAVTAKEWFLHAAKDPSAVAKHFVALSTNGPKVKEFGIDTENMFEFWDWVGGRYSLWSAIGLSIALHIGFDNFESLLAGGHWMDKHFHTAPLEKNVPVLLAMLGVWYINCYGCETHALLPYDQYMHRFAAYFQQGDMESNGKYITKKGSRVDYNTGPIVWGEPGTNGQHAFYQLIHQGTRMIPCDFMIPVQTQHPVRNGLHHKILLANFLAQTEALMKGKTADEARKELQAAGLSGDALEKLLPHKVFEGNRPTNSIMFTKLNPFTLGAIIAMYEHKIFVQGVVWDINSYDQWGVELGKQLAKKIEPELESDAPVTSHDSSTNGLISFIKKHRA

SEQ ID NO: 1666 - protein, 194 aa, Gallus gallus; identical to SEQ ID NO: 873

SEQ ID NO: 1667 - protein, 183 aa, Gallus gallus; identical to SEQ ID NO: 520

SEQ ID NO: 1668 - protein, 419 aa, Gallus gallus
MAGTFGRLLAGRVTAALFAAAGSGVLTTGYLLNQQNVKATVHEKRKLFPPSADYPDLRKHNNCMAECLTPAIYAKLRDKLTPNGYSLDQCIQTGVDNPGHPFIKTVGMVAGDEESYEVFAEIFDPVIKARHNGYDPRTMKHHTDLDASKITHGQFDERYVLSSRVRTGRSIRGLSLPPACSRAERREVENVVVTALAGLKGDLSGKYYSLTNMSERDQQQLIDDHFLFDKPVSPLLTCAGMARDWPDARGIWHNNDKTFLVWINEEDHTRVISMEKGGNMKRVFERFCRGLKEVERLIKERGWEFMWNERLGYVLTCPSNLGTGLRAGVHVKLPRLSKDPRFPKILENLRLQKRGTGGVDTAAVADVYDISNLDRMGRSEVELVQIVIDGVNYLVDCEKKLEKGQDIKVPPPLPQFGRK

SEQ ID NO: 1669 - protein, 634 aa, Gallus gallus
MSGKGPAIGIDLGTTYSCVGVFQHGKVEIIANDQGNRTTPSYVAFTDTERLIGDAAKNQVAMNPTNTIFDAKRLIGRKYDDPTVQSDMKHWPFRVVNEGGKPKVQVEYKGEMKTFFPEEISSMVLTKMKEIAEAYLGKKVETAVITVPAYFNDSQRQATKDAGTITGLNVMRIINEPTAAAIAYGLDKKGTRAGEKNVLIFDLGGGTFDVSILTIEDGIFEVKSTAGDTHLGGEDFDNRMVNRFVEEFKGKHKRDNAGNKRAVRRLRTACERARRTLSSSTQASIEIDSLFEGIDFYTSITRARFEELNADLFRGTLEPVEKALRDAKLDKGQIQEIVLVGGSTRIPKIQKLLQDFFNGKELNKSINPDEAVAYGAAVQAAILMGDKSENVQDLLLLDVTPLSLGIETAGGVMTALIKRNTTIPTKQTQTFTTYSDNQSSVLVQVYEGERAMTKDNNLLGKFDLTGIPPAPRGVPQIEVTFDIDANGILNVSAVDKSTGKENKITITNDKGRLSKDDIDRMVQEAEKYKAEDEANRDRVGAKNSLESYTYNMKQTVEDEKLKGKISDQDKQKVLDKCQEVISSLDRNQMAEKEEYEHKQKELEKLCNPIVTKLYQGAGGAGAGGSGGPTIEEVD

SEQ ID NO: 1670 - protein, 1453 aa, Gallus gallus
MFSFVDSRLLLLIAATVLLTRGEGEEDIQTGSCVQDGLTYNDKDVWKPEPCQICVCDSGNILCDEVICEDTSDCPNAEIPFGECCPICPDVDASPVYPESAGVEGPKGDTGPRGDRGLPGPPGRDGIPGQPGLPGPPGPPGPPGLGGNFAPQMSYGYDEKSAGVAVPGPMGPAGPRGLPGPPGAPGPQGFQGPPGEPGEPGASGPMGPRGPAGPPGKNGDDGEAGKPGRPGQRGPPGPQGARGLPGTAGLPGMKGHRGFSGLDGAKGQPGPAGPKGEPGSPGENGAPGQMGPRGLPGERGRPGPSGPAGARGNDGAPGAAGPPGPTGPAGPPGFPGAAGAKGETGPQGARGSEGPQGSRGEPGPPGPAGAAGPAGNPGADGQPGAKGATGAPGIAGAPGFPGARGPSGPQGPSGAPGPKGNSGEPGAPGNKGDTGAKGEPGPAGVQGPPGPAGEEGKRGARGEPGPAGLPGPAGERGAPGSRGFPGADGIAGPKGPPGERGSPGAVGPKGSPGEAGRPGEAGLPGAKGLTGSPGSPGPDGKTGPPGPAGQDGRPGPAGPPGARGQAGVMGFPGPKGAAGEPGKPGERGAPGPPGAVGAAGKDGEAGAQGPPGPTGPAGERGEQGPAGAPGFQGLPGPAGPPGEAGKPGEQGVPGNAGAPGPAGARGERGFPGERGVQGPPGPQGPRGANGAPGNDGAKGDAGAPGAPGNEGPPGLEGMPGERGAAGLPGAKGDRGDPGPKGADGAPGKDGLRGLTGPIGPPGPAGAPGDKGEAGPPGPAGPTGARGAPGDRGEPGPPGPAGFAGPPGADGQPGAKGETGDAGAKGDAGPPGPAGPTGAPGPAGZVGAPGPKGARGSAGPPGATGFPGAAGRVGPPGPSGNIGLPGPPGPAGKZGSKGPRGETGPAGRPGEPGPAGPPGPPGEKGSPGADGPIGAPGTPGPQGIAGQRGVVGLPGQRGERGFPGLPGPSGEPGKQGPSGASGERGPPGPMGPPGLAGPPGEAGREGAPGAEGAPGRDGAAGPKGDRGETGPAGPPGAPGAPGAPGPVGPAGKNGDRGETGPAGPAGPPGPAGARGPAGPQGPRGDKGETGEQGDRGMKGHRGFSGLQGPPGPPGAPGEQGPSGASGPAGPRGPPGSAGAAGKDGLNGLPGPIGPPGPRGRTGEVGPVGPPGPPGPPGPPGPPSGGFDLSFLPQPPQEKAHDGGRYYRADDANVMRDRDLEVDTTLKSLSQQIENIRSPEGTRKNPARTCRDLKMCHGDWKSGEYWIDPNQGCNLDAIKVYCNMETGETCVYPTQATIAQKNWYLSKNPKEKKHVWFGETMSDGFQFEYGGEGSNPADVAIQLTFLRLMSTEATQNVTYHCKNSVAYMDHDTGNLKKALLLQGANEIEIRAEGNSRFTYGVTEDGCTSHTGAWGKTVIEYKTTKTSRLPIIDLAPMDVGAPDQEFGIDIGPVCFL

SEQ ID NO: 1671 - protein, 192 aa, Gallus gallus
MAPKKDVKKPAAAAAPAPAPAPAPAPAPAKPKEPAIDLKSIKIEFSKEQQDDFKEAFLLFDRTGDAKITLSQVGDIVRALGQNPTNAEINKILGNPSKEEMNAKKITFEEFLPMLQAAANNKDQGTFEDFVEGLRVFDKEGNGTVMGAELRHVLATLGEKMTEEEVEELMKGQEDSNGCINYEAFVKHIMSV

SEQ ID NO: 1672 - protein, 254 aa, Gallus gallus
MAAYRLVLVRHGESAWNLENRFCGWYDADLSPAGQQEARRGGEALRDAGYEFDICFTSVQKRAIRTLWNVLDAIDQMWLPVVRTWRLNERHYGALTGLNKAETAAKHGEAQVKIWRRSFDIPPPPMQSDHPFFSTISKDRRYADLTEDQLPTCESLKDTIARALPFWNEEIVPQIKEGKRVLIAAHGNSLRGIVKHLEGMSEEAIMELNLPTGIPIVYELDKNLKPIKPMQFLGDEETVRKAMEAVAAQGKVKK

SEQ ID NO: 1673 - protein, 537 aa, Gallus gallus
MTGKTAPAAAKKAPAAKKAPAPASKKAPEPAPKEKPAPTPKEGHAPTPKEEHAPPPKEEHAPPPKEEHAPAPAAETPPAPEHPPDAEQPAAPAAEHAPTPTHEAAPAHEEGPPPAAPAEAPAPEPEPEKPKEEPPSVPLSLAVEEVTENSVTLTWKAPEHTGKSSLDGYVVEICKDGSTDWTAVNKEPFLSTRYKIHDLASGEKVHVRVKAISASGTSDPATLEQPVLIREITDLPRIRLPRQLRQVYVRHVGEAVNLLIPFQGKPQPQVTWTKDNQPLDTSRVNIRNTDKDTIFFIRTAQRSDSGKYQLSVRINGAEDKAILDIRVIERPGPPQNLKLVDVWGFNVALEWSPPADNGNSEIKGYTVQKSDKKSGKWFTVLERCTRTSCTISDLIIGNTYSFRVFSENACGMSETAAVAAGVAHIKKTVYQPQKIPERDMMEPPKFTQPLTDRATTRGYSTHLFCSVRGFPQPKIIWMKNKMEIREDPKYIAMIEQGVCSLEIRKPSPFDAGVYTCKAVNPLGEASVDCKLDVKMPK

SEQ ID NO: 1674 - protein, 1650 aa, Gallus gallus
MSLPFYQRHHDHYDRAYRHKALQSTVSQYQKESKSKSAVYAQGSAAYARGSAAYRHASAADFSLDSSAAYSHGSSAHNLESAAYSYGSTAYDHAAVQRKLKDSNLMIEDQSYKMSPKAKRAKQTLVSEDKENEAVDYSVPIFTGREVNISGITDTEEERIKESAAYVAKRNLFATGEGVSVSKVAKSVSEEEHHEKKSRKVAIRESAERVALKKTLEDTQAFHKKLNQDKLLHPPEFVIKPRSHTIWEKQNVKFHCTVAGWPAPRVTWYKNNVPIDVQAHPGKYTIENRYGLHSLEISTCDFDDIAQYRASAMNVKGEISAYASLVVKRYKGEIDASYLHAGTFSMPLSLGVTPHGFASRFEIKFVDKFEVTFGREGETMSLGCTVVISPDIKRFKPDIEWYRNGVLITPSKWVQMHWSGERASLTLTHANKEDEGLYTLRVVMGEYYEEYSGYVFVRDADAEIPGAPGAPLDVQCLDANKDYVIVSWKQPAVDGGNPILGYFIDRCEVGTTHWTQCNETPVKFARFPVTGLIEGRSYIFRVRAVNKAGVSLPSRVSEPVAALDPADRARLRSHPSAPWTGQIIVTEEEPAEGVVPGPPTDLQVIEATKNYVVLSWKPPGQRGHEGIMYFVEKCIAGTEDWQRVNTEIPVKSPRFAVFDLSEGKSYCFRVRCCNSAGIGEPSEATEATVVDDKLDIPKPPGRIMPTRNTDTSVVVTWTESPDAKELVGYYIESSVVGSGHWEPCNNNPVKGTRFICHGLVNGEKYIFRVRAVNAAGLSEFSQDSEPIEVQAAIVIGGGLLHGVCPELSGKADGLTDCTTSWEGMHESSQPIFDTDALLKCNAKFNRDPLPSSSDKLGSTGDNNLREMVKDAITSAPQKVVAKQASKSRPGDPLAMEKVETAAPSPPYDITVLESVRDSMVLGWKQPKATGGTEITGYYVNYREVIGGVPGKWMEANIKAVSERAYRIENLKENMVYQFQVAAANLAGVGTPSLPSKPFKCEEWTIAVPGPPHDVTYTEVRKDSLVLLWKEPVYTGRSPIAGYYVDMKETEANEEHWRSVNEKPLQKKFLKIAGLTEGVSYVFRVRATNQAGVGRPSDTTDPVVAETRPGTKEVVVNVDDDGVISLNFECDQMSPNSKFVWSKNYEPIEDDSRLDIDSKGGKSKAVFKDLGEDDLGIYSCVVTDTDGVSSGYTIDEEEMKRLLALSHEHKFPTIPLASELAVEILEKGEVRFWLQAEKLSGNAKANFVFNDKEIFNGEKYKMKVDQHTGLVEMIMDKLEDKDEGTYTFQLQDGKATNQSSLVLIGDVFKKLRDEAEFQRKEWHRKQGPHFVEQLGWEVTDECNVMLKCKVANIKKETHIVWYKDDREIMVDEEHDFKDGVCTLLISEFSKKDTGIYEVILKDDRGKDISELKLTDKAFADLMNEVCRRIALSATDLKIQSTAEGIRLYSFVTYYVEDLRVGWVHNDTQIRFTDRVKTGVTGEQIWLQINEPTPQDKGKYTMELFDGKTGHKKTVDLSGQAFDEAFAEFQRLKQAAIAEKNRARVLGGLPDVVTIQEGKALNLSCTVWGDPTPEVSWLKNEKSFVSDANCILRFESGKNVSFTISAVSTLDSGKYSLVVKNKYGTETSDVTVSVFIPEEEQEKNNEDKKTKA

SEQ ID NO: 1675 - protein, 434 aa, Gallus gallus
MSILKIHAREIFDSRGNPTVEVDLYTNKGLFRAAVPSGASTGIYEALELRDNDKTRYLGKGVSKAVEHVNKTIAPALISKNVNVVEQEKIDKLMLEMDGTENKSKFGANAILGVSLAVCKAGAAEKGVPLYRHIADLAGNPEVILPVPAFNVINGGSHAGNKLAMQEFMILPVGADTFKEAMRIGAEVYHNLKNVIKEKYGKDATNVGDEGGFAPNILENKEALELLKTAIGKAGYSDKVVIGMDVAASEFYRDGKYDLDFKSPDDPSRYISPDQLADLYLGFVKNYPVVSIEDPFDQDDWAAWKKFTASVGIQVVGDDLTVTNPKRIAKAVEEKSCNCLLLKVNQIGSVTESLQACKLAQSNGWGVMVSHRSGETEDTFIADLVVGLCTGQIKTGAPCRSERLAKYNQLLRIEEELGSKARFAGRNFRNPRIN

SEQ ID NO: 1676 - protein, 646 aa, Gallus gallus
MSKGPAVGIDLGTTYSCVGVFQHGKVEIIANDQGNRTTPSYVAFTDTERLIGDAAKNQVAMNPTNTVFDAKRLIGRRFDDSVVQSDMKHWPFTVVNDAGRPKVQVEYKGETKSFYPEEISSMVLTKMKEIAEAYLGKTVTNAVVTVPAYFNDSQRQGTKDAGTIAGLNVLRIINEPTAAAIAYGLDKKVGAERNLLIFDLGGGTFDVSILTIENGIFEVKSTAGDTHLGGEDFDNRLVNHFIAEFKRKHKKDISENKRAVRRLRTACERAKRTLSSSTQASIEIDSLYEGIDFYTSITRARFEKLNADLFRGTLDPVEKALRDAKLDKSQIHDIVLVGGSTRIPKIQKLLQDFFNGKELNKSINPDEAVAYGAAVQAAILSGDKSENVQDLLLLDVTPLSLGIETAGGVMTVLIKRNTTIPTKQTQTFTTYSDNQPGVLIQVYEGERAMTKDNNLLGKFELTGIPPAPRGVPQIEVTFDIDANGILNVSAVDKSTGKENKITITNDKGRLSKEDIERMVQEAEKYKAEDEKQRDKVSSKNSLDSYAFNMKATVEDEKLPGKILDEDHQNILDKCNEIINWLDKNQTAEKEEFEHQQKELEKVCNPIITKLYQSAGGMPGGMPGGFPGGGAPPSGGASSGPTIEEVD

SEQ ID NO: 1677 - protein, 3137 aa, Gallus gallus
MRKHRHLPLAAILGLLLSGFCSVGAQQQAAVRNVAVADIIFLVDSSWSIGKEHFQLVREFLYDVVKALDVGGNDFRFALVQFSGNPHTEFQLNTYPSNQDVLSHIANMPYMGGGSKTGKGLEYLIENHLTKAAGSRASEGVPQVIIVLTDGQSQDDVALPSSVLKSAHVNMIAVGVQDAVEGELKEIASRPFDTHLFNLENFTALHGIVGDLVASVRTSMTPEQAGAKGLVKDITAQESADLIFLIDGSDNIGSVNFQAIRDFLVNLIESLRVGAQQIHIGVVQYSDQPRTEFALNSYSTKADVLDAVKALSFRGGKEANTGAALEYVVENLFTQAGGSRIEEAVPQILVLISGGESSDDIREGLLAVKQASIFSFSIGVLNADSAELQQIATDGSFAFTALDIRNLAALRELLLPNIVGVAQRLILLEAPTIVTEVIEVNKKDIVFLIDGSTALGTGPFNSIRDFVAKIVQRLEVGPDLIQVAVAQYADTVRPEFYFNTHQNRKDVMANVKKMKLMGGTALNTGSALDFVRNNFFTSAAGCRMEEGVLPMLVLITGGKSMDAVEQAAAEMKRNRIVILAVGSRNADVAELQEIAHERDFVFQPNDFRLQFMQAILPEVLSPIRTLSGGMVIHETPSVQVTKRDIIFLLDGSLNVGNANFPFVRDFVVTLVNYLDVGTDKIRVGLVQFSDTPKTEFSLYSYQTKSDIIQRLGQLRPKGGSVLNTGSALNFVLSNHFTEAGGSRINEQVPQVLVLVTAGRSAVPFLQVSNDLARAGVLTFAVGVRNADKAELEQIAFNPKMVYFMDDFSDLTTLPQELKKPITTIVSGGVEEVPLAPTESKKDILFLIDGSANLLGSFPAVRDFIHKVISDLNVGPDATRVAVAQFSDNIQIEFDFAELPSKQDMLLKVKRMRLKTGKQLNIGVALDEVMRRLFVKEAGSRIEEGIPQFLVLLAAGRSTDEVERPSGALKEAGVVTFAIKAKNADLSELERIAYAPQFILNVESLPRISELQANIVNLLKTIQFQPTVVERGEKKDVVFLIDGSDGVRRGFPLLKTFVERVVESLDIGRDKVRVAIVQYSNAIQPEFLLDAYEDKADLVSAIQALTIMGGSPLNTGAALDYLIKNVFTVSSGSRIAEGVPQFLILLTADRSQDDVRRPSVVLKTSGTVPFGIGIGNADLTELQTISFLPDFAISVPDFSQLDSVQQAVSNRVIRLTKKEIESLAPDLVFTSPSPVGVKRDVVFLVDGSRYAAQEFYLIRDLIERIVNNLDVGFDTTRISVVQFSEHPHVEFLLNAHSTKDEVQGAVRRLRPRGGQQVNVGEALEFVAKTIFTRPSGSRIEEGVPQFLVILSSRKSDDDLEFPSVQVKQVGVAPMVIAKNMDPEEMVQISLSPDYVFQVSSFQELPSLEQKLLAPIETLTADQIRQLLGDVTTIPDVSGEEKDVVFLIDSSDSVRSDGLAHIRDFISRIVQQLDVGPNKVRIGVVQFSNNVFPEFYLRTHKSKNAVLQAIRRLRLRGGYPVNAGKALDYVVKNYFIKSAGSRIEDGVPQHLVVILGDQSQDDVNRPANVISSTSIQPLGVGARNVDRNQLQVITNDPGRVLVVQDFTGLPTLERKVQNILEELTVPTTEGPVYPGPEGKKQADIVFLLDGSINLGRDNFQEVLQFVYSIVDAIYEDGDSIQVGLAQYNSDVTDEFFLKDYSSKPEILDAINKVIYKGGRVANTGAAIKHLQAKHFVKEAGSRIDQRVPQIAFIITGGKSSDDGQGASMEVAQKGVKVFAVGVRNIDLEEVSKLASESATSFRVSTAQELSELNEQVLVTLAAAMKEKLCPGTTDVTRDCDLDVILGFDVSDVGAGQNIFNSQRGLESRVEAVLNRITQMQKISCTGSRAPSVRVAIMAQSRGGPVEGLDFSEYQPELFERFQGMRTRGPYFLTAETLKSYQNKFRSAPSGSTKVVIHFTDGTDDYLDQMKTASADLRRQGVHALLFVGLDRVKNFEEVMQLEFGRGFTYNRPLRVNLLDLDFELAEQLDNIAERTCCGVPCKCSGQRGDRGLPGPIGPKGATGEIGYGGYPGDEGGPGERGPPGVNGTQGFQGCPGHRGTKGSRGFPGEKGELGEMGLDGIDGEEGDKGLPGFSGEKGFSGRRGSKGAKGERGERGDRGLRGDPGESGADNTQRGTRGQKGEIGQMGEPGPAGQRGQDGGVGRKGMAGRRGPIGVKGTKGALGQPGPAGEQGMRGPQGPPGQIGTPGIRGEQGIPGPRAGGGQPGAPGERGRIGPLGRKGEPGNPGPRGPNGQQGPRGEMGDDGRDGIGGPGPKGRKGERGFVGYPGPKGGPGDRGGAGGPGPKGNRGRRGNAGNPGTPGQKGEIGYPGPSGLKGDKGPSISQCALVQNIKDKCPCCYGPKECPVFPTELAFAIDTSSGVGRDVFNRMKQTVLRVVSNLTIAESNCPRGARVALVTYNNEVTTEIRFADARKKSSLLQQIQNFQATLTTKPRSLETAMSFVARNTFKRARSGFLMRKVAVFFSNGETRASPQLNDAVLKLYDAGVTPVFLTSRQDAVLERALEINNTAVGHAIVLPTSGSQLNDTIRRLLTCHVCLDVCEPDPICGYGSQRPVFRDRRAAPTDVDTDIAFIMDSSASTTPLQFNEMKKYISHLVSNMEISSEPKISQHHARVAVLQQAPYDHETNSSFPPVKTEFSLTDYGSKEKIINYLHNQMTQLYGTMAMGSAVEHTVAHVFESAPNPRDLKVIVLMITGKMEKQELEYLREAVIDAKCKGYLFVILGIGKNVDVKNIYSLASEPNDVFFKLVSKPGELHEEPLLRFGRLLPSFIRSDFAFYLSPEIRKQCKWLQADQTPKSPGHTGQKAVYIAPNGTVTQTISTTTTLSTTFKPAASTSAHAKTTTASTTAQTRATERPTESTTVQVNATVQSQGSTAANTKATSRTTTSTTAAAASGRRRQGAKMNDIQITDVTENSARLRWASPEPHNAYVFDLAITLAHDHSLVLKQNVTGTERVIGGLRSGQKYLVFITGYLKSQPKVTYTGTFSTKTPAQPKVALANMMLNAEPLEGPENVMDICLLQKEEGTCRDFVLKWHYDLKTKSCARFWYGGCGGNENRFNTQKECEKACSPGNISPGVVTTIGT

SEQ ID NO: 1678 - protein, 1318 aa, Gallus gallus
GPPGPPGRDGEDGPPGPPGPPGPPGLGGNFAAQYDPSKAADFGPGPMGLMGPRGPPGASGPPGPPGFQGVPGEPGEPGQTGPQGPRGPPGPPGKAGEDGHPGKPGRPGERGVAGPQGARGFPGTPGLPGFKGIRGHNGLDGQKGQPGTPGTKGEPGAPGENGTPGQPGARGLPGERGRIGAPGPAGARGSDGSAGPTGPAGPIGAAGPPGFPGAPGAKGEIGPAGNVGPTGPAGPRGEIGLPGSSGPVGPPGNPGANGLPGAKGAAGLPGVAGAPGLPGPRGIPGPPGPAGPSGARGLVGEPGPAGAKGESGNKGEPGAAGPPGPPGPSGEEGKRGSNGEPGSAGPPGPAGLRGVPGSRGLPGADGRAGVMGPAGNRGASGPVGAKGPNGDAGRPGEPGLMGPRGLPGQPGSPGPAGKEGPVGFPGADGRVGPIGPAGNRGEPGNIGFPGPKGPTGEPGKPGEKGNVGLAGPRGAPGPEGNNGAQGPPGVTGNQGAKGETGPAGPPGFQGLPGPSGPAGEAGKPGERGLHGEFGVPGPAGPRGERGLPGESGAVGPAGPIGSRGPSGPPGPDGNKGEPGNVGPAGAPGPAGPGGIPGERGVAGVPGGKGEKGAPGLRGDTGATGRDGARGLPGAIGAPGPAGGAGDRGEGGPAGPAGPAGARGIPGERGEPGPVGPSGFAGPPGAAGQPGAKGERGPKGPKGETGPTGAIGPIGASGPPGPVGAAGPAGPRGDAGPPGMTGFPGAAGRVGPPGPAGITGPPGPPGPAGKDGPRGLRGDVGPVGRTGEQGIAGPPGFAGEKGPSGEAGAAGPPGTPGPQGILGAPGILGLPGSRGERGLPGIAGATGEPGPLGVSGPPGARGPSGPVGSPGPNGAPGEAGRDGNPGNDGPPGRDGAPGFKGERGAPGNPGPSGALGAPGPHGQVGPSGKPGNRGDPGPVGPVGPAGAFGPRGLAGPQGPRGEKGEPGDKGHRGLPGLKGHNGLQGLPGLAGQHGDQGPPGNNGPAGPRGPPGPSGPPGKDGRNGLPGPIGPAGVRGSHGSQGPAGPPGPPGPPGPPGPNGGGYEVGFDAEYYRADQPSLRPKDYEVDATLKTLNNQIETLLTPEGSKKNPARTCRDLRLSHPEWSSGFYWIDPNQGCTADAIRAYCDFATGETCIHASLEDIPTKTWYVSKNPKDKKHIWFGETINGGTQFEYNGEGVTTKDMATQLAFMRLLANHASQNITYHCKNSIAYMDEETGNLKKAVILQGSNDVELRAEGNSRFTFSVLVDGCSKKNNKWGKTIIEYRTNKPSRLPILDIAPLDIGGADQEFGLHIGPVCFK

SEQ ID NO: 1679 - protein, 277 aa, Gallus gallus
EAHEAEEVHEEAHHEEAHHEEAHHEEAHHAEAHHAEAHHEEAHAHAEEVHEPAPPPVHEPDILLTAPKIPEGEKVDFDDIQKKRQNKDLIELQALIDSHFEARRKEEEELVALKERIEKRRAERAEQQRIRAEKEKERQARLAEEKARREEEDAKRKAEDDLKKKKALSSMGASYSSYLAKADQKRGKKQTARETKKKVLAERRKPLNIDHLNEDKLRDKAKELWDWLYQLQTEKYDFAEQIKRKKYEILTLRCRLQELSKFSKKAGAKGKVGGRWK

SEQ ID NO: 1680 - protein, 137 aa, Gallus gallus
LLKPNMVTPGHSCPTKYSPEEIAMATVTALRRTVPPAVPGVTFLSGGQSEEEASINLNAINTCPLVRPWALTFSYGRALQASALSAWRGQRDNANAATEEFVKRAEVNGLAALGKYEGSGDDSGAAGQSLYVANHAY

SEQ ID NO: 1681 - protein, 298 aa, Gallus gallus
MSDQALSFLKDFLAGGVAAAISKTAVAPIERVKLLLQVQHASKQITAEKQYKGIIDCVVRIPKEQGIISFWRGNLANVIRYFPTQALNFAFKDKYKQIFLGGVDRHKQFWRYFAGNLASGGAAGATSLCFVYPLDFARTRLAADVGKGVSEREFTGLGDCIVKIFKSDGLRGLYQGFNVSVQGIIIYRAAYFGVYDTAKGMLPDPKNVHIIVSWMIAQSVTAAAGLVSYPFDTVRRRMMMQSGRKGADIMYKGTIDCWKKIAKDEGSKAFFKGAWSNVLRGMGGAFVLVLYDEIKKYV

SEQ ID NO: 1682 - protein, 406 aa, Gallus gallus
MKATCWILAGFCLLFCCKAEEGLNFPTYDGKDRVIDLNEKNYKHALKKYDMLCLLFHEPVSSDRVSQKQFQMTEMVLELAAQVLEPRSIGFGMVDSKKDAKLAKKLGLVEEGSLYVFKEERLIEFDGELATDVLVEFLLDLLEDPVEVINSKLELQAFDQIDDEIKLIGYFKGEDSEHYKAFEEAAEHFQPYVKFFATFDKGVAKKLGLKMNEVDFYEPFMDEPVHIPDKPYTEEELVEFVKEHKRATLRKLRPEDMFETWEDDMEGIHIVAFAEEDDPDGFEFLEILKQVARDNTDNPDLSIVWIDPDDFPLLITYWEKTFKIDLFRPQIGIVNVTDADSVWMEIRDDDDLPTAEELEDWIEDVLSGKINTEDDDDDDDDDDDDDDDDDDDDDDDDDDDDDDDDD

SEQ ID NO: 1683 - protein, 466 aa, Gallus gallus
PTSMGKEKTHINIVVIGHVDSGKSTTTGHLIYKCGGIDKRTIEKFEKEAAEMGKGSFKYAWVLDKLKAERERGITIDISLWKFETTKYYITIIDAPGHRDFIKNMITGTSQADCAVLIVAAGVGEFEAGISKNGQTREHALLAYTLGVKQLIVGINKMDSTEPAYSEKRYDEIVKEVSAYIKKIGYNPATVPFVPISGWHGDNMLEPSPNMPWFKGWKVERKEGNASGVSLLEALDTILPPTRPTDKPLRLPLQDVYKIGGIGTVPVGRVETGILRPGMVVTFAPVNITTEVKSVEMHHEALSEALPGDNVGFNVKNVSVKDIRRGNVCGDSKSDPPQEAAQFTSQVIILNHPGQISAGYSPVIDCHTAHIACKFAELKEKIDRRSGKKLEDNPKSLKSGDAAIVEMIPGKPMCVESFSQYPPLGRFAVRDMRQTVAVGVIKNVEKKSGGAGKVTKSAQKAQKAGK

SEQ ID NO: 1684 - protein, 472 aa, Gallus gallus
  MOD_RES (93)..(96): Any amino acid
MKRLNLLCCCVASLLLLGTAEEVEDASEPTKRDRSHLENTLKLNEDKPADDFSGVLQRLRKIYHASIKPLEQSYRYNELRQHEITADGAIPGXXXXMVLFLGPWSVGKPSMINYLLGLDDTPYQLYTGAEPTTSEFTVIMHGPKLKTIEGIVMAADSARSFSPLEKFGQNFLEKLIGIEVPHKLLERVTFVDTPGIIENRKQQERGRGLQEGCYYMLQQGSVPTLKEFPPPSDLNFTSFNSFYNLPLNTRNPLRGLPGGKGLASQEALKCFSTYETVSVLYENQQSPLIRRESPLPRWPFLLDFSFLSPRLPVQRYLNQVIENRMENKIAFIRQHAIRVRIHALLVDRYLQTYKDKMTFFSDGELVFRDIVEDPDKFFIFKSILAKTNVSKFDLPNREAYKDFFGINPITSFKLLSQQCSYMGGCYLEKIEKAITRELPDLLGSIGLGKKPNVLSCDVTGCGETPKNRYKKP

SEQ ID NO: 1685 - protein, 340 aa, Gallus gallus
MSEKTPFETDMLTLTRFVMEKGRRVKGATGELTQLLNSMLTAIKAISSAVRKAGLAHMFGIAGTVNVTGDEVKKLDVLSNSLVINMLQSSYSTCVLVTEENKEALITPKEKRGKYVVCFDPLDGSSNIDCLAPIGTIFAIYKKETDDEPSEKDALQPGRKIVAAGYALYGSATLVALSTGQGVDCFMLDPALGEFILVDRDVKIKKKGKIYSLNEGYAKYFDPAMTEYLKKKKFPEDGSSPYGARYVGSMVADVHRTLMYGGIFMYPANQKSPKGKLRLLYEGNPMAFIIEQAGGIATTGTEAVLDVKPEGIHQRVPLILGSPDDVHEYLACVQKHQKSS

SEQ ID NO: 1686 - protein, 463 aa, Gallus gallus
SQSYSSSQRVSSYRRTFGGGTSPVFPRASFGSRGSGSSVTSRVYQVSRTSAVPTLSTFRTTRVTPLRTYGSAYQGAGELLDFSLADAMNQEFLQTRTNEKVELQELNDRFANYIEKVRFLEQQNALMVAEVNRLRGKQPTRVAEMYEEELRELRRQVDALTGQRARVEVERDNLLDNLQKLKQKLQEEIQLKQEAENNLAAFRADVDAATLARIDLERRIESLQEEIAFLKKVHEEEIRELQAQLQEQHIQVEMDISKPDLTAALRDIRAQYESIAAKNIAEAEEWYKSKVSDLTQAANKNNDALRQAKQEMLEYRHQIQSYTCEIDALKGTNDSLMRQMREMEERFAGEAGGYQDTIARLEEEIRHLKDEMARHLREYQDLLNVKMALDVEIATYRKLLEGEENRISIPMHQTFASALNFRETSPDQRGSEVHTKKTVMIKTIETRDGEVVSEATQQQHEVL

SEQ ID NO: 1687 - protein, 4861 aa, Gallus gallus
DDEVVLQCVSSIHKEQRKFCLAAEGLGNRLCFLEPTSEAKYVPPDLCICNFVLEQSLSVRALQEMLTNTGDNASEGAAQGGHRTLLYGHAILLRHSFSEMYLTCLTSSRSQTDKLAFDVGLRENAAGEACWWTIHPASKQRSEGEKVRIGDDLILVSVSSERYLHLSMSNGSIQVDASFMQTLWNVHPTCSGSNITEGYLLGGHVVRFFHGHDECLTIPSTDQNDSQQKKVLYETGGAGVRARSLWRVEPLRISWSGSNIRWGQPFRLRHITTGMYLALNDDEGLVMLDREKSDTTSSAFCFRASKELKEKQDSTLKRDIDGMGVPEIKYGDSVCFIQHVASALWLTYKAPDAKSARLGLLKRKVILHQEGHMDDGLTLQRCQHEESQAARIIRNTTSLFSQFINNIFCLFGNNRTLSPIALPVEEMAQTLQDLIKYFQPPGEDLEHEDKQNKLRSLKNRQNLFKDEGMLALVLNCIDRLNDYNSAAHFAEISRVENGTAWKEILNLLYELLAALIRGNRNNCTQFSSNLDWLISKLDRLESSSGILEVLHCILIESPEALNVIAEEHIKSIISLLDKHGRNYKVLDVLCSLCVCNGVAVRANQNLICDNLLPRRDLLLQTRLINDVTSIRPNIFLGVAEGSAQYKKWYFELIIDQVDPFLTAEPTHLRVGWASTSGYAPYPGGGEGWGGNGVGDDLYSFGFDGLHLWSGRVPRAVASVNQHLLSSDDVVSCCLDLGVPSISFRINGQPVQGMFENFCTEGFFFPVVSLSAGVKARFLLGGRHGEFKFLPPTGYAPCYEALLPKEKMKLEPVKEYKRDSDGVRDLLGTTQFLSQASFIPCPIDTSQIALPFHLEKIRDKLAENIHELWGMNKIELGWTYGKIRDDNKRHHPCLVEFSKLPETEKNYNLQMSTETLKTLLALGCHIVHANPAAEEDLKKVKLPKNYIMSNGYKPAPLDLSEVKLLPSQEFLVDKLAENAHNVWAKDRIKQGWTYGIQQDLKNKRNPRLVPYALLDERTKKSNRDSLREAVRTFAGYGYNVEPPDQEIADQTVEKVSIDKIRFFRVEQSYAVKSGKWYFEFEAVTGGDMRVGWARPGCRPDIELGADDQAFVFEGSKGQRWHQGSGFFGRSWQPGDVVGCMINLDDKSIIFTLNGELLITSKGSELAFADFGIESGFVPICSLGLSQIGRMNLGMDASTFKYYTMCGLQEGFEPFAVNMNRDVAMWFSKRLPTFVNVPKNHPHIEIWRIDGTIESPPRLKVTHKTFGTQNSNSDMIYCRLSMPIEFRSSFNFGVGVENASSDALQKRKHSQEFPASSTTCFYSLRIFAGQDPSSVWVGWVTPDYHFYSENFDINKNCTVTVTLGDERGRVHESVKRSNCYMVWGGDIAANSQRSGRSNVDLEIGCFVDLATGMLSFTANGKELGTCYQVEPNTKLFPAAFVQPTSTNLIQFELGKLKNTMPLSAAIFKSEERNPVPQCPPRLDVQTITPVLWSRMPNSFLKVETERVSERHGWVVQCLEPLQMMALHIPEENRCVDILELCEQEDLMKFHYHTLKLYSSVCALGNTRVAYALCSHVDISQLFYTIDNQYLPGLLRSGFYDLLISIHLDHAKQAKLMMNNEFIIPVTEETRTIKLYPDETKKHGLPGVGLSTCLKPSFNFSTPCFIVTSEEHQTSSPDIPLDTLKSKAISMLTEAVQCSGSHIRDPVGGHIAFQFVPVLKLIATLLVMGVFDDDDVKQVLILIDPNVFGDHKEEAEEKTEKEEVTQVEEKAVEAGEKAVKETKAPTKGLLQTRLPESVKLQMCHLLNYFCDCELQHRVEAIVSFADHYVSKLQYNQKYRYNELMQALNMSAALTAKKTKEFRSPPQEQINMLLNFQLGEDCPCPEEIRDELYDFHDDLLIHCGIPLEEEEEEEEDSSLTGKLRSLIYKIKGPPKPEKIEPREEEDKSPTTLKELISQTMVRWSQEDQIQDPELVRIMYTLLRRQYDSIGELLQALRKAYTISAASVKDTINLLAALGQIRSLLSVRMGKEEELLMINGLGDIMNNKVFYQHPNLMRVLGMHETVMDVMVNVLGGDKSQQIAFPKMVASCCRFLCYFCRISRQNQKAMFEHLSYLLENSSVGLAFPSMRGSTPLDVAAASVMDNNELALALEEPDLDKVVTYLAGCGLQSCPVLLAKGYPDIGWNPIEGERYLSFLRFAVFVNSESVEENASVVVKLLIRRPECFGPELRGEGGNGLLAAMQEAIRISENPTRDLPSQGYKREGDEEEEEEEEIVHMGNAIMSFYSALIDLLGRCAPEMHLIQSGKGEAIRIRSILRSLVPTEDLVGIISIPLKLSTVNKDGTVNEPDMSANFCPDHKAPMVLFLDRVYGIKDQSFLLHLLEVGFLPDLRASASLDTVSLSTTEAALALNRYICSAVFPLLKRCAPLFSGTEHHASLVDSMLHTIYRLSKGRSLTKAQRDTIEECLLAICHHLRPSMLQQLLRRLVFDVPLLNEYCKMPLKLLTNHYEQCWKYYCLPSGMGSYGIAAEDELHLTEKLFWGIFDSLSHKKYDPELFRMALPCLSAIAGALPPDYLDTRIRSTLEKQTSVDPEGNFDPKPVNTANLVLPEKLEYIVSKYAEHSHDKWAFDKTNNGWKYGVSLDENTKTHPLIRPFKTLTEKEKEIYRWPVRESLKTMLAMGWSLERTKEGGEGMLHQRENEKLRSISQSSQGNGYSPAPLDLTNVVLSRELQGMVEVMAENYHNIWAKKKKMELESKGGGSHPLLVPYDTLTAKEKSRDREKAQELFKFLQVNGIIISRGLNDMDLDASSMEKRFAFKFLKKILKYVDSAQEFIAHLEAIVTSGKTEKSPHDQEIKFFAKVLLPLVDQYFTNHCLYFLSSPTKTLSSSGYASNKEKEMVASLFCKLAALVRHRISIFGSDSTTMVSCLHILAQSLDTRTVMKSGSELVKAGLRAFFENAAEDLEKTSENLKLGKFTHSRTQIKGVSQNINYTTVALLPVLTSIFEHISQYHFGVDLLLGDVQVSCYRILCSLYSLGTGKNIYVERQRPALGECLASLAAAIPVAFLEPSLNHYNPLSVFNTKSARERAILGMPDTVEEMCPEIPQLDGLIKEINNLAESGARYTEMPHVIEVILPMLCNYLSYWWERGSESVPESAGPCCTMITSEHLSIILGNILKIINNNLGIDEASWMKRIAVYAQPIISKARPDLLKTHFIPTLEKLKKKAIKIVMEEEQLRADSKSDTQEAELLILDEFAVLCRDLYAFYPMLIRYVDNNRANWLKKPDADSDELFRMVAEVFILWCKSHNFKREEQNFVIQNEINNLAFLTGDTKSKMSKAMQVKSGGQDQERKKSKRRGDLYSIQTSLIVAALKKMLPIGLNMCTPGDQELISLAKTRYSHRDTDEEVKEHIRNNLHLQEKSDDPAVKWQLNLYKDILKSDEPPDPEKNVERVQRISAALYHLDQVEQPLRSKKAVWHKLLSKQRKRAVVACFRMAPLYNLPRHRSINLFLHGYQNYWIETEEYSFEEKLVQDLATSPKKEEEEEEDTEKEQPDPLHQIILYFSRNALTERSKLEDDPLYIAYAAMMAKSCQEEEEEEEEDKEKTFEEKEMEKQRTLYQQARLHDRGAAEMVLQMISASKGHTGPMVVETLKLGIAILNGGNTIVQQKMLDYLKEKKDAGFFQSLSGLMQSCRSVLDLNAFERQNKAEGLGMVTEEGTLIVRERGEKVLQHDEFTRDLFRFLQLLCEGHNNDFQNYLRTQMGNTTTVNIIISTVDYLLRLQESISDFYWYYSGKDVIDESGQRNFSKALAVTKQIFNSLTEYIQGPCIGNQQSLAHSRLWDAVVGFLHVFANMQMKLSQDSAQIELLKELLDLLKDMVVMLLSLLEGNVVNGTIGKQMVDTLVESSSNVELILKFFDMFLKLKDLTNSDAFKEHDPDGKGIISKKDFQKSMEAQKQYIQSEIEFLLSCAEADENDMFNYIDFVERFHEPAKDIGFNVAVLLTNLSEHMPNDSRLQSLLEPAESVLNYFEPYLGRIEIMGGAKKIERVYFEISESSRMQWEKPQVKESKRQFIFDVVNEGGEQEKMELFVNFCEDTIFEMQLASQISESDSAERPEEEEEEEPCYVVDIGDDEEEEKSLESPSAFALACAAVKKNVANFFKMVTVKNLRKQYRKVRKMTVKEMVKVFFSFFWILFVGVFQLFFTIVWGIFQILWSTVFGGGLVEGAKNIKVTKILGDMPDPTQFGIHDDVTEAEKTEGAEHGIRDELVQFVKGEKGETDIISDIFGIPTKKEGGSKHGHDAGLGDIAEILGSDIQSSLENNARKKKGLQIPETAKEAEAERKVEAEKADMEDGEKQDKAKEEQSEQPEEGKMKKKKRRHGQKIEKPEAVMANFFKALEIYQTKILHYLARNFYNLRFLALFVAFAINFILLFYKVTEEPLDEVEEDSNLWNSFEEEEEEEGMVFFVLEESTGYMAPALRALAVIHTIISFVCVIGYYCLKVPLVVFKREKEVARKLEFDGLYITEQPSEDDIKGQWDRLVINTPSFPNNYWDKFVKRKVINKYGDLYGAERIAELLGLDKNALDFSPVEESEPEAASLVSWLSSIDTKYHIWKLGVVFTDNSFLYLAWYTTMSILGHYNNFFFAAHLLDIAMGFKTLRTILSSVTHNGKQLVLTVGLLAVVVYLYTVVAFNFFRKFYNKSEDEDEPDMKCDDMMTCYLFHMYVGVRAGGGIGDEIEDPAGDPYEMYRIVFDITFFFFVIVILLAIIQGLIIDAFGELRDQQEQVREDMETKCFICGIGNDYFDTIPHGFETHTLQEHNLANYLFFLMYLINKDETEHTGQESFVWKMYQERCWDFFPAGDCFRKQYEDQLG

SEQ ID NO: 1688 - protein, 337 aa, Gallus gallus
MLSRLARPAAVLCRGLATSAQNNAKVAVLGASGGIGQPLSLLLKNSPLVSRLTLYDIAHTPGVAADLSHIETRANVKGFLGPEQLPECLKGCDVVVIPAGVPRKPGMTRDDLFNTNASIVATLTTACAKHCPEAMICIISNPVNSTIPITSEVFKKHGVYNPNRIFGVTTLDIVRANTFVAELKGLDPARVSVPVIGGHAGKTIIPLISQCTPKVDFPQDQLEKLTGRIQEAGTEVVKAKAGAGSATLSMAYAGARFVFSLVDAMNGKEGVIECSFVRSEETESPYFSTPLLLGKNGIEKNLGIGKITPFEEKMVAEAMAELKASIKKGEDFAKNFK

SEQ ID NO: 1689 - protein, 773 aa, Gallus gallus
MAAAELERLRMAGAGMAIAVLTSGGDAQGMNAAVRAVTRMGIYVGAKVFLIYEEHRQAPPGTPHVAERCATSPRLSPLQGGTVIGSARCKAFTTRQGRLRAARNLVEHGITNLCVIGGDGSLTGADVFRAEWAGLLDELLRDGLISEEVAKANGRLNVVGLVGSIDNDFCGTDMTIGTDSALHRIMEVIDAITTTAQSHQRTFVLEVMGRHCGYLALVSGLASGADWLFIPESPPEDGWEDLMCERLGETRSRGSRLNIIIIAEGAIDRNGKPISSNYVKDLVVQRLGFDTRVTVLGHVQRGGTPSAFDRVLSSKMGMEAVMALLEATPDTPACVVSLSGNQSVRLPLMECVQVTKDVQKAMDEKRFDEAIQLRGRSFENNWNIYKLLAHQKPAQEKQSPFSLAILNVGAPAAGMNAAVRSAVRISICRGHTIYAVSDGFEGLAKGQIREVGWHDVAGWLGRGGSMLGTKRTLPKTCMEKIVENVRKFNIQGLLVIGGFEAYEGVLQLVEARGQYEELCIIMCVIPATISNNVPGTDFSLGSDTAVNAAMESCDRIKQSASGTKRRVFIVETMGGYCGYLSTVTGIAVGADAAYVYEDPFTIHDLKANVEHLTDKMKTDIQRGLVLRNEKCHEHYTTEFLYNLYSSEGKGIFDCRINVLGHLQQGGAPTPFDRNYGTKLGVKAVLWMSEKLQEAYRKGRVFANSADSACVIGLRKKVVAFSPVTELKKVTDFEHRLPQEQWWLNLRLMLKMLANYQISLTEYISGKMEHVTRR

SEQ ID NO: 1690 - protein, 1021 aa, Gallus gallus
KSRLRRRREREITEITSEEEEEIEMVQHVHREFSPPSRLLRRRRSLSPTYIELMRPVSELIRPRSRPPEESERRSPTPERTRPRSPSPVSTERSLSRFERMARFDIFSRYESMKSALKTQKTMERKYEVLTQQPFTLDHAPRITLRMRSHRVPCGHNTRFILNVQSKPTADVKWYHNGIELQESSKIHFSNTSGVLTLEILDCHIDDSGTYRAVCTNYKGECSDYATLDVTGGDYTTYSSQRRDEEVPRSILPDLTRTEAYAVSSFKKATAAEASSSVREVKSEVSATRESLLSYEHHASSEEKITASEEKSLEERTVHKAFKSTLPATILTKPRSITVSEGETARFSCDVDGEPAPTITWVRAGQPIVSSRRFQITRTQYKSTFEISLVQIADEGSYTVVVENSEGRQEAHFTLTVQRKRIPEKAITSPPRIKSPEPRVKSPEPVKSPKRVKSPEPISTPSKAKSPPGDKTAPVEKVQLPTASPPKIKEQLKAETLGDKVKLSCAVESSVLSIREVAWYKDGKKLKEDHHFKFHYAADGTYELKIHNLTESDKGEYTCEIMGEGGISKTNFQFTGQVFKNIHSQVQSVSETPKSVEKGDKVLAVSTQKKSSAATEEKAAIEEVIKKSIVTEDVKQLQAEIRASSTQMTVSEGQKVTLKANIPGASEVKWVLNGMELRNSDDYRYGISGSNHTLTIKKASNKDEGILTCEGKTDEGTIKCQYVLTFSKEPSNEPAFITQPKSQNVNEGQDVLFTCEVSGDPSPEVEWLRNNQPIAVSSHMRATRSKNTYSLEIRNAAVSDTGKYTVKAKNYHGQCSATASLTVFPLIEEPPKEVVLKTSGDASMHESFSSQSFQMAASKQEASFSSFSSSSMTETKFASMSAKSMSSMKESFVEMSSSSIMGKSSMAQLESSTSKMLKSGVRGVPPKIEALPSDISIDEGKVLTLSCAFSGEPAPEITWYCRGRKITSQDQQGRFHIETSEDLTTLIIMDVQKNDGGIYTLNLGNEFGTDSATVNINIRSI

SEQ ID NO: 1691 - protein, 284 aa, Gallus gallus
MDAIKKKMQMLKLDKENALDRAEQAEADKKAAEERSKQLEDELVALQKKLKGTEDELDKYSESLKDAQEKLELADKKATDAESEVASLNRRIQLVEEELDRAQERLATALQKLEEAEKAADESERGMKVIENRAQKDEEKMEIQEIQLKEAKHIAEEADRKYEEVARKLVIIEGDLERAEERAELSESKCAELEEELKTVTNNLKSLEAQAEKYSQKEDKYEEEIKVLTDKLKEAETRAEFAERSVTKLEKSIDDLEDELYAQKLKYKAISEELDHALNDMTSI

SEQ ID NO: 1692 - protein, 423 aa, Gallus gallus
MALLQSRLLLSAPRRAAATARASSWWSHVEMGPPDPILGVTEAFKRDTNSKKMNLGVGAYRDDNGKSYVLNCVRKAEAMIAAKKMDKEYLPIAGLADFTRASAELALGENSEAFKSGRYVTVQGISGTGSLRVGANFLQRFFKFSRDVYLPKPSWGNHTPIFRDAGLQLQAYRYYDPKTCSLDFTGAMEDISKIPEKSIILLHACAHNPTGVDPRQEQWKELASVVKKRNLLAYFDMAYQGFASGDINRDAWALRHFIEQGIDVVLSQSYAKNMGLYGERAGAFTVICRDAEEAKRVESQLKILIRPMYSNPPMNGARIASLILNTPELRKEWLVEVKGMADRIISMRTQLVSNLKKEGSSHNWQHITDQIGMFCFTGLKPEQVERLTKEFSIYMTKDGRISVAGVASSNVGYLAHAIHQVTK

SEQ ID NO: 1693 - protein, 445 aa, Gallus gallus
MREIVHIQAGQCGNQIGAKFWEVISDEHGIDPTGSYHGDSDLQLERINVYYNEAAGNKYVPRAILVDLEPGTMDSVRSGPFGQIFRPDNFVFGQSGAGNNWAKGHYTEGAELVDSVLDVVRKESESCDCLQGFQLTHSLGGGTGSGMGTLLISKIREEYPDRIMNTFSVMPSPKVSDTVVEPYNATVSVHQLVENTDETYCIDNEALYDICFRTLKLTTPTYGDLNHLVSATMSGVTTCLRFPGQLNADLRKLAVNMVPFPRLHFFMPGFAPLTSRGSQQYRALTVPELTQQMFDSKNMMAACDPRHGRYLTVAAIFRGRMSMKEVDEQMLNVQNKNSSYFVEWIPNNVKTAVCDIPPRGLKMSATFIGNSTAIQELFKRISEQFTAMFRRKAFLHWYTGEGMDEMEFTEAESNMNDLVSEYQQYQDATADEQGEFEEEGEEDEA

SEQ ID NO: 1694 - protein, 555 aa, Gallus gallus
AAMLSARVAAVLARSLPRQAGLVSRNALGAAFVATRNIHASKMGFQKTGTAEVSSILEERILGADTSAELEETGRVLSIGDGIARVYGLRNVQAEEMVEFSSGLKGMSLNLEPDNVGVVVFGNDRLIKEGDVVKRTGAIVDVPVGEELLGRVVDALGNPIDGKGPITSKTRRRVGLKAPGIIPRISVREPMQTGIKAVDSLVPIGRGQRELIIGDRQTGKTSIAIDTIINQKRFNDGTDEKKKLYCIYVAIGQKRSTVAQLVKRLTDADAMKYTIVVSATASDAAPLQYLAPYSGCSMGEYFRDNGKHALIIYDDLSKQAVAYRQMSLLLRRPPGREAYPGDVFYLHSRLLERAAKMNDSFGGGSLTALPVIETQAGDVSAYIPTNVISITDGQIFLETELFYKGIRPAINVGLSVSRVGSAAQTRAMKQVAGTMKLELAQYREVAAFAQFGSDLDAATQQLLNRGVRLTELLKQGQYVPMAIEEQVAVIYAGVRGHLDKLEPSKITKFESAFLAHVLSQHQALLSTIRTEGKISDQTEAKLKEIVTNFLSTFEA

SEQ ID NO: 1695 - protein, 1022 aa, Gallus gallus
MSRRTAEMFQQAFLSTLLCVALVPLHAQFDDEPVTSCTEKTDCPISVYFVIDTSESIALQTVPIQSLVDQIKQFIPRFIEKLENEVYQNQVSITWMFGGLHYSDVVEIYSPLTRSKDTYLTKLRAIRYLGRGTFTDCAISNMTQQFQSQTARDVKFAVVITDGHVTGSPCGGMKMQAERARDMGIKLFAVAPSEDVYEQGLREIASPPHDLYRSNYTITPKDALHIDENTIERIIKAMKHEAYAECYKMTCLEIAGPAGPKGYRGQKGAKGNMGEPGSPGLKGRQGDPGIEGPIGYPGPKGVPGLKGEKGEIGSDGRRGAAGLAGRNGTDGQKGKLGRIGPPGCKGDRGDKGPDGYPGDAGDQGERGDEGMKGDPGRPGRSGPPGPPGEKGSPGIPGNPGAQGPGGTKGRKGETGPPGPKGEPGRRGDPGTKGSKGGPGAKGERGDPGPEGPRGLPGEVGNKGARGDQGLPGPRGPTGAVGEPGNIGSRGDPGDLGPRGDAGPPGPKGDRGRPGFSYPGPRGPQGDKGEKGQPGPKGGRGELGPKGTQGTKGEKGEPGDPGPRGEPGTRGPPGEAGPEGTPGPPGDPGLTDCDVMTYVRETCGCCDCEKRCGALDIMFVIDSSESIGYTNFTLEKNFVVNVVSRLGSIAKDPKSETGARVGVVQYSHEGTFEAIKLDDERINSLSSFKEAVKRLEWIAGGTWTPSALQFAYNKLIKESRREKAQVFAVVITDGRYDPRDDDKNLGALCGRDVLVNTIGIGDIFDQPEQSETLVSIACNEPQRVQKMRLFSDLVAEEFIDKMEDMLCPDPQIVCPELPCQTELAVAQCTQRPVDIVFLLDGSERIGEQNFHRAHHFVEQVAQQLTLARRNDDNMNARIALLQYGSEREQNVVFPLTYNLTEISNALAQIKYLDSSSNIGSAIIHAINNIVLSPGNGQRVARRNAELSFVFITDGITGSKNLEEAINSMKKQDVMPTVVALGSDVDMDVLLKLGLGDRAAIFREKDYESLSQPSFFDRFIRWIC

SEQ ID NO: 1696 - protein, 51 aa, Gallus gallus
IRGRPAPEVKWGKVDGEIREAAIIDTTSSFTSLVLDSVNRFDTGKYTLTLE

SEQ ID NO: 1697 - protein, 284 aa, Gallus gallus
PMAIPPSYADLGKSARDIFNKGYGFGLVKLDVKTKSASGVEFTTSGSSNTDTGKVNGSLETKYKWAEYGLTFTEKWNTDNTLGTEIAIEDQIAKGLKLTFDTTFSPNTGKKSGKIKSAYKRECLNLGCDVDFDFAGPAIHGSAVFGYEGWLAGYQMTFDSAKSKLTRNNFSVGYKTGDFQLHTNVNDGSEFGGSIYQKVSDNLETAVNLAWTAGSNSTRFGIAAKYKLDSTASISAKVNNSSLVGVGYTQTLRPGVKLTLSALIDGKSINAGGHKLGLGLELEA

SEQ ID NO: 1698 - protein, 293 aa, Gallus gallus
MPLAGTPAPLKRKKPTKLIGKLTHEVMPQEVTKLNLGKKISIPRDVMLEELSLLTNKGSKMFKLRQLRVEKFIYENNPDAFTDNSVDHFQKFIPPGGHYGEDAHGYGHGRMVGGVTAGHHGSSKQHYSTVPPRPGSKGGPGDSEGEHAELSAGTAGEGGHGTEKDGKSGGKKPLVKTYISPWERAMGISPEDKSQLTIDLLSYSPKADFPHYKSFNRTAMPYGGYEKAAKRMTFKVPQFDICPLLPESLVLYNQNFRNRPSFNRTPIPWMPSGESSEYHTDINVPRSGETEEL

SEQ ID NO: 1699 - protein, 364 aa, Gallus gallus
MTHQFPALSPEQKKALSDIAQRIVASGKGILAADESVGTMGNRLQRINVENTEENRRAFREILFSSDASISKSIGGVILFHETLYQKDSSGKPFPAIIKEKGMVVGIKLDAGTAPLAGTNGETTIQGLDKLAERCAQYKKDGADFGKWRAVLKISSTTPSQLAIQENANTLARYASICQQNGLVPIVEPEVLPDGDHDLQRCQYVTEKVLAAVYKALNDHHVYLEGTLLKPNMVTAGHSCPKKYTPQDVAVATVTTLLRTVPAAVPGICFLSGGQSEEEASLNLNAMNQSPLPKPWKLTFSYGRALQASALAAWLGKSENKKAAQEAFCKRAQINSLACRGQYVTSGKTDTAATQSLFTASYTY

SEQ ID NO: 1700 - protein, 339 aa, Gallus gallus
MSTVHEILSKLSLEGDHSLPPSAYATVKAYSNFDADRDAAALEAAIKTKGVDEVTIINILTNRSNEQRQDIAFAYQRRTKKELSAALKSALSGHLEAVILGLLKTPSQYDASELKAAMKGLGTDEDTLIEIICSRTNQELNEINRVYREMYKTELEKDIISDTSGDFRKLMVALAKGKRCEDTSVIDYELIDQDARELYDAGVKRKGTDVPKWINIMTERSVPHLQKVFERYKSYSPYDMLESIKKEVKGDLENAFLNLVQCIQNKQLYFADRLYDSMKGKGTRDKVLIRIMVSRCEVDMLKIKSEFKRKYGKSLYYFIQQDTKGDYQRALLNLCGGED

SEQ ID NO: 1701 - protein, 358 aa, Gallus gallus
MFSSIAPLARLNPFYAPHFQLCQDGLRRRAEPAEAPTTRRSLAAASATEEYSCEYGSGRFFMLCGFGGIISCGTTHTALVPLDLVKCRMQVDPQKYKSIFNGFSVTIKEDGFRGLAKGWAPTFIGYSMQGLCKFGFYEVFKILYGNMLGEENAYLWRTSLYLAASASAEFFADIALAPMEAAKVRIQTQPGYANTLRQAVPKMFGEEGIWAFYKGVAPLWMRQIPYTMMKFACFERTVEALYKYVVPKPRSECSKGEQLVVTFIAGYIAGVFCAIVSHPADSVVSVLNKEKGSSASQVLKRLGFRGVWKGLFARIIMIGTLTALQWFIYDSVKVYFRLPRPPPPEMPESLKKKLGLTQ

SEQ ID NO: 1702 - protein, 447 aa, Gallus gallus
RECISIHVGQAGVQIGNACWELYCLEHGIQPDGQMPSDKTIGGGDDSFNTFFSETGAGKHVPRAIFVDLEPTVIDEVRTGTYRQLFHPEHLITGKEDAANNYARGHYTIGKEIIDLVLDRIRKLADQCTGLQGFLVFHSFGGGTGSGFTSLLMERLSVDYGKKSKLEFSIYPAPQVSTAVVEPYNSILTTHTTLEHSDCAFMVDNEAIYDICRRNLDIERPTYTNLNRLISQIVSSITASLRFDGALNVDLTEFQTNLVPYPRIHFPLATYAPVISAEKAYHEQLSVAEITNSCFEPANQMVKCDPRHGKYMACCLLYRGDVVPKDVNAAIATIKTKRSIQFVDWCPTGFKVGINYQPPTVVPGGDLAKVQRAVCMLSNTTAIAEAWARLDHKFDLMYAKRAFVHWYVGEGMEEGEFSEAREDMAALEKDYEEVGLDSYEDEEEGEE

SEQ ID NO: 1703 - protein, 742 aa, Gallus gallus
MSQVKIPAEDKQIDEATRSFAEKVFASEVKDEATRQEISPFDVEEICPISRHEMRTHMMLQESSSATEKRRKRMLSLKTIALAVPLAQKTTTGLSTIDEVISTSPQYQSVPDFQRVQITGDYASGVTVEDFEVVCKGLYRALCIREKYMQKSLQRFPRTPSQYLRAIEGEVWRASDAGPVFTPPVKDGQDPFETGNLPEDLGYHVQMKDGIVYIYSDKAAAGRNEPKDLPYPSLEHFVDDMNFLLALIAQGPVKTYSHRRLKFLSYKFQVHEMLNEMEEIKELKNNPHRDFYNCRKVDTHIHAAACMNQKHLLRFIKKSYRVDADRVVYDAKGEKLTLKQLFQKLNLHPYDLTVDSLDVHAGRQTFQRFDKFNAKYNPVGASELRDLYLKTENTINGEYFATIIKEVGSDLEDAKYQHAEPRLSIYGRSAEEWAKLANWFNRHRVYSPNMKWMIQVPRIYDVFRSRNFLPHFGKMLENIFVPVFEATVNPQAHKELSVFLRHITGFDSVDDESKHSGHMFSTKSPKPEQWTSAKNPSYTYYVYYMYANILVLNNLRRQRGMNTFLFRPHCGEAGAITHLLAAFMTADNISHGLNLKKSGERQYLYFLAQIPIAMSPLSNNSLFLEYAKNPLLDFHQKGLMVSLSTDDPMQFHYTKEPLMEEYAIAAQVFKLSTCDMCEIARHSVLQCLSHEEKAKFLGENYQEEGPHGNDVRKTNVAQIRMAYRYETWCYELNLIAEGLIAE

SEQ ID NO: 1704 - protein, 869 aa, Gallus gallus
SGRAGRHPSGGRMKETCRICARELCGNQRRWIFHTAAKLNLQVLLSHVLGRELCRDGRGEFACSKCAFMLDRIYRFDTVIARIEALSIERLQKLLLEKDRLKFCIASMYRRNNEEPGADERAGDGTVDLSNLPDARYAALLQEDFAYSGYEYWTDQDEHSLEPHSCHASEGAASRPRRCRGCAALRVADADYEAICKVPRKVARSISCGLSSRWSVSMGNEESSVCDPTEPAGARGPVDGESMEEGTPASSVESLDTTVEASAPQQKDEDVDKGVKGNGKCDDFAEDRMTPSSSLSGNRLELALSLIKGLDYKPIQSPRGSRLPIPVKSSLPPPKLSRDLADGSASAGLAYAGSGFLNADRKSFSRAPLGLPLEIPELQELWDDFCEDYMPLRVQKPFVSNLQDEHQKPAPGDSASRECTADLCATEPQGKIQQFEDTNQLLQEKLNELNFELKSARETSQRQDLTIQSLNEALKSKESETEELYHVIEGQNETMAKLQDMLHRSQLGQLQMSESAPSSQEQQVALLDLQNTLFSTQLEVQKLKRAQRQKEHQLVEAKRAAQLLETTVHEEEQQKEATWKHNQELRAVVQQLQVELQDKAQQIQAMEWEKCRELQAQEQRVQCLSQHLARKEQLLQESRELLQCQQSLGRSSAAMDAMLEKLQQRVSDRDAALERAVDEKFCALEEKEQELQQLRLSIKERGGDLERLRNVLSSNEATIHSLESLLKAKTLELEQMSATCENLRWLKEEIEAKSCSRQKEQEGIIQQLQTCLHDRNKEVEELTATLLCKLGPGQSEVAEELCLRLQRKEKMLQELLSDRNRQAMEHDAEIRELLQAMSTKEQWSKATTEKMVHALAERNCELQLLRQHV

SEQ ID NO: 1705 - protein, 605 aa, Zea mays
MAALATSQLVATRAGLGVPDASTFRRGAAQGLRGARASAAADTLSMRTSARAAPRHQQQARRGGRFPSLVVCASAGMNVVFVGAEMAPWSKTGGLGDVLGGLPPAMAANGHRVMVVSPRYDQYKDAWDTSVVSEIKMGDGYETVRFFHCYKRGVDRVFVDHPLFLERVWGKTEEKIYGPVAGTDYRDNQLRFSLLCQAALEAPRILSLNNNPYFSGPYGEDVVFVCNDWHTGPLSCYLKSNYQSHGIYRDAKTAFCIHNISYQGRFAFSDYPELNLPERFKSSFDFIDGYEKPVEGRKINWMKAGILEADRVLTVSPYYAEELISGIARGCELDNIMRLTGITGIVNGMDVSEWDPSRDKYIAVKYDVSTAVEAKALNKEALQAEVGLPVDRNIPLVAFIGRLEEQKGPDVMAAAIPQLMEMVEDVQIVLLGTGKKKFERMLMSAEEKFPGKVRAVVKFNAALAHHIMAGADVLAVTSRFEPCGLIQLQGMRYGTPCACASTGGLVDTIIEGKTGFHMGRLSVDCNVVEPADVKKVATTLQRAIKVVGTPAYEEMVRNCMIQDLSWKGPAKNWENVLLSLGVAGGEPGVEGEEIAPLAKENVAAP

SEQ ID NO: 1706 - protein, 883 aa, Zea mays
MAPAPCGRSSQRVFHFGKGKSEGNKNMKELLGGKGANLAEMASIGLSVPPGFTVSTEACQQYQEAGRALPPGLWAEVLDGLRWVEEYMGAALGDPRRPLLLSVRSGAAVSMPGMMDTVLNLGLNDQVAAGLAAKSGDRFAYDSFRRFLDMFGNVVMDIPHALFEEKLEAMKKAKGLKNDTDLTATDLKELVSQYKNVYVEAKGEPFPSDPKRQLELAVLAVFDSWESPRAKKYRSINQITGLRGTAVNVQCMVFGNMGNTSGTGVLFTRNPNTGEKKLYGEFLVNAQGEDVVAGIRTPEDLDAMKDVMPQAYKELVENCRILESHYKEMQDIEFTVQESRLWMLQCRTGKRTGKSAVKIAVDMVNEGLVERRAAIKMVEPGHLDQLLHPQFENPSAYKDQVIATGLPASPGAAVGQVVFTAEDAETWHSQGKSVILVRAETSPEDVGGMHAAAGILTERGGMTSHAAVVARGWGKCCVSGCSGIRVNDAEKVVKIGGNVLREGEWLSLNGSTGEVILGKQPLSPPALSGDLGTFMSWVDDVRKLKVLANADTPEDALAARNNGAEGIGLCRTEHMFFASDERIKAVRQMIMAPTVELRQQALDRLLPYQRSDFEGIFRAMDGLSVTIRLLDPPLHEFLPEGNVEEIVRELCSETGANQEDALARIEKLSEVNPMLGFRGCRLGISYPELTEMQARAIFEAAIAMTNQGVQVFPEIMVPLVGTPQELGHQVALIRQVANKVFTSMGKTIGYKIGTMIEIPRAALVADEIAEQAEFFSFGTNDLTQMTFGYSRDDVGKFIPIYLAQGILQHDPFEVLDQRGVGELVKLATERGRKARPNLKVGICGEHGGEPSSVAFFAKTGLDYVSCSPFRVPIARLAAAQVLV

SEQ ID NO: 1707 - protein, 437 aa, Zea mays
MAATMAVTTMVTRSKESWSSLQVPAVAFPWKPRGGKTGGLEFPRRAMFASVGLNVCPGVPAGRDPREPDPKVVRAADNCDIARQLGAAVPGQQAAWEAEEEAAKRRKQKGGGSKKQQQLGDLSLRKVRVKIANPHLRRLVSGAIAGAVSRTFVAPLETIRTHLMVGSIGVDSMAGVFQWIMQNEGWTGLFRGNAVNVLRVAPSKAIEHFTYDTAKKFLTPKGDEPPKIPIPTPLVAGALAGFASTLCTYPMELIKTRVTIEKDVYDNVAHAFVKILRDEGPSELYRGLTPSLIGVVPYAACNFYAYETLKRLYRRATGRRPGADVGPVATLLIGSAAGAIASSATFPLEVARKQMQVGAVGGRQVYQNVLHAIYCILKKEGAGGLYRGLGPSCIKLMPAAGIAFMCYEACKKILVDKEDEEEEDEAGGGEDDKKKVE

SEQ ID NO: 1708 - protein, 947 aa, Zea mays
MAASVSRAICVQKPGSKCTRDREATSFARRSVAAPRPPHAKAAGVIRSDSGAGRGQHCSPLRAVVDAAPIQTTKKRVFHFGKGKSEGNKTMKELLGGKGANLAEMASIGLSVPPGFTVSTEACQQYQDAGCALPAGLWAEIVDGLQWVEEYMGATLGDPQRPLLLSVRSGAAVSMPGMMDTVLNLGLNDEVAAGLAAKSGERFAYDSFRRFLDMFGNVVMDIPRSLFEEKLEHMKESKGLKNDTDLTASDLKELVGQYKEVYLSAKGEPFPSDPKKQLELAVLAVFNSWESPRAKKYRSINQITGLRGTAVNVQCMVFGNMGNTSGTGVLFTRNPNTGEKKLYGEFLVNAQGEDVVAGIRTPEDLDAMKNLMPQAYDELVENCNILESHYKEMQDIEFTVQENRLWMLQCRTGKRTGKSAVKIAVDMVNEGLVEPRSAIKMVEPGHLDQLLHPQFENPSAYKDQVIATGLPASPGAAVGQVVFTAEDAEAWHSQGKAAILVRAETSPEDVGGMHAAVGILTERGGMTSHAAVVARWWGKCCVSGCSGIRVNDAEKLVTIGSHVLREGEWLSLNGSTGEVILGKQPLSPPALSGDLGTFMAWVDDVRKLKVLANADTPDDALTARNNGAQGIGLCRTEHMFFASDERIKAVRQMIMAPTLELRQQALDRLLTYQRSDFEGIFRAMDGLPVTIRLLDHPSYEFLPEGNIEDIVSELCAETGANQEDALARIEKLSEVNPMLGFRGCRLGISYPELTEMQARAIFEAAIAMTNQGVQVFPEIMVPLVGTPQELGHQVTLIRQVAEKVFANVGKTIGYKVGTMIEIPRAALVADEIAEQAEFFSFGTNDLTQMTFGYSRDDVGKFIPVHLAQGILQHDPFEVLDQRGVGELVKFATERGRKARPNLKVGICGEHGGEPSSVAFFAKAGLDFVSCSPFRVPIARLAAAQVLV

SEQ ID NO: 1709 - protein, 337 aa, Zea mays
MAKIKIGINGFGRIGRLVARVALQSDDVELVAVNDPFISTDYMTYMFKYDTVHGQWKHHEVKVKDSKTLLFGEKEVAVFGCRNPEEIPWGSVGAEYVVESTGVFTDQEKAAAHLKGGAKKVVISAPSKDAPMFVVGVNEKEYKSDINIVSNASCTTNCLAPLAKVINDKFGIVEGLMTTVHAITATQKTVDGPSSKDWRGGRAASFNIIPSSTGAAKAVGKVLPVLNGKLTGMSFRVPTVDVSVVDLTVRLEKSATYDEIKAAVKAEAEGSLKGILGYVEEDLVSTDFQGDSRSSIFDAKAGIALNGNFVKLVSWYDNEWGYSTRVVDLIRHMNSTK

SEQ ID NO: 1710 - protein, 802 aa, Zea mays
MAAKLTRLHSLRERLGATFSSHPNELIALFSRYVHQGKGMLQRHQLLAEFDALFDSDKEKYAPFEDILRAAQEAIVLPPWVALAIRPRPGVWDYIRVNVSELAVEELSVSEYLAFKEQLVDGQSNSNFVLELDFEPFNASFPRPSMSKSIGNGVQFLNRHLSSKLFQDKESLYPLLNFLKAHNYKGTTMMLNDRIQSLRGLQSSLRKAEEYLLSVPQDTPYSEFNHRFQELGLEKGWGDTAKRVLDTLHLLLDLLEAPDPANLEKFLGTIPMMFNVVILSPHGYFAQSNVLGYPDTGGQVVYILDQVRALENEMLLRIKQQGLDITPKILIVTRLLPDAAGTTCGQRLEKVIGTEHTDIIRVPFRNENGILRKWISRFDVWPYLETYTEDVSSEIMKEMQAKPDLIIGNYSDGNLVATLLAHKLGVTQCTIAHALEKTKYPNSDIYLDKFDSQYHFSCQFTADLIAMNHTDFIITSTFQEIAGSKDTVGQYESHIAFTLPGLYRVVHGIDVFDPKFNIVSPGADMSVYYPYTETDKRLTAFHPEIEELIYSDVENSEHKFVLKDKKKPIIFSMARLDRVKNMTGLVEMYGKNARLRELANLVIVAGDHGKESKDREEQAEFKKMYSLIDEYKLKGHIRWISAQMNRVRNGELYRYICDTKGAFVQPAFYEAFGLTVIESMTCGLPTIATCHGGPAEIIVDGVSGLHIDPYHSDKAADILVNFFDKCKADPSYWDEISQGGLQRIYEKYTWKLYSERLMTLTGVYGFWKYVSNLERRETRRYIEMFYALKYRSLASQVPLSFD

SEQ ID NO: 1711 - protein, 365 aa, Zea mays
MGKGAQGSDAAAAGGEVEENMAAWLVAKNTLKIMPFKLPPVGPYDVRVRMKAVGICGSDVHYLREMRIAHFVVKEPMVIGHECAGVVEEVGAGVTHLSVGDRVALEPGVSCWRCRHCKGGRYNLCEDMKFFATPPVHGSLANQVVHPADLCFKLPDGVSLEEGAMCEPLSVGVHACRRAGVGPETGVLVVGAGPIGLVSLLAARAFGAPRVVVVDVDDHRLAVARSLGADAAVRVSPRAEDLADEVERIRAAMGSDIDVSLDCAGFSKTMSTALEATRPGGKVCLVGMGHNEMTLPLTAAAAREVDVVGFRYKDTWPLCIDFLRSGKVDVKPLITHRFGFSQRDVEEAFEVSARGRDAIKVMFNL

SEQ ID NO: 1712 - protein, 366 aa, Zea mays
MGKGAQGSDAAAAGGEVEENMAAWLVAKNTLKIMPFKLPPVGPYDVRVRMKAVGICGSDVHYLREMRIAHFVVKEPMVIGHECAGVVEEVGAGVMHLSVGDRVALEPGVSCWRCRHCKGGRYNLCEDMKFFATPPVHGSLANQVVHPADLCFKLPDGVSLEEGAMCEPLSMGVHACRRAGVGPETGVLVVGAGPIGLVSLLAARAFGAPRVLVVDVDDHRLAVARSLGADAAVRVSPRVEDLADEVERIRAAMGSDIDVSLDCAGFSKTMSTALESTRPGGKVCLVGMGHNEMTLPLTAAAAREVDVVGVFRYKDTWPLCIDFLRSGKVDVKPLITHRFGFSQRDVEEAFEVSARGRDAIKVMFNL

SEQ ID NO: 1713 - protein, 389 aa, Zea mays
MSHRKFEHPRHGSLGFLPRKRSSRHRGKVKSFPRDDAKKPCHLTAFLGYKAGMTHIVREVEKPGSKLHKKETCEAVTIIETPPLVIVGLVAYVKTPRGLRTLNSVWAQHLSEEVRRRFYKNWCKSKKKAFTKYALKYENDAGKKEIQLQLEKMKKYASVIRVIAHTQIRKMKGLKQKKAHLMEIQVNGGTIADKVDYGYKFFEKEVPVDAVFQKDEMIDIIGVTKGKGYEGVVTRWGVTRLPRKTHRGLRKVACIGAWHPARVSYTVARAGQNGYHHRTEMNKKVYKIGKAGQETHDASTEFDRTEKDITPMGGFPHYGIVKGDYLMIKGCCVGPKKRVVTLRQSLLKQTSRLALEEIKLKFIDTSSKFGHGRFQTTDEKQRFFGKLKA

SEQ ID NO: 1714 - protein, 766 aa, Zea mays
MAAAAIPSKLATQVLIPVAAAVGIAFAVVQWVLVSKVRVTPERRADGGAVKSGPSDYLIEEEEGLNDHNVVVKCAEIQTAISEGATSFLFTEYKYVGLFMGIFAILIFLFLGSVEGFSTKSQPCHYIKDQTCKPALANAIFSTIAFVLGAVTSLVSGFLGMKIATYANARTTLEARKGVGKAFITAFRAGAVMGFLLAASGLLVLYIAINLFGIYYGDDWEGLFEAITGYGLGGSSMALFGRVGGGIYTKAADVGADLVGKVERNIPEDDPRNPAVIADNVGDNVGDIAGMGSDLFGSYAESSCAALVVASISSFGINHEFTPMVYPLLVSSVGIIACLITTLFATDFFEIKAVDEIEPALKKQLIISTIVMTIGIALISWLGLPYTFTIFNFGVQKTVQSWQLFLCVAVGLWAGLVIGFVTEYYTSNAYSPVQDVADSCRTGAATNVIFGLALGYKSVIIPIFAIAFSIFLSFSLAAMYGVAVAALGMLSTIATGLAIDAYGPISDNAGGIAEMAGMSHRIRERTDALDAAGNTTAAIGKGFAIGSAALVSLALFGAFVSRAAISTVDVLTPKVFIGLIVGAMLPYWFSAMTMKSVGSAALKMVEEVRRQFNNIPGLMEGTTKPDYATCVKISTDASIKEMIPPGALVMLTPLIVGILFGVETLSGVLAGALVSGVQIAISASNTGGAWDNAKKYIEAGVSEHARTLGPKGSDPHKAAVIGDTIGDPLKDTSGPSLNILIKLMAVESLVFAPFFAAHGGILFKWL

SEQ ID NO: 1715 - protein, 208 aa, Zea mays
MVSLKPQKRLAAGVLKCGKGKVWLDPNEVYEISMANSRQNIRKLVKDGFIIKKPQKIHSRSRARRAHEAKQKGRHSGYGKRRGTREARLPTKILWMRRMRVLRRLLRKYREAKKIDKHMYHDMYMKVKGNMFKNKRVLMESIHKSKAEKAREKTLSDQFEAKRAKSKASRERKIARREERLAQGPREPAAAPVSATAPFAAAPKKAKK

SEQ ID NO: 1716 - protein, 207 aa, Zea mays
MVSLKLQKRLAASYLKCGKGKVWLDPNEVSEISMANSRQNIRKLVKDGFIIKKPHKIHSRSRARRAHDAKQKGRHSGYGKRRGTREARLPTKVLWMRRMRVLRRLLRKYREAKKIDKHMYHDMYMKVKGNAFKNKRVLMESIHKSKAEKAREKTLSDQFEAKRAKSKASRERKIARREERLAQGPREITPPVSSTAPATGAPKKAKK

SEQ ID NO: 1717 - protein, 767 aa, Zea mays
MAAAAILPELGTQVLIPVAAAVGIAFSVLQWVLVSKVRLAPERRADGGGAVKSGPSDYLIEEEEGLNDHNVVVKCAEIQNAISEGATSFLFTEYKYVGLFMGIFAILIFLFLGSVEGFSTKSQPCHYSKDKTCKPALANAIFSTIAFVLGAVTSLVSGFLGMKIATYANARTTLEARKGVGKAFITAFRSGAVMGFLLAASGLLVLYIAINLFGIYYGDDWEGLFEAITGYGLGGSSMALFGRVGGGIYTKAADVGADLVGKVERNIPEDDPRNPAVIADNVGDNVGDIAGMGSDLFGSYAESSCAALVVASISSFGINHQFTPMVYPLLVSSVGIIACLITTLFATDFFEIKAVNEIEPALKKQLIISTVVMTIGIALISWLGLPYTFTIYNFGAQKTVQSWQLFLCVAVGLWAGLVIGFITEYYTSNAYSPVQVVADSCRTGAATNVIFGLALGYKSVIIPIFAIAFSIFLSFSLAAMYGVAVAALGMLSTIATGLAIDAYGPISDNAGGIAEMAGMSHRIRERTDALDAAGNTTAAIGKGFAIGSAALVSLALFGAFVSRAAISTVDVLTPKVFIGLIVGAMLPYWFSAMTMKSVGSAALKMVEEVRRQFNTIPGLMEGTTKPDYATCVKISTDASIKEMIPPGALVMLTPLIVGILFGVETLAGVLAGALVSGVQIAISASNTGGAWDNAKKYIEAGASEHARTLGPKGSDPHKAAVIGDTIGDPLKDTSGPSLNILIKLMAVESLVFAPFFAAHGGIIFKWL

SEQ ID NO: 1718 - protein, 204 aa, Zea mays; identical to SEQ ID NO: 567

SEQ ID NO: 1719 - protein, 765 aa, Zea mays
MAVLGTAAVEVLIPVAALVGIAFALLQWYVVARVPVPSHAGEDGGGGGNKNVREEEEHVEEDGMDYLLVEARCAEIQRAISVGATSFLLTEYKYLAVFTAAFAVVIFVFLGSAQRFSARPGPCAYDPSRECRPALANAAFSAVAFLLGAATSVLSGYLGMRVATFANARTALEARHGVGRAFAAAFRSGAAMGFLLASSALLVLYAAVNLFGLYYGDDWGGLYESITGYGLGGSSVALFGRVGGGIYTKAADVGADLVGKVERNIPEDDPRNPAVIADNVGDNVGDIAGMGSDLFGSYAESSCAALFVASISSFGAEHNLTAMMYPLLISAVGLLVCAITTVVATDVTEVKGSDEVGPALKRQILISTVLMTAGIAAVTFLALPPSFTLFDFGNDKHVKNWHLFICVSAGLWAGLVIGYVTEYFTSNAYGPVQAVARSCRTGAATNVIFGLAVGYKSVIVPIVAIAAAIYASFRLAAMYGIALAALGMLSTIATGLAIDAYGPISDNAGGIAEMAGMPHRVRERTDALDAAGNTTAAIGKGFAIGSAALVSLALFGAYVSRAGITAVDVLSPRVFVGLLLGAMLPYWFSAMTMRSVGSAALRMVEEVRRQFDTIPGLAEGLAVPDYATCVRISTDASLKKMMAPGALVMFSPLVAGTLFGVETLAGLLAGALVSGVQVAISASNSGGAWDNAKKYIEAGLSEEARSLGPKGSEAHKAAVIGDTIGDPLKDTSGPSLNILIKLMAVESLVFAPFFAAHGGIIFDHL

SEQ ID NO: 1720 - protein, 337 aa, Zea mays
MSWFGHHHHNQPAPPASGPNQVFKIFCRANENYCLAVRDGAVVLAPVNPKDDHQHWYKDMRFSTRVKDEEGMPAFALVNKATGLAIKHSLGQSHPVKLAPFSPDQEDASVLWTESKDVGKGFRCIRMVNNTRLNFDAFHGDKDHGGVHDGTAVVLWEWCKGENQSWKILPWGPEANSSAAHAGGPHAVRVFCKAGGEDYSLTVRNGTACLAPTNPRDEYQHWVKDMRHSTRVRDEEGYPAFALVNKVTGEALKHSTGQGHPVKLVPYNPDYQDESVLWTESRDVGNGFRCVRMVNNIYLNFDAFHGDKAHGGVHDGTEIVLWKWCEGDNQRWKILPW

SEQ ID NO: 1721 - protein, 447 aa, Zea mays
MGKEKSHINIVVIGHVDSGKSTTTGHLIYKLGGIDKRVIERFEKEAAEMNKRSFKYAWVLDKLKAERERGITIDIALWKFETTKYYCTVIDAPGHRDFIKNMITGTSQADCAVLIIDSTTGGFEAGISKDGQTREHALLAFTLGVKQMICCCNKMDATTPKYSKARYDEIVKEVSSYLKKVGYNPDKIAFVPISGFEGDNMIERSTNLDWYKGPTLLEALDQITEPKRPSDKPLRLPLQDVYKIGGIGTVPVGRVETGVIKPGMVVTFGPTGLTTEVKSVKMHHEALQEALPGDNVGFNVKNVAVKDLKRGFVASNSKDDPAKEAASFTSQVIIMNHPGQIGNGYAPVLDCHTSHIAVKFAELITKIDRRSGKELEKEPKFLKNGDAGMVKMIPTKPMVVETFSQYPPLGRFAVRDMRQTVAVGVIKSVEKKDPTGAKVTKAAAKKK

SEQ ID NO: 1722 - protein, 483 aa, Zea mays
MAAAIVLSGQVRPLPSSLPLSLLLLLLLCCSGTSWGWSTSRGGAARECGFDGKLEALEPRHKVQSEAGSVQYFSRFNEADRELTCAGIFAVRVVVDAMGLLLPRYSNVHSLVYIVQGRGIIGFSFPGCQEETQQQQYGYGYGYGHHHHQHDHHKIHRFEQGDVVAMPAGAQHWLYNDGDAPLVAVYVFDENNNINQLEPSMRKFLLAGGFSKGQPHFAENIFKGIDARFLSEALGVSMHVAEKLQSRRDQRGEIVRVEPEHGFHQLNPSPSSSSFSFPSSQVQYQTCQRDVDRHNVCAMEVRHSVERLDQADVYSPGAGRITRLTSHKFPVLNLVQMSAVRVDLYQDAIMSPFWNFNAHSAMYGIRGSARVQVASDNGTTVFDDVLRAGQLLIVPQGYLVATKAQGEGFQYIAFETNPDTMVSHVAGKNSVLSDLPAAVIASSYAISMEEAAELKNGRKHELAVLTPAGSGSYQQGQAGSAQQ

SEQ ID NO: 1723 - protein, 251 aa, Zea mays
MKFNIANPSTGCQKKLEIDDDQKLRAFYDRRISQEVSGDALGEEFKGYVFKIMGGCDKQGFPMKQGVLTSGRVRLLLHRGTPCFRGYGRRNGERRRKSVRGCIVSQDLSVINLVIVKKGENDLPGLTDTEKPRMRGPKRASKIRKLFNLNKDDDVRKYVNTYRRTFTTKNGKKVSKAPKIQRLVTPLTLQRKRARIADKKKRITKKKSEAAEYQKLLAQRLKEQRDRRSESLAKRRSKLSAAVKASAATSA

SEQ ID NO: 1724 - protein, 377 aa, Zea mays
MADGEDIQPLVCDNGTGMVKAGFAGDDAPRAVFPSIVGRPRHTGVMVGMGQKDAYVGDEAQSKRGILTLKYPIEHGIVSNWDDMEKIWHHTFYNELRVAPEEHPVLLTEAPLNPKANREKMTQIMFETFNVPAMYVAIQAVLSLYASGRTTGIVLDSGDGVSHTVPIYEGYALPHAILRLDLAGRDLTDSLMKILTERGYSFTTSAEREIVRDIKEKLAYIALDYEQELETAKNSSSVEKSYELPDGQVITIGAERFRCPEVLFQPSMIGMEAAGIHETTYNSIMKCDVDIRKDLYGNIVLSGGSTMFPGIADRMSKEITSLAPSSMKIKVVAPPERKYSVWIGGSILASLSTFQQMWISKEEYDESGPAIVHRKCF

SEQ ID NO: 1725 - protein, 377 aa, Zea mays
MCEEEDSTALVCDNGSGLCKAGFAGDDAPRAVFPSIVGRPRHQGVMVGMGQKDSYVGDEAQSKRGILTLKYPIEHGIITNWDDMEKIWHHSFYNELRVAPEEHPTLLTEAPLNPKANREKMTQIMFETFNVPAMYVAIQAVLSLYASGRTTGIVLDSGDGVTHNVPIYEGYALPHAIMRLDLAGRDLTDYLMKILTERGYSFVTTAEREIVRDIKEKLCYVALDFENEMATAASSSSLEKSYELPDGQVITIGNERFRCPETLFQPSFIGMESAGIHETTYNSIMKCDIDIRKDLYANNVLSGGTTMYPGIADRMQKEITALAPSTMKIKIIAPPERKYSVWIGGSILASLSTFQQMWISKQEYDEAGPSIVHRKCF

SEQ ID NO: 1726 - protein, 207 aa, Zea mays
MVSLKVPKRLAASVLKCGKGKVWLDPNEVSEISMANSRHNIRKLVKDGFIIKKPQKIHSRSRARRAHEAKQKGRHSGYGKRRGTREARLPTKVLWMRRMRVLRRLLRKYREAKKIDKHMYHDMYMKVKGNSFKNKRVLMESIHKSKAEKAREKTLSDQFEARRAKSKASRERKNARREERLAQGPREIPPPVSATAPTTGAPKKAKK

SEQ ID NO: 1727 - protein, 246 aa, Zea mays
MSTEEAVVAEVPVTEVPAEVPAAQVAEAPKAKKAPKEKKAPKEKKPSAAKKPAAHPPYAEMIVEAIAALKERKGSSSVAISKYVEGKHGGKLPTNFRKQLTVQLKKLAAAGKLTRVKNSFKLPATDAKPKAAKPKAPKAAPKPKPSPKAKAKTAAKPKAASPKPKAKAKAKAKPVAPAAASPKPRGRPPKVAKTSAKASPAKAAKKAAAPAKKGKAAAAPKKVATPKKAAAAAAPVRKGVARKAKK

SEQ ID NO: 1728 - protein, 355 aa, Zea mays
MSAYCGKYKDELIKNAAYIGTPGKGILAADESTGTIGKRLSSINVENVEENRRALRELLFCCPGALQYISGVILFEETLYQKTKDGKPFVDVLKEGGVLPGIKVDKGTIEVVGTDKETTTQGHDDLGKRCAKYYEAGARFAKWRAVLKIGPNEPSQLAIDLNAQGLARYAIICQENGLVPIVEPEILVDGPHDIDRCAYVTETVLAACYKALNEHHVLLEGTLLKPNMVTPGSDSKKVTPEVIAEYTVRTLQRTVPAAVPAVLFLSGGQSEEEATRNLNAMNKLSTKKPWSLSFSFGRALQASTLKAWAGKVENLEKARAAFLARCKANSEATLGTYKGDAAADTESLHVKDYKY

SEQ ID NO: 1729 - protein, 377 aa, Zea mays
MADAEDIQPLVCDNGTGMVKAGFAGDDAPRAVFPSIVGRPRHTGVMVGMGQKDAYVGDEAQSKRGILTLKYPIEHGIVSNWDDMEKIWHHTFYNELRVAPEEHPVLLTEAPLNPKANREKMTQIMFETFNTPAMYVAIQAVLSLYASGRTTGIVLDSGDGVSHTVPIYEGYALPHAILRLDLAGRDLTDYLMKILTERGYSFTTTAEREIVRDMKEKLAYIALDYDQEMETAKTSSSVEKSYELPDGQVITIGAERFRCPEVLFQPSFIGMEAAGIHETTYNSIMKCDVDIRKDLYGNIVLSGGTTMFPGIADRMSKEITALAPSSMKIKVVAPPERKYSVWIGGSILASLSTFQQMWIAKAEYDESGPSIVHRKCF

SEQ ID NO: 1730 - protein, 459 aa, Zea mays
MAPANVRAAQAQAPSADRRLSTLVGHLLPSSPRRAAADTSATSTLESFPTMASQGSSVFAALEQAPEDPILGVTVAYNKDPSPVKVNLGVGAYRTEEGKPLVLNVVRRAEQMLINNPSRVKEYLPITGLAEFNKLSAKLIFGADSPAIQENRVATVQCLSGTGSLRVGGEFLARHYHERTIYIPQPTWGNHPKVFTLSGLNVRSYRYYDPATCSLHFEGLLEDLGSAPSGSIVLLHACAHNPTGVDPTIEQWEQIRQLMRSKSLLPFFDSAYQGFASGSLDKDAQSVRMFVADGGELLMAQSYAKNMGLYGERVGALSIVCKSADVAVRVESQLKLVIRPMYSNPPLHGASIVATILRDSEMFNEWTLELKAMADRIINMRQQLFNALKSRGTPGDWSHIIKQIGMFTFTGLNSEQVAFMRQEYHIYMTSDGRISMAGLSMRTVPHLADAIHAAVTQLK

SEQ ID NO: 1731 - protein, 172 aa, Zea mays
MANPRVFFDMTVGGAPAGRIVMELYANEVPKTAENFRALCTGEKGVGKSGKPLHYKGSTFHRVIPEFMCQGGDFTRGNGTGGESIYGEKFPDEKFVRKQPAPGVLSMANAGPNTNGSQFFICTVATPWLDGKHVVFGQVVEGMDVVKAIEKVGTRNGSTSKVVKVADCGQLS

SEQ ID NO: 1732 - protein, 155 aa, Zea mays
MQIFVKTLTGKTITLEVESSDTIDNVKAKIQDKEGIPPDQQRLIFAGKQLEDGRTLADYNIQKESTLHLVLRLRGGAKKRKKKTYTKPKKIKHKHKKVKLAVLQFYKVDDATGKVTRLRKECPNTECGAGVFMANHFDRHYCGKCGLTYVYNQKA

SEQ ID NO: 1733 - protein, 403 aa, Zea mays
MVAVNRPLVSVKALEGDMVTDAPGIALPPVFGAPIRPDVVRFTHKLLSCNKRQPYAVSRRAGHQTSAESWGTGRAVSRIPRVPGGGTHRAGQGAFGNMCRGGRMFAPTKIWRKWHRRVNINLRRVAVASALAATAVPALVQARGHRIESVPEMPLVISDSAESIEKTSQALKILKQIGAHADAEKAKDSVGIRPGKGKMRNRRYINRKGPLIVYGTEGSKVVKAFRNLPGVDVANVERLNLLDLAPGGHLGRFVIWTQSAFNKLEEVYGSYDAPSQKKKGFVLPRPKMSNADLGRIINSDEVQSVVKPLNKEVKRREKRKNPLKNMAAVLKLNPYLGTARKMATLAEAARVKARKAKLDSKRTKLTPETAKVKAAGKAWYKTMVSDSDYTEFENFSKWLGVTQ

SEQ ID NO: 1734 - protein, 414 aa, Zea mays
MAGMAPEGSQFDAKHYDSKMQELLSTGETEEFFTSYDEVFESFDDMGLQENLLRGIYAYGFEKPSAIQQRGIVPFCKGLDVIQQAQSGTGKTATFCSGILQQLDYGLVECQALVLAPTRELAQQIEKVMRALGDYLGVKVHACVGGTSVREDQRILGSGVHVVVGTPGRVFDMLRRQSLRPDNIKMFVLDEADEMLSRGFKDQIYDIFQLLPAKIQVGVFSATMPPEALEITRKFMNKPVRILVKRDELTLEGIKQFYVNVDKEDWKLDTLCDLYETLAITQSVIFVNTRRKVDWLTDKMRSRDHTVSATHGDMDQNTRDIIMREFRSGSSRVLITTDLLARGIDVQQVSLVINYDLPTQPENYLHRIGRSGRFGRKGVAINFVTRDDERMLFDIQKFYNVLIEELPANVADLL

SEQ ID NO: 1735 - protein, 156 aa, Zea mays
MAASDVEYRCFVGGLAWATDDHSLHNAFSTYGEVLESKIILDRETQRSRGFGFVTFSTEEAMRNAIEGMNGKELDGRNITVNEAQSRGGRGGGGGGYGGGRGGGGYGGGGRRDGGGGYGGGGGGYGGGGGYGGGGGGYGGGNRGGGYGNSDGNWRN

SEQ ID NO: 1736 - protein, 659 aa, Zea mays
MGKSSKKAAAVAAAPAAVPKGKKREAEEEIEKAVSAKKQKAAPPAKAVPTSKKDAKKSKKQPPPKKAESSSSDSEEDSESEEEVKKVQPKKAPAPKIAKQESSDDDTSDETSESDEEPAKKPAAKPLAAVAKNGSKTVKQESSSDEDSSEDESDDDSDDEPAKKAAAKPLGAVAKNGLKKGKQESSSDGSSSDDESDDDVKPAAPLKKTSVAVAQKKKGDSSESDSDDDSDEEVPPKSKAPAATIKKEDSSESESESDSEVEDASKTQPAKRAASKMKDESSDDSDTDEDEEPPQKKQKEALSAAKKESSSEDEDDSSEESSDDEPTKVEEKKAPKVSENSGSEDESSEDESDKDSEEPANTPKKAAVHASEKKTATKEPKTPTGSQSESTEVNTLFMGNVPWKAEFDDVKEFFEDVGEVVDVRFPTHDDGNRKGFCYVEFVSAEAAAKAYKEKQSKELHGREVRLDFAKGRSTQTPRSGNDGSFQKAARGNSSSIFIRGFDKNLSEDEIRSSLEQHFSDCGEMTRVSIPTDHESGAIKGMAYIDFKDQDSVSKALELSGSDIGGGYELYVDEAKPRGDGQRGGGRSGGRSGGRFGDRSGGRRGGGRFGERSGGRDGGGRFGGRRGGRDGGRGRGGRGFGNKHSAGTPSAGKKTTFGDD

SEQ ID NO: 1737 - protein, 1293 aa, Zea mays
MGRKKNVAIDDDEYFFPQDDAADPAPPPPAPAAADKEKSKKGGKKGKKGGKAAAPDDDDYEPPPPPPPAADEDDDGEPINLVFTGKKKKKKGATPAAPFSAFSALGEEGEDQDEEDPAPSAAAEPEAINDPAEDDDDVVDFDFSKAKKKKKKDKGPRSAPAKDEDVEPAPPPPPVAEEEDEEPPVIAAAAAKKPQKKKKKKGAFMMDGENVDQILAGMEDPQLMDEPEPEEVKAQDSVAAPDADDATGKKSKKKKKKGGFTMDVDGEEFDQILAVIDDLPPPEEEPEPKDPKDEGTAATAALVDDAEGKKSKKKKKKSGRTAKEEEELDKILAELDGVPPVEEDKPTQAPQSAALAKEDVGAAEDGNVEDKAEEGGEVESAAAKKKKKKKEKEKEKKAAAKGAESKKGEEQEAPKGKVDMKKLPKHVREMQEALARRKEAEERQKREEEERLRKEEEERLRREEEERKAEEAKRRRKEREKEKLLKKKQEGKLLTGKQKEEAKRLEAMRRQFLEQSELQKAEDAAPETKKRPIYDSKKKKAQSKATETAKVVEEQQEELNEVNNDEEEYVLVDQESQSQVEESDEKTEPDQETEEPKPEEDEEDEDEWDAKSWDDIDVNLPKISAFDEEEAKPIVKKAEPVQKQENNKAQPAIPAAKKLVPSVADSKKSETDDVGASNGNVKRHKKKGPVKEDNSKSGSDLRSPICCILGHVDTGKTKLLDCIRRTNVQEGEAGGITQQIGATYFPTENIRERTRELKADATLKVPGLLVIDTPGHESFSNLRSRGSSLCDIAILVVDIMHGLEPQTIESLNLLKSRDAVFIVALNKVDRLYGWKKCPNAPIVKALKQQNEDVKREFNMRLTDIVTQFKMQGVNTALYYKNKEMEDTFNIVPTSAVSGEGIPDLLLLLVQWTQKTMEEKLTFVDEVQCTVLEVKVVEGHGTTIDVVLVNGILHEGDQIVVCGMQGPIVTTVRALLTPHPMRELRVKGTYIHHKEIRAAQGVKISAQGLEHAIAGTALYVLGPDDDLDKLNEAVMEEMTRVRSRIDRSGEGVYVQASTLGSLEALTEFLKSPAVNIPFCDFSIGPVHKKDVMKASVMLERKKEYATILAFDVKVMPDARDLAEESGVRIFVADIIYHLFDQFTAYIKNLKEEKKKESAEEAVFPCVLKIMPNCVFNKKDPIVLGVDVLEGIAKVGTPLCIPSKEFIDIGKIASVEINHKQVDMATKGQKVAIKIIANNSDEQQRSFGRHFDMEDELVSRISRRSIDILKQNYREDLTTEDWKLVVKLKSILKIQ

SEQ ID NO: 1738 - protein, 152 aa, Zea mays
  MOD_RES (33)..(35): Any amino acid
MAPKAEKKPAAKKPAEEEPAAPAEKAPAGKKPXXXKRLPAGKSAGKEGGVDKKGRKKAKKSVETYKIYIFKVLKQVHPDIGISSKAMSIMNSFINDIFEKLAGEAAKLARYNKKPTITSREIQTSVRLVLPGELAKHAVSEGTKAVTKFTSS

SEQ ID NO: 1739 - protein, 206 aa, Zea mays
MAKIAAAAAAALCFAALVAVAVCQGEVERQRLRDLQCWQEVQESPLDACRQVLDRQLTGGGGGGGVGPFRWGTGLRMRCCQQLQDVSRECRCAAIRSMVRGYEEAMPPLEKGWWPWGRQQQPPPQGGGGGQGGYYYPCSRPGEGYGYGQGGQRQMYPPCRPGTTGGGPRIGRVRLTKAREYAAGLPMMCRLSEPQECSIFSGGDQY

SEQ ID NO: 1740 - protein, 253 aa, Zea mays
MGRKFFVGGNWKCNGTTDQVEKIVKTLNEGQVPPSDVVEVVVSPPYVFLPVVKSQLRQEFHVAAQNCWVKKGGAFTGEVSAEMLVNLGVPWVILGHSERRALLGESNEFVGDKVAYALSQGLKVIACVGETLEQREAGSTMDVVAAQTKAIAEKIKDWSNVVVAYEPVWAIGTGKVATPAQAQEVHASLRDWLKTNASPEVAESTRIIYGGSVTAANCKELAAQPDVDGFLVGGASLKPEFIDIINAATVKSA

SEQ ID NO: 1741 - protein, 269 aa, Zea mays
MATEVAETPAPLAEAVPETPAEAPAAPAAEANSTKAKKASAPKKRANPTHPPYAEMISEAVTSLKERTGSSQYAIAKFVEDKHKDKLPPNFRKLLLGQLKKLVAAGKLTKVKNSYKLPARAPAAAKPKPKSKTAVKKPKAGAKKPKAATKPKPKAKAKSPAKAKPAAKPKAAAKPKPAAAKPKAAAKPKAKPAAKAKPKAVAAKPKPAAKKAGRPAKAAKTSAKDTPGKKAAPAKKPAAAAKKAPAKKAAPAKKAPTPSRKVPSRKAKK

SEQ ID NO: 1742 - protein, 261 aa, Zea mays
MASAELSREENVYMAKLAEQAERYEEMVEFMEKVAKTVDSEELTVEERNLLSVAYKNVIGARRASWRIISSIEQKEEGRGNEDRVTLIKDYRGKIETELTKICDGILKLLETHLVPSSTAPESKVFYLKMKGDYYRYLAEFKTGAERKDAAENTMVAYKAAQDIALAELAPTHPIRLGLALNFSVFYYEILNSPDRACSLAKQAFDEAISELDTLSEESYKDSTLIMQLLRDNLTLWTSDISEDPAEEIREAPKRDSSEGQ

SEQ ID NO: 1743 - protein, 307 aa, Zea mays
MAAATPSPHSARVAVVTGGNKGIGLEVCRQLASNGITVVLTARDEKRGAAAVEELADAGLSGVVFHQLEVTDAQSIARLAGFLKAWFGKLDILVNNAAIGGVQSLPVENVGEKIKGMDASQMAELMWKSCRETNDAAKAGVQTNYYGVKNVTEALLPLLLQASSSGGGRVVNVSSDFGLLRYLRNEEVKRELDDIEGLTEERLDELLSTFLRDFEAGALESRGWPTEFAAYKVAKAALNSYSRVLARRHPELRVNCAHPGYVKTDMTRQTGLLTPAQGAANVVKVALLPEGGPTGAFFALGKEAPFV

SEQ ID NO: 1744 - protein, 308 aa, Zea mays
MKLVLVVLAFIALVSSVSCTQTGGCSCGQQQSHEQQHHPQQHHPQKQQHQPPPQHHQQQQHQQQQVHMQPQKHQQQQEVHVQQQQQQPQHQQQQQQQQHQQQHQCEGQQQHHQQSQGHVQQHEQSHEQHQGQSHEQQHQQQFQGHDKQQQPQQPQQYQQGQEKSQQQQCHCQEQQQTTRCSYNYYSSSSNLKNCHEFLRQQCSPLVMPFLQSRLIQPSSCQVLQQQCCHDLRQIEPQYIHQAIYNMVQSIIQEEQQQQPCELCGSQQATQSAVAILTAAQYLPSMCGLYHSYYQNNPCSSNDISGVCN

SEQ ID NO: 1745 - protein, 344 aa, Zea mays
MFGFGHHGQNPPAHGGVHQPTFKIFCKSDEGYCLTVRDGNVVLAPANPRDEHQHWYKDMRFSTQVKDEEGNPAFALVNKATGLAIKHSLGQSHPVKLVPFNPEYQDESVLWTESGDVGKGFRCIRMVNNIRLNFDAFHGDKGHGGVHDGTTVVLWEWAKGDNQSWKILPWGDEAYAAGGSSAANAPRFGGGGEPTVRIYCKADEGFSATVRNGAVCLAPTNPRDEYQHWIKDMRHSNSVKDEEGYPAFALVNRVTGEAIKHSQGEGHPVKLVPYNPGYQDESVLWTESRDVGHGFRCVRMVNNIYLNFDAFHGDKDHGGVRDGTNIVLWKWCEGDNQRWKIVPW

SEQ ID NO: 1746 - protein, 1325 aa, Zea mays
MEAEVSAPADLKAPDKTTVHGDDKENIPNGNANLQVKEADNDEDDGTRSDGFELIDVKQNFDSARVEEEMAAPRSTTVDTSPVTEESETQEDKTTAHEEQSVATNTRHLESSMLNQQTEQLEKLTMRIEELESENDKLVKDLTEAENKQSLHYSCLQEAQCSLAMKDKELAEVTESLKDLGSELGTSKKRIQEIEAELDSSADKLCKLEELKDERSLHAAQEAKRASELDKMLELAQSNMKEMEKHIGSLQEEVKGYQDKAADHQQIEESLRNTISELKVVQEALELSKSQVENLKQKLASQDTDFSKLTEELNLHCSSEESLKEKSLKLETELTTVLEELQAKGGLDKLKDENKTLQGSLVDLNSKLSEKDSILHQAEDELSKAQLVLLEALSQKEELELNLNSLSEQHGKSKAFGENANQKILDLEAQIQAMHAAEQALKFELKEAEASVQAAEKKGSDLEQQLSEIENKFVKSSEEIELLKERIQQEAAVSAERGMQLQETVTSVEGYKEKIIELQSSLGSSVSKNQLLEQEVMELTDKCSEHQEQAHSVRQRSLELEDLLHTSKTHAEGVYSRTQELEQELNNTYEMFKGVEEELEQYRSKASQLSDDLEAYQTKAASLEAVVEAASEKEKEFMESLSQITEEKKKTESRNAEIEAQLQEALEAVGQKEAESRNLNEKLVALESEIESSMHVNEALKQEINAKLVMVDELQEKCSFISSEKEEVAEKLSIHEEKLEHLTEEHSRGLELLSVAESRNKETESQLREVLEKLAQKEAEVTDLTEKLALLEAENEKMTCLNEALKEVDAKLVMFDELQERFSSTLAEKEEAAEKLAVHERTISQLTEVHTRTLELHSVAESKNEEIGAQFLEALETISQKEGEVKESSSQKIKILEEQLAETHSKVEHFLTEKESLVQETSSLNKEFEVHQNKLNDLQLALAAALAEKEAAFEEIHSLCKTLDGMIEHKAELEIQVSSTIQEHEELKSKYQNTMEEKQMLSDKYETAKKELEDAIAKLEEEMNVDKSEKESHISKLERQITLSEIKYMEEIKTMQVETTEKNEALTAKMQEHTDLQHEKHELEQQLLEVRKELDGAYHTIVNQEEQASLREIKWDTFRIYSEDRLEAEQQRAEELELQVAALKQQLQEAEEEQVSLREVQWEGDQNHSLNELKSQRQYATDLEKQIEDLTQKLRSADAHYKQKATEERDKLAEITTEFSKLTHKVSKSVELEKKVQDLEQKLQLAYSKSDEQATDVLESRSREFSLDSLSSLVKQQDRTQAADKASPSPTLQEVQEPSGTMAFKFILGVALLSVLAGVFLGKRY

SEQ ID NO: 1747 - protein, 94 aa, Zea mays; identical to SEQ ID NO: 637

SEQ ID NO: 1748 - protein, 223 aa, Zea mays
MRVLLVALALLALAASATSTHTSGGCGCQPPPPVHLPPPVHLPPPVHLPPPVHLPPPVHLPPPVHLPPPVHVPPPVHLPPPPCHYPTQPPRPQPHPQPHPCPCQQPHPSPCQLQGTCGVGSTPILGQCVEFLRHQCSPTATPYCSPQCQSLRQQCCQQLRQVEPQHRYQAIFGLVLQSILQQQPQSGQVAGLLAAQIAQQLTAMCGLQQPTPCPYAAAGGVPH

SEQ ID NO: 1749 - protein, 208 aa, Zea mays
MVKHNNVIPNGHFKKHWQNYVKTWFNQPARKQRRRIARQKKAVKIFPRPTAGPLRPIVQCQTLKYNMKSRAGRGFTLEELKAAGIPKKLAPTIGISVDHRRKNKSLEGLQANVQRLKTYKAKLVIFPRRAHKVKAGDSTPEELATATQVQGDYMPFTRGEKRSVEVVKVTDEMKSFAAYGKLRLERMNKKHLGARQKKAAEAEKEDKK

SEQ ID NO: 1750 - protein, 485 aa, Zea mays
MALSVEKTSSGREYKVKDLSQADFGRLEIELAEVEMPGLMACRAEFGPSKPFAGARISGSLHMTIQTAVLIETLTALGAEVRWCSCNIFSTQDHAAAAIARDSAAVFAWKGETLEEYWWCTERCLDWGEAGGPDLIVDDGGDATLLIHEGVKAEEEYEKTGKIPDPESTDNAEFKIVLTIIRDGLKADPKKYRKMKERLVGVSEETTTGVKRLYQMQETGALLFPAINVNDSVTKSKFDNLYGCRHSLPDGLMRATDVMIAGKVAVVCGYGDVGKGCAAALKQAGARVIVTEIDPICALQALMEGLQVLPLEDVVSEADIFVTTTGNKDIIMVDHMRKMKNNAIVCNIGHFDNEIDMLGLETYPGVKRITIKPQTDRWVFPETNTGIIVLAEGRLMNLGCATGHPSFVMSCSFTNQVIAQLELWKEKSSGKYEKKVYVLPKHLDEKVAALHLGKLGAKLTKLTKSQADYISVPIEGPYKPAHYRY

SEQ ID NO: 1751 - protein, 544 aa, Zea mays
  MOD_RES (115)..(115): Any amino acid
  MOD_RES (274)..(274): Any amino acid
MALYLLFESASGYGLFHAYGIDEIGQSVEAVRSSVLDLDRFGKAVKLTAFNPFSSAVDALNQCNAYIRRIMTDELRSFLELNLPKPKEGKKAKYSLGVVEPKVGSHISEVTGIPXQSNEFVQELLRGVRLHFDRFINELKDSDLEKAQLGLGHSYSRAKVKFNVNRVDNMVIQAIFLLDTLDKDINSFSMRVREWFSWHFPELVKIVNDNYLYAKLAKFIVNKSDLTEKDIPALADIVGDEDKAKEIVEAAKASMGQDLSPVDLINVQQFAQRXMNLSEYRKNLYEYLVTKMNDIAPNLTSLIGEVVGARLISHAGSLSNLAKCAASTLQILGAEKALFRALKTRGNTPKYGLIFHSSFIGRASTKNKGRMARYLANKCSIASRIDCYSEASTSVFGQKLREQVEERLEFYDKGVAPRKNLDVMKAAIDSMVNGTSMDDDDIEKTDASPKKSKKKKTKTKADGDAMDVDKPSNVAGGEAEPGTEKKKKKKKHKLEEEAQEENGAADTTPKKKKKKSREASEEAEPKTATDGKKKKKKAKAEDDE

SEQ ID NO: 1752 - protein, 2366 aa, Zea mays
MWNGVPPPPPPPLQMAAAPPPPGTTVPGAGQPPPPPPPPAGASQGGKPLTPMELEAQLVEKARKWHQLNSKRYGDKRKFGFVEAQKEDMPPEHVRKITRDHGDMTSKKYRHDKRVYLGALKFVPHAVYKLLENMPMPWEQVRHVKILYHITGAITFVNEIPWVVEPIYLAQWGTMWIMMRREKRDRRHFKRMRFPPFDDEEPPLDYADNLLDVEPLEAIQLELDEEEDAAVYEWFYDHKPLMKTKLINGPSYRKWHLSLPIMATLYRLAGQLLSDLIDRNYFYLFDMESFFTAKALNMCIPGGPKFEPLYRDMEKGDEDWNEFNDINKLIIRQPLRTEYRIAFPHLYNNRPRKVKLGIYHTPMIMYIKTEDPDLPAFYYDPLINPITSTNKVDRRERKAAEEEDDEDFCLPEDVEPLLKQTELYTDTTAAGISLLFAPKPFNMRSGRTRRAEDIPLVSEWYKEHCPPAYPVKVRVSYQKLLKCYVLNELHHRPPKAQKKKHLFRSLQATKFFQTTELDWAEAGLQVCKQGYNMLNLLIHRKNLNYLHLDYNFNLKPVKTLTTKERKKSRFGNAFHLCREILRLTKLVVDANIQFRLGNVDAFQLADGLQYIFSHVGQLTGMYRYKYRLMRQIRMCKDLKHLIYYRFNTGPVGKGPGCGFWAPMWRVWLFFLRGIVPLLERWLGNLLARQFEGRHSKGVAKTVTKQRVESHFDLELRAAVMHDVLDAMPEGIKQNKARTILQHLSEAWRCWKANIPWKVPGLPVPIENMILRYVKSKADWWTNVAHYNRERIRRGATVDKTVCRKNLGRLTRLWLKAEQERQHNYLKDGPYVTPEEAVAIYTTTVHWLESRKFSPIPFPPLSYKHDTKLLILALERLKESYSVAVRLNQLQREELGLIEQAYDNPHEALSRIKRHLLTQRAFKEVGIEFMDLYSYLIPVYEIEPLEKITDAYLDQYLWYEGDKRHLFPNWVKPADSEPPPLLVYKWCQGINNLLDIWDTSDGQCVVMLQTKFEKFFEKIDLTLLNRLLRLVLDHNIADYVTAKNNVVLSYKDMSHTNSYGLIRGLQFASFVVQYYGLVLDLLILGLTRASEIAGPPQMPNEFLTYADTKVETRHPIRLYSRYIDKVHILFRFTHEEARDLIQRYLTEHPDPNNENMVGYNNKKCWPRDARMRLMKHDVNLGRSVFWDMKNRLPRSITTLEWENNFVSVYSKDNPNLLFSMCGFEVRILPKIRMTQEAFSNTKDGVWNLQNEQTKERTAIAFLRVDDEHMKVFENRVRQILMSSGSTTFTKIVNKWNTALIGLMTYFREATVHTQELLDLLVKCENKIQTRIKIGLNSKMPSRFPPVIFYTPKEIGGLGMLSMGHILIPQSDLRYSKQTDVGVTHFRSGMSHEEDQLIPNLYRYIQPWESEFIDSQRVWAEYALKRQEAQSQNRRLTLEDLEDSWDRGIPRINTLFQKDRHTLAYDKGWRVRTDFKQYQVLKQNPFWWTHQRHDGKLWNLNNYRTDVIQALGGVEGILEHTLFKGTYFPTWEGLFWEKASGFEESMKYKKLTNAQRSGLNQIPNRRFTLWWSPTINRANVYVGFQVQLDLTGIFMHGKIPTLKISLIQIFRAHLWQKIHESVVMDLCQVLDQELDALEIETVQKETIHPRKSYKMNSSCADILLFAAHRWTMSKPSLVSESKDVFDQKASNKYWIDVQLRWGDYDSHDVERYTRAKFMDYTTDNMSIYPSPTGVMIGIDLAYNLHSAFGNWFPGSKPLLQQAMNKIMKSNPALYVLRERIRKGLQLYSSEPTEPYLSSQNYGEIFSNQIIWFVDDTNVYRVTIHKTFEGNLTTKPINGAIFIFNPRTGQLFLKVIHTSVWAGQKRLGQLAKWKTAEEVAALVRSLPVEEQPKQIIVTRKGMLDPLEVHLLDFPNIVIKGSELQLPFQACLKIEKFGDLILKATEPQMVLYNIYDDWLKSISSYTAFSRIVLILRALHVNNEKAKMLLKPDKTIVTEPHHIWPTLNDEQWLKVECALRDLILSDYAKKNNVNTSALTQSEMRDIILGAEIAPPSQQRQQIAEIEKQSRETTQLTAVTTRTTNVHGDELIITTTSPYEQQAFASKTDWRVRAISATNLYLRVNHIYVNSDDIKETGYTYIMPKNILKKFICIADLRTQIAGFLYGLSPQDNPQVKEIRCIAMPPQHGTHQMVTLPANLPEHEFLNDLEPLGWMHTQPNEAPQLSPQDLTSHAKILENNKQWDGEKCIILTCSFTPGSCSLTAYKLTPSGYEWGRSNKDNGSNPHGYLPTHYEKVQMLLSDRFLGFYMVPDNAPWNFNFMGVKHDPQMKYNMKLGMPRDFYHEDHRPTHFLEFSNIEEGEAAEGDREDTFT

SEQ ID NO: 1753 - protein, 103 aa, Zea mays
MSGRGKGGKGLGKGGAKRHRKVLRDNIQGITKPAIRRLARRGGVKRISGLIYEETRGVLKIFLENVIRDAVTYTEHARRKTVTAMDVVYALKRQGRTLYGFGG

SEQ ID NO: 1754 - protein, 135 aa, Zea mays; identical to SEQ ID NO: 575

SEQ ID NO: 1755 - protein, 155 aa, Zea mays
MASSSSSSHRRLILAAAVLLSVLAAASASAGTSCVPGWAIPHNPLPSCRWYVTSRTCGIGPRLPWPELKRRCCRELADIPAYCRCTALSILMDGAIPPGPDAQLEGRLEDLPGCPREVQRGFAATLVTEAECNLATISGVAECPWILGGGTMPSK

SEQ ID NO: 1756 - protein, 149 aa, Zea mays
MESTFIMIKPDGVQRGLIGEIISRFEKKGFYLKALKLVNVERSFAEKHYADLASKPFFQGLVDYIISGPVVAMVWEGKSVVTTGRKIIGATNPLASEPGTIRGDFAVDIGRNVIHGSDSIESANKEIALWFPEGPADWQSSQHPWIYEK

SEQ ID NO: 1757 - protein, 221 aa, Zea mays
MALPNQGTVDYPSFKLVIVGDGGTGKTTFVKRHLTGEFEKKYEPTIGVEVHPLDFTTNCGKIRFYCWDTAGQEKFGGLRDGYYIHGQCAIIMFDVTSRLTYKNVPTWHRDLCRVCENIPIVLCGNKVDVKNRQVKAKQVTFHRKKNLQYYEISAKSNYNFEKPFLYLARKLAGDPNLHFVEAVALKPPEVTIDMAMQQQHEAELAAAAAQPLPDDDDDLIE

SEQ ID NO: 1758 - protein, 261 aa, Zea mays
MATDVAETPAPLVDAAPEAPADAPAAPAADAKPAKAKKATAPKKRASPTHPPYAEMVSEAITSLKERTGSSSYAIAKFVEDKHKDKLPPNFRKLLNVQLKKLVAGGKLTKVKNSYKLSSAATKPNPKPKAAPKKPKTGAKKPKAAAKTKAKTPAKAKPATKPKPAAKPKAVVKPKTPAKPKAKPAAKAKPKTAGAKPKPLAKKAGRPAKAAKTSAKDTPGKKAPVAKKSAAAAKKAPAKKAAPSKKAATPVRKAPSRKAKK

SEQ ID NO: 1759 - protein, 265 aa, Zea mays
MARGLKKHLKRLNAPKHWMLDKLGGAFAPKPSSGPHKSRECLPLILIIRNRLKYALTYREVISILMQRHVLVDGKVRTDKTYPAGFMDVISIPKTNENYRLLYDTKGRFRLHPIRDEDAKFKLCKVRSVQFGQKGIPYLNTYDGRTIRYPDPLIKANDTIKIDLETNKIVDFIKFDVGNVVMVTGGRNTGRVGVIKNREKHKGSFETIHVEDSLGHQFATRMGNVFTIGKGNKPWVSLPKGKGIKLSIIEEQRKRDAAAQAAANA

SEQ ID NO: 1760 - protein, 304 aa, Zea mays
  subsp. parviglumis
MAETNPESSDLMAQTNKKIVPKFTEIFPVEDVNYPYSAFIASVRKDVIKHCTDHKGIFQPVLPPEKKVPELWFYTELKTRTSSITLAIRMDNLYLVGFRTPGGVWWEFGKNGDTHLLGDNPRWLGFGGRYQDLIGNKGLETVTMGRAEMTRAVNDLAKKKKMATLEEEEVQMQMQMPEAAELAAAAAAADPQADTKSKLVKLVVMVCEGLRFNTVSRTVDAGFNSQHGVTLTVTQGKQVQKWDRISKAAFEWADHPTAVIPDMKKLGIKDKNEAARIVALVKNQTTAAAAAATAASADNDDDEA

SEQ ID NO: 1761 - protein, 363 aa, Zea mays
MAAVDLTPRTPKKAYGGDGGAYYEWSPADLPMLSVASIGAAKLSLAAGGLSLPSYSDSAKVAYVLQGAGTCGLVLPEATKEKVVAVKEGDALALPFGAVTWWHNGPAAQADLTVLFLGDTSKGHKRGQFTNFQLTGSAGIFTGLSTEFVSRAWDLPEPDAARLVSSQPASGIVKLPASAAALPAPSPQDRAGVALNCLEAPLDVDIPGGGRVVVLNTANLPLVREVGLGADLVRIDAHSMCSPGFSCDSAYQVTYIVRGSGRVQVVGPDGRRVLETRIEGGSLFIVPRFHVVSKIADASGMEWFSIITTPNPVFSHLAGKTSVWKAISPEVLQASFNTTPEMEKLFRSKRLDSEIFFAPPSSN

SEQ ID NO: 1762 - protein, 411 aa, Zea mays
MAALSAPLRAVAAGSRVAASDPVKVSCVRSTGSAHFGCAFPYIRASSSAARNLEPLRAIATQAPPAMPQYSSGEKTKIGINGFGRIGRLVLRIATSRDDIEVVAVNDPFIDAKYMAYMFKYDSTHGPFKGSIRVVDDSTLEINGKKVTITSKRDPAEIPWGNFGAEYVVESSGVFTTTDKASAHLKGGAKKVVISAPSADAPMFVVGVNENSYDPKMNVVSNASCTTNCLAPLAKVVHEEFGIVEGLMTTVHATTATQKTVDGPSMKDWRGGRGAAQNIIPSSTGAAKAVGKVLPELNGKLTGMAFRVPTPNVSVVDLTCRIEKSASYDDVKAAIKTASEGALKGILGYTDEDVVSNDFVGDSRSSIFDAKAGIGLSSSFMKLVSWYDNEWGYSNRVLDLIAHMALVSAKH

SEQ ID NO: 1763 - protein, 562 aa, Zea mays
MLVLFETPAGFALFKVLDEGKLDKVEDLWKEFTTSDSARKVVELKAFNKFENTSDALSAATLIIDSKPSKGLRKFLQKHCEGETLAVADSKLGNAIKEKLKIDCLHNSAVMELMRGLRNQLTELITGLGAQDLGPMSLGLSHSLSRYKLKFSPEKVDTMIIQAIGLLDDLDKELNTYAMRVREWYGWHFPELTKIVTDNIQYAKVVKMMGNRVNAVNLDFSEILSDEELETQLKEAAVISMGTEVSDLDLSNIRELCDQVLALSEYRAQLYDYLRSRMNTIAPNLTALVGELVGARLIAHGGSLLNLAKQPGSTIQILGAEKALFRALKTKHSTPKYGLIYHASLIGKASQKHKGKISRSLAAKTALAIRYDALGDGEDNSIGTESRLKLETRLQVLEGRELGKSAGSTKGKPKIEVYEKDRKKGTGALTTPAKTYNPAADLVLTEETPKKSELASKKRKHNEVETEPLAEPAEEAIQEDGDQEDRKKKKKKNKESKEAPAGEGDGEKKKKKKSKEVEEEPVVAAASEVKKKKKKSDADGEDVAMQTEESGKKEKKKKKKAC

SEQ ID NO: 1764 - protein, 79 aa, Zea mays; identical to SEQ ID NO: 551

SEQ ID NO: 1765 - protein, 136 aa, Zea mays
MARTKQTARKSTGGKAPRKQLATKAARKSAPATGGVKKPHRFRPGTVALREIRKYQKSTELLIRKLPFQRLVREIAQDFKTDLRFQSSAVAALQEAAEAYLVGLFEDTNLCAIHAKRVTIMPKDIQLARRIRGERA

SEQ ID NO: 1766 - protein, 160 aa, Zea mays
MSDSEEHHFESKADAGASKTYPQQAGTVRKNGFIVIKNRPCKVVEVSTSKTGKHGHAKCHFVAIDIFNGKKLEDIVPSSHNCDIPHVNRTEYQLIDISEDGFVSLLTSDGNTKDDLRLPTDETLVAQIKEGFESGKDLVVTVQSAMGEEQICALKDVGPK

SEQ ID NO: 1767 - protein, 149 aa, Zea mays
MEQTFIMIKPDGVQRGLIGDIISRFEKKGFYLKGMKFMNVERSFAQQHYADLSDKPFFPGLVEYIISGPVVAMVWEGKDVVLTGRRIIGATRPWEAAPGTIRGDYAVEVGRNVIHGSDSVENGKKEIALWFPEGVAQWKSNLHPWIYEA

SEQ ID NO: 1768 - protein, 161 aa, Zea mays; identical to SEQ ID NO: 503

SEQ ID NO: 1769 - protein, 250 aa, Zea mays
MVKAYPTVNEDYLKAVDKAKRKLRGLIAEKNCAPLMLRLAWHSAGTFDVATKTGGPFGTMKNPAEQAHGANAGLEIAIRLLEPIKEQFPILSYADFYQLAGVVAVEVTGGPDVPFHPGRQDKPEPPPEGRLPDATQGSDHLRQVFSTQMGLSDQDIVALSGGHTLGRCHKDRSGFEGAWTSNPLIFDNSYFKELLSGEKEGLLQLPSDKALLSDPSFRPLVDKYAADEDAFFADYAEAHLKLSELGFAEA

SEQ ID NO: 1770 - protein, 260 aa, Zea mays
MGRVIRAQRKGAGSVFKSHTHHRKGPARFRSLDFGERNGYLKGVVTDVIHDPGRGAPLAKVTFRHPFRYKHQKELFVAAEGMYTGQFVYCGRRATLSIGNVLPLRGIPEGAVVCNVEHHVGDRGVFARASGDYAIVISHNPDNGTSRIKLPSGAKKIVPSSCRAMIGQVAGGGRTEKPMLKAGNAYHKYRVKRNSWPKVRGVAMNPVEHPHGGGNHQHIGHASTVRRDAPPGQKVGLIAARRTGRLRGQAAATAAKADKA

SEQ ID NO: 1771 - protein, 332 aa, Zea mays
MAKEPMRVLVTGAAGQIGYALVPMIARGVMLGADQPVILHMLDIPPAAEALNGVKMELVDAAFPLLKGVVATTDVVEACTGVNVAVMVGGFPRKEGMERKDVMSKNVSIYKSQASALEAHAAPNCKVLVVANPANTNALILKEFAPSIPEKNVTCLTRLDHNRALGQISERLNVQVSDVKNVIIWGNHSSSQYPDVNHATVKTSTGEKPVRELVSDDEWLNGEFITTVQQRGAAIIKARKFSSALSAASSACDHIRDWVLGTPEGTFVSMGVYSDGSYGVPSGLIYSFPVTCSGGEWKIVQGLPIDEFSRKKMDATAQELTEEKTLAYSCLE

SEQ ID NO: 1772 - protein, 417 aa, Zea mays
MALVLHSGAGNKNAFKALIAAEYSGVKVELTKDFEMGVSNKTPEFLKMNPLGKVPVLETPDGPVFESNAIARYVARLKDDNPLFGSSRIEQAHVEQWMDFAATEVDPGVGWYLYPRLGYIPYAHTTEETAIASLKRSLGALNTHLALNTYLVGHSVTLADIVLTCNLYHGIARILTKSFTSDFPHVERYFWTMVNQPNFKKVIGEVKQAESVPPVLKKGVPPKESKAKDVKKETPKEAPKPKVVEVPAEEEAPKPKPKNPLDLLPPSKMVLDDWKRLYSNTKTNFREVAIKGFWDMYDPEGYSLWFCDYKYNDENTVSFVTLNKVGGFLQRMDLCRKYAFGKMLVVGSEPPFKLKGLWLFRGQEVPKFVMDEVYDMELYEWTKVDISDEAQKERVNAMIEDQEPFEGEALLDAKCFK

SEQ ID NO: 1773 - protein, 446 aa, Zea mays
MAVTITWVKARQIFDSRGNPTVEVDVGLSDGSYARGAVPSGASTGIYEALELRDGGSDYLGKGVLKAVSNVNNIIGPAIVGKDPTEQVEIDNFMVQQLDGTSNEWGWCKQKLGANAILAVSLAVCKAGAMVKKIPLYQHIANLAGNKTLVLPVPAFNVINGGSHAGNKLAMQEFMILPTGASSFKEAMKMGVEVYHNLKSIIKKKYGQDATNVGDEGGFAPNIQENKEGLELLKAAIEKAGYTGKVVIGMDVAASEFFGEKDKTYDLNFKEENNDGSNKISGDSLKDLYKSFVSEYPIESIEDPFDQDDWSTYAKLTDEIGQKVQIVGDDLLVTNPTRVAKAINEKTCNALLLKVNQIGSVTESIEAVRMSKRAGWGVMASHRSGETEDTFIADLSVGLSTGQIKTGAPCRSERLAKYNQLLRIEEELGDAAVYAGAKFRAPVEPY

SEQ ID NO: 1774 - protein, 482 aa, Zea mays
MAASVTVENLNPKVLKCEYAVRGEIVIHAQRLQQQLQTQPGSLPFDEILYCNIGNPQSLGQQPVTFFREVLALCDYPCLLEKEETKSLFSADAISRAKQILATIPGRATGAYSHSQGIKGLRDAIAAGIMSRDGFPANADDIFITDGASPGVHMMMQLLIRNEKDGILCPIPQYPLYSASIALHGGALVPYYLNEKTGWGLEISDLKMQLENARSKGIDVRALVVINPGNPTGQVLAEDNQYDIVKFCKNEGLVLLADEVYQENIYVDNKKFNSFKKIVRSMGYGEDDLPLVSLQSVSKGYYGECGKRGGYMEITGFSTPVREQIYKIASVNLCSNITGQILASLVMNPPKVGDESYASYKAEKDGILESLARRAKALEDAFNKLEGFSCNKAEGAMYLFPQIHLPQKAIEAAKAAKKAPDAFYALRLLESTGIVVVPGSGFRQVPGTWHIRCTILPQEDKIPAVISRFRAFHEAFLAEYRD

SEQ ID NO: 1775 - protein, 843 aa, Zea mays
MVKFTAEELRAIMDKKNNIRNMSVIAHVDHGKSTLTDSLVAAAGIIAQEVAGDVRMTDTRADEAERGITIKSTGISLYYEMTDESLKNYKGERDGNQYLINLIDSPGHVDFSSEVTAALRITDGALVVVDCIEGVCVQTETVLRQALGERIRPVLTVNKMDRCFLELQVEGEEAYQTFSRVIENANVIMATYEDKLLGDVQVYPEKGTVAFSAGLHGWAFTLTNFAKMYASKFGVDETKMMERLWGENFFDPATKKWTTKNTGSPTCKRGFVQFCYEPIKQIIKTCMNDQKEKLWPMLQKLNVTMKADEKELIGKALMKRVMQTWLPASTALLEMMIFHLPSPAKAQKYRVENLYEGPLDDVYATAIRNCDPEGPLMLYVSKMIPASDKGRFFAFGRVFSGKVATGMKVRIMGPNYVPGQKKDLYVKSVQRTVIWMGKKQESVEDVPCGNTVAMVGLDQFITKNATLTNEKETDACPIRAMKFSVSPVVRVAVQCKVASDLPKLVEGLKRLAKSDPMVLCTMEESGEHIIAGAGELHLEICLKDLQEDFMGGAEIIVSPPVVSFRETVLEKSCRTVMSKSPNKHNRLYMEARPLEEGLAEAIDDGRIGPRDDPKVRSQILSQEFGWDKDLAKKIWCFGPETTGPNMVVDMCKGVQYLNEIKDSVVAGFQWASKEGALAEENMRGICFEVCDVVLHADAIHRGGGQVIPTARRVIYASQLTAKPRLLEPVYLVEIQAPENALGGIYGVLNQKRGHVFEEMQRPGTPLYNIKAFLPVIESFGFSSQLRAATSGQAFPQCVFDHWDMMGSDPLEAGSQAAQLVLDIRKRKGLKEQMTPLSEFEDKL

SEQ ID NO: 1776 - protein, 111 aa, Zea mays; identical to SEQ ID NO: 583

SEQ ID NO: 1777 - protein, 122 aa, Zea mays
MASEQGVVIACHSKAEFDAHMTKAQEAGKLVVIDFTAAWCGPCRAIAPLFVEHAKKFTQVVFLKVDVDEVKEVTAAYEVEAMPTFHFVKNGKTVATIVGAKKDELLALIEKHAAPAPASASA

SEQ ID NO: 1778 - protein, 130 aa, Zea mays
MATHRHCLPLLLVAAALALAAVPARAALGGGRGPLLGGWNPIPDVSDSHIQELGGWALGQAKHQKLAADGLRFRRVVRGEQQVVSGMNYRLYVDAADPAGRTVPYVAVVYEQVWTRTRQLASFNPVPRAP

SEQ ID NO: 1779 - protein, 139 aa, Zea mays
MANARSGVAVNDECMLKFGELQSKRLHRFITFKMDDKFKEIVVDQVGDRATSYDDFTNSLPENDCRYAIYDFDFVTAEDVQKSRIFYILWSPSSAKVKSKMLYASSNQKFKSGLNGIQVELQATDASEISLDEIKDRAR

SEQ ID NO: 1780 - protein, 145 aa, Zea mays
MTTRFKKNRKKRGHVSAGHGRIGKHRKHPGGRGNAGGMHHHRILFDKYHPGYFGKVGMRYFHKLRNKFYCPAVNIERLWSMVPADKAAEAGLDKAPQIDVTQFGYFKVLGKGVLPPKPIVVKAKLISKVAEKKIKAAGGAVVLTA

SEQ ID NO: 1781 - protein, 159 aa, Zea mays
MAEQTEKAFLKQPKVFLSSKKSGKGKKPGKGGNRFWKSIGLGFKTPREAIEGTYIDKKCPFTGTVSIRGRIIAGTCHSAKMNRTIIVRRNYLHFVKKYQRYEKRHSNIPAHISPCFRVKEGDHVIIGQCRPLSKTVRFNVVKVIPAGSAAAGKKAFTAA

SEQ ID NO: 1782 - protein, 152 aa, Zea mays; identical to SEQ ID NO: 568

SEQ ID NO: 1783 - protein, 180 aa, Zea mays; identical to SEQ ID NO: 513

SEQ ID NO: 1784 - protein, 178 aa, Zea mays
MVAFRFHQYQVVGRALPTPGDEHPKIYRMKLWATNEVRAKSKFWYFLRNLKKVKKSNGQVLAINEIFERNPTTIKNYGIWLRYQSRTGYHNMYKEYRDTTLNGAVEQMYNEMASRHRVRSPCIQIIKTATVHFKLCKRDNTKQFHNSEIKFPLVYRKVRPPTRKLKTTFKASRPNLFM

SEQ ID NO: 1785 - protein, 194 aa, Zea mays
MVHVNFYRNYGKTFKKPRRPYEKERLDAELKLVGEYGLRCKRELWRVQYALSRIRNAARHLLTLDEKNPRRIFEGEALLRRMNRYGLLAEGQNKLDYVLALTAENFLARRLQTLVFKAGMAKSIHHARVLIKQRHIRVGRQIVNVPSFMVRVESEKHIDFSLSSPFGGGPAGRVKRKNQKKASGGGDAGDEDEE

SEQ ID NO: 1786 - protein, 215 aa, Zea mays
MAAPPARARADYDYLIKLLLIGDSGVGKSCLLLRFSDGSFTTSFITTIGIDFKIRTIELDGKRIKLQIWDTAGQERFRTITTAYYRGAMGILLVYDVTDESSFNNIRNWIRNIEQHASDNVNKILVGNKADMDESKRAVPTAKGQALADEYGIKFFETSAKTNLNVEQVFFSIARDIKQRLAETDSKPEDKAIKINKPDQGSEAPAAQRSACCGS

SEQ ID NO: 1787 - protein, 220 aa, Zea mays
MGRRPARCYRQIKNKPCPKSRYCRGVPDPKIRIYDVGMKRKGVDEFPYCVHLVSWERENVSSEALEAARIVCNKYMTKSAGKDAFHLRVRVHPFHVLRINKMLSCAGADRLQTGMRGAFGKPQGTCARVDIGQVLLSVRCKDNNAAHASEALRRAKFKFPARQKIIESRKWGFTKFSRADYLKYKSEGRIVPDGVNAKLLANHGRLEKRAPGKAFLDAVA

SEQ ID NO: 1788 - protein, 251 aa, Zea mays
MAAAAAAATSFTTLAVARSAGQRSLLASKAAPSPLLSLRGARIPSQAVSFSGGLAASPSHSRARFATSASAEPKEADLQSKITNKVYFDISIGNPVGKNVGRIVIGLYGDDVPQTAENFRALCTGEKGFGYKGSSFHRVISDFMIQGGDFDKGNGTGGKSIYGRTFKDENFKLVHTGPGVVSMANAGPNTNGSQFFICTVKTPWLDGRHVVFGQVVEGMDIVRLIESQETDRGDRPKKKVVISECGELPVV

SEQ ID NO: 1789 - protein, 267 aa, Zea mays
MNMIRAVRRRFTVGHLATAKDPATLRHAAAELLATAIFVFAAEGATLSLGRMHHHDKGGGGLVAVALAHALALAAAVGCAANISGGHVNPAVTFGALLAGRICLVRSLVYWAAQLLGAVAAALVLRLATGGMHLPEYALAGGVSGWNAAVLEAAMAFGLMYAYFATVMDKARRVRAGAGALAAPLAVGLLAGANVLACGALEGAVMNPARAFGPAVVGSRRWRHQWVYWVGPMVGAGLSGVVYEHLVAGPAAEEEEPAPSCGDRRRA

SEQ ID NO: 1790 - protein, 260 aa, Zea mays
MAVGKNKRISKGKKGGKKKTVDPFSKKDWYDIKAPSVFSVRNIGKTLVSRTQGTRIASEGLKHRVFEVCLADLQGDEDQAYRKIRLRAEDVQGRNVLTNFWGMNFTTDKLRSLVKKWQTLIEAHVDVKTTDNYMLRLFCIGFTKRRPNQVKRTCYAQASQIRQIRRKMVEIMINQASTCDLKELVSKFIPEVIGKEIEKSTSSIFPLQNVFIRKVKILKAPKFDLGKLMEVHGDYKEDVGVKLERPVEGDEAGQEVAAAE

SEQ ID NO: 1791 - protein, 379 aa, Zea mays
MATAGKVIKCKAAVAWEAGKPLSIEEVEVAPPQAMEVRVKILFTSLCHTDVYFWEAKGQTPVFPRIFGHEAGGIIESVGEGVTDVAPGDHVLPVFTGECKECAHCKSAESNMCDLLRINTDRGVMIADGKSRFSINGKPIYHFVGTSTFSEYTVMHVGCVAKINPQAPLDKVCVLSCGYSTGLGASINVAKPPKGSTVAVFGLGAVGLAAAEGARIAGASRIIGVDLNPSRFEEARKFGCTEFVNPKDHNKPVQEVLAEMTNGGVDRSVECTGNINAMIQAFECVHDGWGVAVLVGVPHKDAEFKTHPMNFLNERTLKGTFFGNYKPRTDLPNVVELYMKKELEVEKFITHSVPFAEINKAFDLMAKGEGIRCIIRMEN

SEQ ID NO: 1792 - protein, 508 aa, Zea mays
MEFSPRAAELTTLLESRMINFYTNLKVDEIGRVVSVGDGIARVYGLNEIQAGEMVEFASGVKGIALNLENENVGIVVFGSDTAIKEGDLVKRTGSIVDVPAGKAMLGRVVDALGVPIDGKGALSDHERRRVEVKAPGIIERKSVHEPMQTGLKAVDSLVPIGRGQRELIIGDRQTGKTAIAIDTILNQKQMNSRGTNESETLYCVYVAIGQKRSTVAQLVQILSEANALEYSMLVAATASDPAPLQFLAPYSGCAMGEYFRDNGMHALIIYDDLSKQAVAYRQMSLLLRRPPGREAFPGDVFYLHSRLLERAAKRSDQTGAGSLTALPVIETQAGDVSAYIPTNVISITDGQICLETELFYRGIRPAINVGLSVSRVGSAAQLKAMKQVCGSSKLELAQYREVAAFAQFGSDLDAATQALLNRGARLTEVPKQPQYEPLPIEKQIVVIYAAVNGFCDRMPLDRISQYEKNILSTINPELLKSFLEKGGLTNERKMEPDASLKESALNL

SEQ ID NO: 1793 - protein, 553 aa, Zea mays
MASRRVVSSLLRSASRLRAASPAAPRPRAPPHRPSPAGYLFNRAAAYASSAAAQAAPATPPPATGKTGGGKITDEFTGAGAIGQVCQVIGAVVDVRFDEGLPPILTALEVLDNNIRLVLEVAQHLGENMVRTIAMDGTEGLVRGQRVLNTGSPITVPVGRATLGRIINVIGEPIDEKGDIKTNHFLPIHREAPAFVEQATEQQILVTGIKVVDLLAPYQRGGKIGLFGGAGVGKTVLIMELINNVAKAHGGFSVFAGVGERTREGNDLYREMIESGVIKLDDKQSESKCALVYGQMNEPPGARARVGLTGLTVAEHFRDAEGQDVLLFIDNIFRFTQANSEVSALLGRIPSAVGYQPTLATDLGGLQERITTTKKGSITSVQAIYVPADDLTDPAPATTFAHLDATTVLSRQISELGIYPAVDPLDSTSRMLSPHVLGEDHYNTARGVQKVLQNYKNLQDIIAILGMDELSEDDKLTVARARKIQRFLSQPFHVAEVFTGAPGKYVELKESVKSFQGVLDGKYDDLPEQSFYMVGGIEEVIAKAEKIAKESAS

SEQ ID NO: 1794 - protein, 799 aa, Zea mays
MAFRVSGAVLGGAVRAPRLTGGGEGSLVFRHTGLFLTRGARVGCSGTHGAMRAAAAARKAVMVPEGENDGLASGADSAQFQSDELEVPDISEETTCGAGVADAQALNRVRVVPPPSDGQKIFQIDPMLQGYKYHLEYRYSLYRRIRSDIDEHEGGLEAFSRSYEKFGFNRSAEGITYREWAPGAFSAALVGDFNNWDPNADRMSKNEFGVWEIFLPNNADGTSPIPHGSRVKVRMDTPSGIKDSIPAWIKYSVQAPGEIPYNGIYYDPPEEVKYVFRHAQPKRPKSLRIYETHVGMSSPEPKINTYVNFRDEVLPRIKKLGYNAVQIMAIQEHSYYGSFGYHVTNFFAPSSRFGTPEDLKSLIDRAHELGLLVLMDVVHSHASSNTLDGLNGFDGTDTHYFHSGPRGHHWMWDSRLFNYGNWEVLRFLLSNARWWLEEYKFDGFRFDGVTSMMYTHHGLQVTFTGNFNEYFGFATDVDAVVYLMLVNDLIHGLYPEAVTIGEDVSGMSTFALPVHDGGVGFDYRMHMAVADKWIDLLKQSDETWKMGDIVHTLTNRRWLEKCVTYAESHDQALVGDKTIAFWLMDKDMYDFMALDRPSTPTIDRGIALHKMIRLITMGLGGEGYLNFMGNEFGHPEWIDFPRGPQRLPSGKFIPGNNNSYDKCRRRFDLGDADYLRYHGMQEFDQAMQHLEQKYEFMTSDHQYISRKHEEDKVIVFEKGDLVFVYNFHCNNSYFDYRIGCRKPGVYKVVLDSDAGLFGGFSRIHHAAEHFTADCSHDNRPYSFSVYTPSRTCVVYAPVE

SEQ ID NO: 1795 - protein, 120 aa, Zea mays; identical to SEQ ID NO: 579

SEQ ID NO: 1796 - protein, 123 aa, Zea mays; identical to SEQ ID NO: 578

SEQ ID NO: 1797 - protein, 156 aa, Zea mays
MADHHRGATGGGGGYGDLQRGGGMHGEAQQQQKQGAMMTALKAATAATFGGSMLVLSGLILAGTVIALTVATPVLVIFSPVLVPAAIALALMAAGFVTSGGLGVAALSVFSWMYKYLTGKHPPGADQLDHAKARLASKARDIKDAAQHRIDQAQGS

SEQ ID NO: 1798 - protein, 154 aa, Zea mays
MDARMFGLETPRVAALHHLLDVPDGDKAGGGATRTYVRDARAMAATPADVKELAGAYAFVVDMPGLSTGDIRVQVEDERVLVISGERRREEREDAKYLRMERRMGKFMRKFVLPDNADVDKVAAVCRDGVLTVTVEKLPPPEPKKPKTIEIKVA

SEQ ID NO: 1799 - protein, 148 aa, Zea mays
MTLGSSGAGSSVVVPRNFRLLEELERGEKGIGDGTVSYGMDDADDIYMRSWTGTIIGPHNTVHEGRIYQLKLFCDKDYPEKPPSVRFHSRINMTCVNHETGMVDPRKFGLLANWQRDYTMENILTQLKKEMAASQNRKLVQPPEGTFF

SEQ ID NO: 1800 - protein, 168 aa, Zea mays
MAASSTATSVHDFIVKDASGKDVDLSTYKGKVLLIVNVASQCGLTNSNYTELAQLYEKYKDQGFEILAFPCNQFGGQEPGTNKEIVQFACTRFKAEYPIFDKVDVNGSNAAPIYKFLKSSKGGLFGDSIKWNFSKFLVDKEGRVVDRYAPTTSPLSIEKDIKKLLGSS

SEQ ID NO: 1801 - protein, 208 aa, Zea mays
  MOD_RES (119)..(119): Any amino acid
MASDRVLGTVKWFNGTKGFGFITPDDGSEDLFVHQSSIKSDGYRSLNDGDAVEYTVGSGNDGRAKALDVTAPGGGPLAGGERPDGGNGGGRGGYGGGDRGYGGGGDRGYGGGGDRGYGXGDRGYGGGGDRGYGGDRGYGGGGGYGGGYGGGGGGGGRGCFKCGEEGHMARDCSQGGGYGGGGGGGRGSECYNCGQEGHISRDCPNKRR

SEQ ID NO: 1802 - protein, 187 aa, Zea mays
MGIDLVAGGRNKKTKRTAPKSDDVYLKLLVKLYRFLVRRTKSNFNAVILKRLFMSKTNRPPLSMRRLVRFMEGKGDQIAVIVGTVTDDKRISEVPAMKVCALRFTETARARIINAGGECLTFDQLALRAPLGQNTVLLRGPKNAREAVRHFGPAPGVPHSHTKPYVRSKGRKFEKARGRRNSRGFKV

SEQ ID NO: 1803 - protein, 226 aa, Zea mays; identical to SEQ ID NO: 651

SEQ ID NO: 1804 - protein, 229 aa, Zea mays; identical to SEQ ID NO: 851

SEQ ID NO: 1805 - protein, 232 aa, Zea mays
MASTHAISKKRKFVADGVFFAELNEMLTRELAEDGYSGVEVRVTPMRTEIIIRATRTQNVLGEKGRRIRELTSVVQKRFNFPEGGVELYAEKVNNRGLCAIAQAESLRYKLLGGLAVRRACYGVLRFVMESGAKGCEVIVSGKLRAQRAKSMKFKDGYMISSGHPVNLYIDSAVRHVLLRQGVLGIKVKIMLDWDPKGKQGPTMPLPDLVTIHVPKEEDEFLRPLAAEIQVA

SEQ ID NO: 1806 - protein, 241 aa, Zea mays
MAANLEDVPSLDLMHELLRRMKCSSKPDKRLILIGPPGSGKGTQSPIIKDEYCLCHLATGDMLRAAVAAKTPLGIKAKEAMNKGELVSDDLVVGIIDEAMKKPSCQKGFILDGFPRTVTQAQKLDEMLAKQGANVDKVLNFAIDDAVLEERITGRWIHSASGRTYHSKFAPPKSPGVDDVTGEPLIQRRDDTAEVLKSRLEAFHRQTEPVIDYYSKKGLVVNLPAEKPPKEVTAEVQKALS

SEQ ID NO: 1807 - protein, 257 aa, Zea mays
MAPKRGGRAPVPAKKKAVVTNPLFEKRPKQFGIGGALPPKKDLHRFVKWPKVVRIQRQRRILKQRLKVPPALNQFTRTLDKNLATNLFKMLLKYRPEDKAAKKERLLKRAQAENEGKTVESKKPIVVKYGLNHVTYLIEQSKAQLVVIAHDVDPIELVVWLPALCRKMEVPYCIVKGKARLGSIVHKKTASVLCLTTVKNEDKLEFSKILEAIKANFNDKFDEVRKKWGGGIMGSKSQAKTKAREKLLAKEAAQRMT

SEQ ID NO: 1808 - protein, 290 aa, Zea mays
MGKDDVIESGAGGGEFAAKDYTDPPPAPLIDAAELGSWSLYRAVIAEFIATLLFLYITVATVIGYKHQTDASASGADAACGGVGVLGIAWAFGGMIFVLVYCTAGISGGHINPAVTFGLFLARKVSLVRALLYIVAQCLGAICGVGLVKAFQSAYFDRYGGGANSLASGYSRGTGLGAEIIGTFVLVYTVFSATDPKRNARDSHVPVLAPLPIGFAVFMVHLATIPVTGTGINPARSLGAAVIYNKDKPWDDHWIFWVGPLVGAAIAAFYHQYILRAGAIKALGSFRSNA

SEQ ID NO: 1809 - protein, 274 aa, Zea mays
MAERGGERGGERGGFGRGFGRGGRGDRGGRRGGRRGPRQEEEKWVPVTKLGRLVKENRITKIEEIYLHSLPVKEHQIIETLVPGLKDEVMKITPVQKQTRAGQRTRFKAFVVVGDCDGHVGLGVKCAKEVATAIRGAIILAKLSVVPVRRGYWGNKIGQPHTVPCKVTGKCGSVTVRMVPAPRGSGIVAARVPKKVLQFAGIEDVFTSSRGSTKTLGNFVKATFDCLMKTYGFLTPEFWSQTKFSMTPFQQYTDLLAKPTKGLVLEAPTETVEA

SEQ ID NO: 1810 - protein, 308 aa, Zea mays
MADAKQQQQQPQQAAAAATGVWKTVKPFVNGGASGMLATCVIQPIDMVKVRIQLGEGSAGQVTRNMLANEGVRSFYKGLSAGLLRQATYTTARLGSFRVLTNKAVEKNEGKPLPLIQKAFIGLTAGAIGACFGSPADLALIRMQADSTLPAAQRRNYKNAFHALYRISADEGVLALWKGAGPTVVRAMALNMGMLASYDQSVELFRDKFGAGEISTVVGASAVSGFFASACSLPFDYVKTQIQKMQPDANGKYPYTGSLDCAVKTFKSGGPFKFYTGFPVYCVRIAPHVMMTWIFLNQIQKFEKKIGI

SEQ ID NO: 1811 - protein, 302 aa, Zea mays
MGGFVKTHKSNAYFKRFQVKFKRRRAGKTDYRARIRLINQDKNKYNTPKYRFVVRFTNKDITAQIISASIAGDMVLASAYSHELPRYGLEVGLTNYAAAYCTGLLLARRVLKTRGLDKEYEGNVEATGEDFSVEPADERRPFRALLDVGLIRTTTGNRVFGALKGALDGGLDIPHSEKRFAGFKKDDKQLDADIHRKYIYGGHVADYMRNLAEEEPEKYQSHFSEYIKKGIEADDMEALYKKVHAAIRADPSVVKSTKQPPKEHKRYNPKKLTYEQRKASLIERLNQLNSSGGADDDDEDDE

SEQ ID NO: 1812 - protein, 319 aa, Zea mays
MAIKRTKAEKKIAYDKKLCSLLDEYTKVLIALADNVGSKQLQDIRRGLRGDSVVLMGKNTLIRRCIKVYAEKTGNHTFDPLMDLLVGNVGLIFTKGDLKEVREEVAKYKVGAPARVGLVAPVDVVVPPGNTGLDPSQTSFFQVLNIPTKINKGTVEIITPVELIKKGEKVGSSESALLAKLGIRPFSYGLQVTSVYEDGSVFSPEVLDLSEEDLIEKFATGVSMVASLSLAISYPTLAAVPHMFINGYKNVLAVAVETDYSYPHADKIKEYLKDPSKFAVAAPVAAGDSGASAAPKEEEKAAEPEEESDEEMGFSLFDD

SEQ ID NO: 1813 - protein, 380 aa, Zea mays
MWNLNKALVTSLLCISALSSSPWPCTAAGQLGGKPLVTAVTKDASTSLYTAPLKDGHPLVLDLTSPVISLATCASSSKNNNGTLTATLSANATDGQNPLFPVSFSAVATCAPSSKLPAGAGAVGVAGLAPSSSSQQSLPAQVARTQKVADKVALCLPSDGRSTSGDSVGVAIFGGGPLFFVPPDRGDFTTMLAGTAPLHAGAGAGAPGYYVSSTGIAVEQARVGGPRGALVVALSSTVPYTALRPDVYAPFVKAFDAAAAGPNFPWMSRVAAVAPFDRCYDSTKLPQSLLGYAVPQIDVMLEGGQNFTVLGGNSMVQVNANTACLGFVQAPGQAPAAVIGGFQLENHLLLLDVDKKQLGFTTFLNAIGLSCSSFNFTLAS

SEQ ID NO: 1814 - protein, 387 aa, Zea mays
MADQANQPTVLHKLGGQFHLRSIISEGVRARNICPSVSSYERRFATRNYMTQSLWGPSMSVSGGINVPVMQTPLCANAPAEKGGKNFMIDFMMGGVSAAVSKTAAAPIERVKLLIQNQDEMIKSGRLSEPYKGIVDCFKRTIKDEGFSSLWRGNTANVIRYFPTQALNFAFKDYFKRLFNFKKDRDGYWKWFAGNLASGGAAGASSLFFVYSLDYARTRLANDAKAAKGGGERQFNGLVDVYRKTLKSDGIAGLYRGFNISCVGIIVYRGLYFGLYDSIKPVVLTGNLQDNFFASFALGWLITNGAGLASYPIDTVRRRMMMTSGEAVKYKSSLDAFQQILKKEGPKSLFKGAGANILRAIAGAGVLSGYDQLQILFFGKKYGSGGA

SEQ ID NO: 1815 - protein, 374 aa, Zea mays
MAIPLVLVVLPLGLLFLLSGLIVNAIQAVLFVTIRPFSKSFYRRINRFLAELLWLQLVWVVDWWAGVKVQLHADEETYRSMGKEHALIISNHRSDIDWLIGWILAQRSGCLGSTLAVMKKSSKFLPVIGWSMWFAEYLFLERSWAKDEKTLKWGLQRLKDFPRPFWLALFVEGTRFTPAKLLAAQEYAASQGLPAPRNVLIPRTKGFVSAVSIMRDFVPAIYDTTVIVPKDSPQPTMLRILKGQSSVIHVRMKRHAMSEMPKSDEDVSKWCKDIFVAKDALLDKHLATGTFDEEIRPIGRPVKSLLVTLFWSCLLLFGAIEFFKWTQLLSTWRGVAFTAAGMALVTGVMHVFIMFSQAERSSSARAARNRVKKE

SEQ ID NO: 1816 - protein, 397 aa, Zea mays
MQSTAAIGLVRPCAARPLPTYPSPRRGAGACSGAAQPILAPRGLCLSARASLLPDSPLEEEYRRCRAGRHVAAAGKVAAADGAVEEAGGGLVKTLQLGSLFGLWYLFNIYFNIYNKQVLKVLPYPINITTVQFAVGSAIALFMWITGILKRPKISGAQLFAILPLAIVHTMGNLFTNMSLGKVAVSFTHTIKAMEPFFSVLLSAIFLGELPTPWVVLSLLPIVGGVALASLTEASFNWAGFWSAMASNVTFQSRNVLSKKLMVKKEESLDNINLFSIITVMSFFLLAPVTLLTEGVKVSPAVLQSAGLNLKQIYTRSLIAACCFHAYQQVSYMILARVSPVTHSVGNCVKRVVVIVTSVLFFRTPVSPINSLGTGIALAGVFLYSQLKRLKPKPKAA

SEQ ID NO: 1817 - protein, 394 aa, Zea mays
MFYSEEAMIPSVRLSPGPAAFSGSSLRSKLPSIPSISSLKPSKYVVSSLKPLYLAPLDGPRTAELKSRRQPLEFRCSASAADDKESKTQVVPVQSEGAQRLKISIYFATWWALNVIFNIYNKKVLNAFPYPWLTSTLSLACGSAMMLFSWATRLVEAPKTDLDFWKVLFPVAVAHTIGHVAATVSMSKVAVSFTHIIKSAEPAFSVLVSRFFLGETFPIPVYLSLLPIIGGCALAAVTELNFNMVGFMGAMISNLAFVFRNIFSKRGMKGKSVSGMNYYACLSIMSLVILTPFAIAMEGPQMWAAGWQKALAEVGPNVVWWIAAQSVFYHLYNQVSYMSLDQISPLTFSIGNTMKRISVIVSSIIIFHTPVRAVNALGAAIAILGTFLYSQAKA

SEQ ID NO: 1818 - protein, 415 aa, Zea mays
MAASNGEGHGRFDVIVVGAGIMGSCAAYAASSRGARVLLLERFDLLHHRGSSHGESRTIRATYPQAHYPPMVRLSRRLWDEAQADAGYTVLTPTPHLDLGPRDDSALVASMRNGGATEVVAGDESSSWPWAGVFRVPDGWTAARSELGGVMKATKAVAMFQALAVKRGAVLRDRTEVVDITSSKRGEGEGSIISVRTSSGEEFHGTKCIVTVGAWTSKLIKSVTGLELPVQPVHTLICYWKVRPGREQELTPEAGFPTFASYGDPYIYSTPSMEFPGLIKIAMHGGPPCDPDGRDWSTGAGDLVEPVARWIDAVMPGHVDTTGGPVVRQCCMYSVTPDDDYVVDFLGGEFGKDVVIGAGFSGHGFKMGPAVGRILAEMALDGEASTAAEAGVDLRPLTIGRFAGNPKGNLSASQG

SEQ ID NO: 1819 - protein, 393 aa, Zea mays
MPPKAKKDAAPSERPILGRFSSHLKIGIVGLPNVGKSTFFNIVTKLAIPAENFPFCTIEPNEARVNVPDERFDWLCKLYKPKSEVPAYLEVTDIAGLIRGAHAGDGLGNAFLSHIRAVDGIFHVLRAFEDAEITHVDDTVDPVRDMETISEELRLKDIEFMKKKLEDLDKSMKRSNDKQLKIEHELCERVIGHLEEGKDVRLGDWKAADIEILNTFQLLSAKPVVYLVNMSEKDFQRKKNKFLPKIHAWVQEHGGETILPFSCAFEQKLVDMPEDEAAKYCAENQITSMIPKIIKTGFAAIHLIYFFTAGPDEVKCWQIRRQTKAPQAAGAIHTDFERGFICAEVMKFEDLKELGSESAVKAAGKYKQEGKTYVVQDGDIIFFKFNVSGGGKK

SEQ ID NO: 1820 - protein, 431 aa, Zea mays
MAGRESGGMAAALRCAGRIGILATVAVNLAWIATYIRRRYFGGGNRSDNNGGGGEVEPSRGKPPVTSDSIVNLDHGDPTMYEEFWRGTGDSASIFIPGWQTMSYFSDLGGICWFLEPGFEREVRRLHRLVGNAVVDGYHVLVGTGSTQLFQAVLYALSPASDGTPMNVVSPAPYYSSYPSVTNYLNSALYRWAGDANTFDGDTCIELVCSPNNPDGGLRKPVIKSKSSKPVYDFAYYWPQYTPITEAAAHDIMLFTVSKCTGHAGTRLGWALVKDTKVAQKMIKFIELNTIGVSKDSQLRAAKIIGAICNGYEPVPSSGKTSQLFHFAKEKMAARWARLRAAVAASDIFTLPYELSGYCSFSNETVTANPPFAWLRYNKDDIEDLEAFLLEKKIITRGGTRFGVDARAVRVSMVDTDQAFNVFINRLATMK

SEQ ID NO: 1821 - protein, 473 aa, Zea mays
MATTAVSVDEKLDKLRAEVAKLDQISENEKSGFISLVSRYLSGEAEQIEWSKIQTPTDEVVVPYDTVASPPEDLEETKKLLDKLVVLKLNGGLGTTMGCTGPKSVIEVRNGFTFLDLIVIQIESLNKKYGCNVPLLLMNSFNTHDDTQKIVEKYSNSNIEIHTFNQSQYPRIVTEDFLPLPSKGKSGKDGWYPPGHGDVFPSLNNSGKLDILLAQGKEYVFVANSDNLGAIVDIKILNHLINNQNEYCMEVTPKTLADVKGGTLISYEGRVQLLEIAQVPDEHVNEFKSIEKFKIFNTNNLWVNLKAIKRLVEAEALKMEIIPNPKEVDGVKVLQLETAAGAAIRFFDKAIGINVPRSRFLPVKATSDLLLVQSDLYTLVDGFVIRNPSRANPANPSIELGPEFKKVANFLARFKSIPSIVELDSLKVSGDVWFGSGITLKGKVTIIAKPGVKLEIPDGDVLENKDVNGPEDL

SEQ ID NO: 1822 - protein, 475 aa, Zea mays
MAGGFRVLHLVRPFLAFLPEVQSADRKIPFREKVIYTVISLFIFLVCSQLPLYGIHSTTGADPFYWMRVILASNRGTVMELGITPIVTSGMVMQLLVGSKIIEVDNSVREDRALLNGAQKLLGILIAIGEAVAYVLSGMYGSVSQLGTGNAILIILQLFFAGIIVICLDELLQKGYGLGSGISLFIATNICENIIWKAFSPTTINSGRGAEFEGAVIALFHLLITRTDKVRALREAFYRQNLPNVTNLLATVLVFLIVIYFQGFRVVLPVRSKNARGQQGSYPIKLFYTSNMPIILHSALITNLYFISQLLYRKYSGNFLVNLLGMWKESEYSGHSVPVGGLAYYVTAPSSLADVLANPFHALFYVVFMLSACALFSKTWIEVSGSSAKDVAKQLKEQQMVMPGHRESNLQKELNRYIPTAAAFGGVCIGALTVLADFMGAIGSGTGILLAVTIIYQYFETFEKERATELGFFGF

SEQ ID NO: 1823 - protein, 475 aa, Zea mays
MDMALASKASPPPWNATAAEQPIPKRDKAAANDSTYLNPQAHDSVLGIILGGGAGTRLYPLTKKRAKPAVPLGANYRLIDIPVSNCLNSNISKIYVLTQFNSASLNRHLSRAYGSNIGGYKNEGFVEVLAAQQSPDNPNWFQGTADAVRQYLWLFEEHNVMEFLILAGDHLYRMDYEKFIQAHRETNADITVAALPMDEKRATAFGLMKIDEEGRIIEFAEKPKGEQLKAMMVDTTILGLDDVRAKEMPYIASMGIYVFSKDVMLQLLREQFPEANDFGSEVIPGATSIGKRVQAYLYDGYWEDIGTIAAFYNANLGITKKPIPDFSFYDRFAPIYTQPRHLPPSKVLDADVTDSVIGEGCVIKNCKINHSVVGLRSCISEGAIIEDSLLMGADYYETEADKKLLAEKGGIPIGIGKNSCIRRAIIDENARIGDNVKILNADNVQEAAMETDGYFIKGGIVTVIKDALLPSGTVI

SEQ ID NO: 1824 - protein, 565 aa, Zea mays
MGSTAAVSVSASAIASRGCARSEAARRPGGIRVCGLRSEALTCHSLRISQAPARLMVTRPPPPAAATNGAAAGSCGFDYDLVIIGAGVGGHGAALHAVEEGLKTAIIEGDVVGGTCVNRGCVPSKALLAVSGRMRELHDEHHMKSLGLQVSSPGYDRQAVADHANNLASKIRINLTNSMKALGVDILTGVGTIVGKQKVRYGKAGFPDKEITARNIIIATGSVPFVPKGIEIDGKTVFTSDHALKLESVPDWIAIVGSGYIGLEFSDVYTALGSEVTFVEALDQLMPGFDPEIAKLAQRVLINPRKIDYHTGVFASKITPAKDGKPVLIELIDAKTKEHKETLEVDAALIATGRAPFTKGLGLENINVVTQRGFVPVDERMRVMDAGGNVVPNLYCIGDANGKLMLAHAASAQGISVVEQISGKDHILNHLSIPAACFTHPEISMVGLTEPQAREKADKEGFEVNVVKTSFKANTKALAENEGDGIAKLIYRPDTGEILGVHILGLHAADLIHEASNAIALGTRVQDIKFAVHAHPTLSEVLDELFKAAKVNSGVSHSVNEPVAA

SEQ ID NO: 1825 - protein, 72 aa, Zea mays; identical to SEQ ID NO: 646

SEQ ID NO: 1826 - protein, 84 aa, Zea mays; identical to SEQ ID NO: 592

SEQ ID NO: 1827 - protein, 124 aa, Zea mays
MAMDPDAVAKAFVEHYYRTFDTNRAALVGLYQETSMLTFEGQKFQGPSAIAGKLGSLPFQACEHQIVTVDCQPSGPQGGMLVFVSGSIRTGPEEHPIKFSQAFHLLPAAGSFFVQNDMFRLNYG

SEQ ID NO: 1828 - protein, 135 aa, Zea mays
MAGRGKAIGSGAAKKATSRSSKAGLQFPVGRIARFLKAGKYAERVGAGAPVYLAAVLEYLAAEVLELAGNAARDNKKTRIVPRHIQLAVRNDEELSRLLGTVTIASGGVMPNIHNLLLPKKAGGGSAKAAAGDED

SEQ ID NO: 1829 - protein, 132 aa, Zea mays; identical to SEQ ID NO: 556

SEQ ID NO: 1830 - protein, 146 aa, Zea mays
MATAAAQGGSDKPALRKPVFTKVDQLKPGTNGHTLTVKVVSATPVPGRARPGAPAAASSRAPRIAECLVGDETGVIVFTARNDQVDLLKPDATVILRNAKIDMFKGSMRLAVDKWGRIEATEPASFTVKEDNNLSLVEYELVNVAE

SEQ ID NO: 1831 - protein, 149 aa, Zea mays
MSRRKTREPKEENVLGPTVREGEFVFGVAHIFASFNDTFIHVTDLSGRETLVRITGGMKVKADRDESSPYAAMLAAQDVAQRCKELGITALHIKLRATGGNKTKTPGPGAQSALRALARSGMKIGRIEDVTPVPTDSTRRKGGRRGRRL

SEQ ID NO: 1832 - protein, 145 aa, Zea mays
MAESTARTVKDVNPHEFVKAYSAHLKRSGKMELPEWVDIVKTARFKELPPYDPDWYYIRAASIARKIYLRQGIGVGGFQKIYGGRQRNGSRPPHFCKSSGAVARNILQQLQIMGIIDVDPKGGRLITNQGRRDLDQVAGRVAVEA

SEQ ID NO: 1833 - protein, 165 aa, Zea mays
METAAVAASSAGRRIMVAVDEGEESLHALNWCLANVVSPAGGDTLVLVHARRPRPVYAAMDSAGYMMTSDVLASVERHANAVSAAAVDKAKRVCADHPHVKVETTVESGDPRDVICDAANKMAADLLVMGSHGYGFIQRAFLGSVSNHCAQNCKCPVLIVKRPKE

SEQ ID NO: 1834 - protein, 149 aa, Zea mays
MSTVLQRPTPGTVQCFGRKKTAVAVAYTKPGRGLIKVNGVPIELIRPEMLRLKAFEPILLAGRSRFKDIDMRIRVRGGGKTSQIYAIRQAVAKGLVAYYQKYVDEAAKKEVKDIFTRYDRTLLVADPRRCEPKKFGGRGARARFQKSYR

SEQ ID NO: 1835 - protein, 158 aa, Zea mays
MSLIRRSNVFDPFSLDLWDPFEGFPFGSGNSSSLFHSFPRTSSETAAFAGARIDWKETPEAHVFKADVPGLKKEEVKVEVEDGNVLQISGERNKEQEEKTDTWHRVERSSGRFLRRFRLPENAKTEQITAAMENGVLTVTVPKEDAKKPEVKSIQISG

SEQ ID NO: 1836 - protein, 183 aa, Zea mays; identical to SEQ ID NO: 519

SEQ ID NO: 1837 - protein, 179 aa, Zea mays; identical to SEQ ID NO: 499

SEQ ID NO: 1838 - protein, 182 aa, Zea mays
  MOD_RES (15)..(15): Any amino acid
  MOD_RES (17)..(17): Any amino acid
MPAGHGLRSRTRDLXAXPFRKKGYIPLTTYLRTYKIGDYVDVKVNGAVHKGMPHKFYHGRTGRVWNVTKRAIGVEVNKQVNGRIIRKRIHVRVEHVQPSRCTEEFRLRKAKNDQLKADAKKRGEVISTKRQPLGPKPGFMVEGTTIETVTPIPYDVVNDLKGGILGCLVHLPAVPSSTSVLL

SEQ ID NO: 1839 - protein, 181 aa, Zea mays
MGLTFTKLFSRLFAKKEMRILMVGLDAAGKTTILYKLKLGEIVTTIPTIGFNVETVEYKNISFTVWDVGGQDKIRPLWRHYFQNTQGLIFVVDSNDRDRVVEARDELHRMLNEDELRDAVLLVFANKQDLPNAMNAAEITDKLGLNSLRQRHWYIQSTCATTGEGLYEGLDWLSSNIATKS

SEQ ID NO: 1840 - protein, 214 aa, Zea mays
MAPMKLYGAVMSWNLTRCATALEEAGSDYEIVPINFATAEHKSPEHLVRNPFGQVPALQDGDLYLFESRAICKYAARKNKPELLREGNLEEAAMVDVWIEVEANQYTAALNPILFQVLISPMLGGTTDQKVVDENLEKLKKVLEVYEARLTKCKYLAGDFLSLADLNHVSVTLCLFATPYASVLDAYPHVKAWWSGLMERPSVQKVAALMKPSA

SEQ ID NO: 1841 - protein, 219 aa, Zea mays
MAPTSKLSTGIKRASRSHAYHRRGLWAIKAKNGGAFPKADKAAAAVEPKFYPADDVKPRVPSTRKPKPTKLRSSITPGTVLILLAGRFMGKRVVFLKQLKSGLLLISGPFKINGVPIRRVNQTYVIATSTKVDISGVDVAKFDDKYFAREKKQKVKKTEGELFETEKEASKSLPDFKKDDQKAVDSALIKAIEAVPELKTYLGARFSLRDGDKPHEMVF

SEQ ID NO: 1842 - protein, 206 aa, Zea mays
MVSGSGVCAKRIVVDARHHMLGRLSSIIAKELLNGQKVVVVRCEEICMSGGLVRQKMKYLRFLRKRMNTKPSHGPIHFRAPAKILWRTIRGMIPHKTKRGEAALARLKTYEGVPPPYDKTKRMVIPDALKVLRLQPGHKYCLLGELSKEVGWNYHDTIRELEEKRKEKAKVAYERKKQLAKLRVKAEKAAEEKLGSQLEILAPIKY

SEQ ID NO: 1843 - protein, 216 aa, Zea mays
MAYRAEDDYDYLFKVVLIGDSGVGKSNLLSRFTRNEFSLESKSTIGVEFATRSIRVDDKVVKAQIWDTAGQERYRAITSAYYRGAVGALVVYDVTRHVTFENVERWLKELRDHTDANIVIMLVGNKADLRHLRAVSVEDAKGFAEREMTFFMETSALESMNVESAFTEVLTQIYRVVSKKALDIGDDPAAPPRGQTINVGGKDDVSAVKKAGCCSS

SEQ ID NO: 1844 - protein, 214 aa, Zea mays
MSEEDKAAASAEQPKRAPKLNERILSSLSRRSVAAHPWHDLEIGPGAPAVFNVVVEITKGSKVKYELDKKTGLIKVDRVLYSSVVYPHNYGFIPRTLCEDNDPMDVLVLMQEPVVPGSFLRARAIGLMPMIDQGEKDDKIIAVCADDPEYRHYNDISELSPHRLQEIKRFFEDYKKNENKEVAVDAFLPATTAQEAIQYSMDLYAQYILQSLRQ

SEQ ID NO: 1845 - protein, 229 aa, Zea mays
MPGLTIGDTVPNLELDSTHGKIRIHDYVGDGYAIIFSHPADFTPVCTTEMAAMAGYAKEFEKRGVKLLGISCDDVESHRQWTKDVEAYGGKQQQQQATTTKVTFPILADPARDAIRQLNMVDPDEKDAAGRSMPSRALHVVGPDKAVKLSFLYPATTGRNMDEVLRAVDSLLTAAKHGGKVATPANWKPGECAVIAPGVSDEEARKMFPQGFETADLPSKKGYLRFTKV

SEQ ID NO: 1846 - protein, 233 aa, Zea mays
MALRTLASKNALSFALGGAARPSAASARGVTTVALPDLSYDFGALEPAISGEIMRLHHQKHHATYVGNYNKALEQLDAAVAKGDASAVVQLQGAIKFNGGGHVNHSIFWKNLKPISEGGGEPPHGKLGWAIDEDFGSFEALVKRMNAEGAALQGSGWVWLALDKEPKKLSVETTANQDPLVTKGASLVPLLGIDVWEHAYYLQYKNVRPDYLNNIWKVMNWKYAGEVYENVLA

SEQ ID NO: 1847 - protein, 238 aa, Zea mays
MLAVFSGQVVEVPAELVAAGSRTPSPKTKASQLVGRFLAASEPAVSVQLGDHGHLAYSHTNQALLRPRSFAAKDEVFCLFEGVLDNLGRLSQQHGLSSKGANEVLLVIEAYKTLRDRAPYPASFMLAQLTGSYAFVLFDKSTNSLLVASDPEGRVPLFWGITADGCVAFSDDIDMLKGSCGKSLAPFPQGCFYSNALGGLKCYENPKHKVTAVPADEEEICGATFKVVEGSTVLTALH

SEQ ID NO: 1848 - protein, 246 aa, Zea mays
MSFVQLSGAGVAAVAFTNKSLVSRHAALRVCSSRRSIRSLVVKAATVVTPKYTSLKPLGDRVLVKLGAAEEKTVGGILLPSTAQTKPQGGEVVAVGAGRTIGDKKIAVDIETGAQVVYSKYAGTEVEFNDSKHLILKEDDIIGILETDDVKDMKPLNDRVLIKVAEAEDKTPGGLILTETTKEKPSIGTVVAVGPGPLDEEGKRQPLSVSAGSTVLYSKYAGSEFKGADGTAYIVLRASDVMAVLS

SEQ ID NO: 1849 - protein, 238 aa, Zea mays
MSAASKKLFQAARSLVLSASNRSVLAAEGRTAALATLTNFGRKTLPTAYLSYHKQGSHHAASGWGAIAAAVPAAVYMLQDQEAHAAEMERTFIAIKPDGVQRGLISEIMSRFERKGYKLVAIKLIVPSKEFAEKHYHDLKERPFFSGLCDFLSSGPVLAMVWEGEGVIKYGRKLIGATDPQKSEPGTIRGDLAIVVGRNIIHGSDGPETAKDEIALWFEPKELVSYTSNAEKWIYGVN

SEQ ID NO: 1850 - protein, 269 aa, Zea mays
PQLVALGLALLCAVAGPAAAQNCGCQPNVCCSKFGYCGTTDEYCGDGCQSGPCRSGRGGGGSGGGGANVASVVTSSFFNGIKNQAGSGCEGKNFYTRSAFLSAVKGYPGFAHGGSQVQGKREIAAFFAHATHETGHFCYISEINKSNAYCDPTKRQWPCAAGQKYYGRGPLQISWNYNYGPAGRAIGFDGLGDPGRVARDAVVAFKAALWFWMNSVHGVVPQGFGATTRAMQRALECGGNNPAQMNARVGYYRQYCRQLGVDPGPNLTC

SEQ ID NO: 1851 - protein, 244 aa, Zea mays
MSSEAVKVAVPESVLRKRKREEQWAAEKKEKSLAERKKSIENRKLIFTRAKQYAEEYDAQEKELVQLKREARLKGGFYVSPEAKLLFVIRIRGINAMHPKTRKILQLLRLRQIFNGVFLKVNKATINMLRRVEPYVAYGYPNLKSVRELIYKRGYGKLNKQRIPLSNNQVIEEGLGKHNIICIEDLVHEIMTVGPHFKEANNFLWPFKLKAPLGGLKKKRNHYVEGGDAGNRENYINELIKRMN

SEQ ID NO: 1852 - protein, 303 aa, Zea mays
MQGLAPPTSVSIHRHLPARSRARASNSVRFSPRAVSSVPPAECLQAPFHKPVADLPAAARQRGTVKWFNDTKGFGFISPEDGSEDLFVHQSSIKSEGFRSLAEGEEVEFSVSEGDDGRTKAVDVTGPDGSFVRGGGGGGGGGGGYGSRGGGGSGGGGRSYGGSWGGGRRSGGGGGPGACYKCGEPGHMARDCPSADGGGGYGGGGYGGGGYGGGGGGGGGCFKCGEPGHMARDCSSGGGGYGGGGGGGGGGCYNCGQAGHMARDCPSGGGSGGGRFGGGGGGGGDRSCYNCGEAGHIARDCPT

SEQ ID NO: 1853 - protein, 303 aa, Zea mays
MGGSGRAALLLALVAVSLAVEIQADAGYGYGGGYTPTPTPATPTPKPEKPPTKGPKPDKPPKEHKPPKEHGPKPEKPPKEHKPTPPTYTPSPKPTPPTYTPTPPPTPKPTPPTYTPAPTPHKPTPKPTPTPPTYTPSPKPPTPKPTPPTYTPSPKPPATKPPTPKPTPPTYTPSPKPPTPKPTPPTYTPSPKPPTPKPTPPTYTPSPKPPTPKPTPPTYTPSPKPPATKPPTPKPTPPTYTPSPKPPTPKPSPPTYTPSPKPPTPKPTPPTYTPTPKPPATKPPTYTPTPPVSHTPSPPPPYY

SEQ ID NO: 1854 - protein, 311 aa, Zea mays
MAARCPYFAVEESSRGIRSGESPAAALRRILATPGAHQAPCCYDALGARLVERAGFPIGFMGGFCVSAARLGLPDVGLISYGEMVDQGRLINEAVSIPVIGDGDNGYGNSMNIKRTIKGYINAGFAGIMLEDQVAPKACGHTEGRKVISREEAVMHIKAAVDARKESGSDIVIVARTDSRQAISHDEALWRVKAFADAGADVLFIDALASVEEMKAFCAVAPEVPKMANMLEGGGKTPILSPAELEEIGFRLVVYPLSLVGVSMRAMQDALVAIKDGGVPPPSVLPSFQEIKDTLGFNRYYKEEKQYQVDK

SEQ ID NO: 1855 - protein, 335 aa, Zea mays
MAPLGDGGAAAAAASNNLVVSFGEMLIDFVPDVAGLSLAESGGFVKAPGGAPANVACAIAKLGGSSAFVGKFGDDEFGHMLVNILKQNNVNAEGCLFDKHARTALAFVTLKHDGEREFMFYRNPSADMLLTEAELDLGLVRRARVFHYGSISLISEPCRSAHMAAMRAAKAAGVLCSYDPNVRLPLWPSPDAAREGILSIWKEADFIKVSDDEVAFLTRGDANDEKNVLSLWFDGLKLLVVTDGDKGCRYFTKDFKGSVPGFKVDTVDTTGAGDAFVGSLLVNVAKDDSIFHNEEKLREALKFSNACGAICTTKKGAIPALPTVATAQDLIAKAN

SEQ ID NO: 1856 - protein, 340 aa, Zea mays
MRPSLMRSTSQLLRRRSYSSASGQPERKVAILGAAGGIGQPLSLLMKLNPLVSSLSLYDIAGTPGVAADVSHINSPALVKGFMGDEQLGEALEGSDVVIIPAGVPRKPGMTRDDLFNINAGIVKNLSTAIAKYCPNALVNMISNPVNSTVPIAAEVFKKAGTYDEKKLFGVTTLDVVRAKTFYAGKANLPVTDVNVPVVGGHAGITILPLFSQATPATNALSDEDIKALTKRTQDGGTEVVEAKAGKGSATLSMAYAGAVFADACLKGLNGVPDIVECSFVQSTVTELPFFASKVRLGKNGVEEVLGLGELSDFEKEGLEKLKSELKSSIEKGIKFANDN

SEQ ID NO: 1857 - protein, 381 aa, Zea mays
MASPTQGQVITCKAAVAYEPNKPLVIEDVQVAPPQAGEVRVKILFTALCHTDHYTWSGKDPEGLFPCILGHEAAGIVESVGEGVTDVQPGDHVIPCYQAECKECKFCKSGKTNLCGKVRSATGVGVMMNDMKSRFSVNGKPIYHFMGTSTFSQYTVVHDVSVAKINPQAPLDKVCLLGCGVPTGLGAVWNTAKVESGSVVAVFGLGTVGLAVAEGAKAAGASRVIGIDIDNKKFDVAKNFGVTEFVNPKEHDKPIQQVLVDLTDGGVDYSFECIGNVSIMRAALECSDKGWGTSVIVGVAASGQEISTRPFQLVTGRVWKGTAFGGFKSRTQVPWLVDKYMKKEIKVDEYITHNMNLADINDAFHLLHEGGCLRCVLAMQI

SEQ ID NO: 1858 - protein, 425 aa, Zea mays
MAAAATTPHSLLLQRAAIPAAPSRASAAASPVRLPVRAARISCAAVAAPSPAAAAAADEVERGVYNFAAGPATLPLSVLKRAQAELVDYHGSGMSIMEMSHRGKEFDAAIKKAESDLRALLAVPDTHAVLFLQGGATTQFAAVPLNLCTGPSDPADFVVSGSWSDKAFKEAKKFSAASVAWSGKDGKYTALPPFDAIAQNPEARFLHICSNETIHGVEFKDYPEPRNRSGILVADMSSNFCSKPVDVSRFGVIYAGAQKNVGPSGVTIAIVRKDLIGAAQPITPVMLDFKTHADNASLYNTPPCFAIYVCGLVFEDLLAQGGLAEVEKKNARKAGALYDTIDASGGYYVCPVDKSVRSHMNVPFTLAKGPDFEKQFIAEAAKEGMVQLKGHRSVGGVRASIYNAMPLAGVEKLVAFMKDFQARNP

SEQ ID NO: 1859 - protein, 461 aa, Zea mays
MQSLLLPTAAVAPVAPPCGRRNLPGRLSVRASATVVAAPRRETDPKKRVVITGMGLVSVFGNDVDAYYDRLLVGESGIGPIDRFDASKFPTRFAGQIRGFSSEGYIDGKNDRRLDDCLRYCIVSGKKALEASGIAHGSKPMEKIDKTRAGVLVGTGMGGLTVFSDGVQNLIEKGYRKITPFFIPYAITNMGSALLGMDIGFMGPNYSISTACATSNYCFYAAANHIRRGEADIMIAGGTEAAIIPIGVGGFVACRALSQRNDDPKTASRPWDKDRDGFVMGEGAGVLVMESLEHAMKRDAPIIAEYLGGAVNCDAYHMTDPRSDGLGVSSCIKQSLKDAGVAPEEVNYINAHATSTLAGDLAEVNAIKQVFKDPSGIKINATKSMIGHCLGAAGGLEAIATIKAITTGWVHPSINQFNPEEAVEFDTVPNVKKQHEVNVGISNSFGFGGHNSVVVFAPFKP

SEQ ID NO: 1860 - protein, 559 aa, Zea mays
MGSSGFSWTLPDHPKLPKGKSVAVVVLDGWGEANPDQYNCIHVAQTPVMDSLKNGAPEKWRLVKAHGTAVGLPSDDDMGNSEVGHNALGAGRIFAQGAKLVDQALASGKIYDGDGFNYIKESFESGTLHLIGLLSDGGVHSRLDQLQLLLKGVSERGAKKIRVHILTDGRDVLDGSSIGFVETLENDLLELRAKGVDAQIASGGGRMYVTMDRYENDWDVVKRGWDAQVLGEAPYKFKSALEAVKTLRAQPKANDQYLPPFVIVDDSGNAVGPVLDGDAVVTINFRADRMVMLAKALEYADFDNFDRVRVPKIRYAGMLQYDGELKLPSRYLVSPPEIDRTSGEYLVKNGIRTFACSETVKFGHVTFFWNGNRSGYFDATKEEYVEVPSDSGITFNVAPNMKALEIAEKARDALLSGKFDQVRVNLPNGDMVGHTGDIEATVVACKAADEAVKIILDAVEQVGGIYLVTADHGNAEDMVKRNKSGKPLLDKNDRIQILTSHTLQPVPVAIGGPGLHPGVKFRNDIQTPGLANVAATVMNLHGFEAPADYEQTLIEVADN

SEQ ID NO: 1861 - protein, 593 aa, Zea mays
MSEQQQPLPQPRSSMREALEKEDKEKAAAAAAAKEKAAVPKNGNGNGGKNGGGAGSGNGGAPPQSGEETAREIQVVREAYRRETAAPAYVIPEEPPAVVELVGWYIYGFCSYFITHLLLPVLFPAIITQVAFPNSDFTPDPKYTLKGVTCSVHEMSMYQRLTKHSIVIDGSRMSPLGWSGLSWAIGILIVAPLLTQTAHHLDRGQYQSLILIAATSFGSFFCLLTGFFKTVWVFLFYILFIAGSIIVAEAVHTRNLGLMIRGLAAHDSGKHLVLRRRAAASQLSLYCTAIGGIGAALMAAFMYHMLRRTDQLTGLWVVSIFCGLIWFIGICHGLFTNRPSSSSPTTAFEPNFFTKLSYSMTLLRYPQAIGSLVAVFLSSFATMCIFTSGTLYAIGGVCIKPVLVLALWILYFLFPLISLPLLHPIQIIIRADAVRMQLLGFIICLFVSGAGFYFKSHRWRAAHIIVIALVQSTANGILYAFGRILLLDASPPGKEGAFSVWYAFVRVTGAMIGFAASSAGPGRAGGSFAAAFLGSFLGIIVLIFGNVSNIGALKAAGHLKGMDDEKRMGGLGMEKGEGMGSAVADSGESRGRV

SEQ ID NO: 1862 - protein, 624 aa, Zea mays
MASSLLSSPAKPTITTTTKTTPAPRPARSAHVHVLSAARCLRLRLRASSQHPPPPPTPRSRRPEYVPNRIDDPNYVRIFDTTLRDGEQSPGATMTSAQKLVVARQLARLGVDIIEAGFPASSPDDLDAVRSIAIEVGNPAPAGEDAAVHVPVICGLSRCNRRDIDAAWEAVRHARRPRIHTFIATSDIHMQHKLRKTPDQVVAIAREMVAYARSLGCTDVEFSPEDAGRSNREFLYHILGEVIKAGATTLNIPDTVGYNLPYEFGKLIADIKANTPGIEKAIISTHCQNDLGLATANTLAGARAGARQLEVTINGIGERAGNASLEEVVMAIKCRRELLDGLYTGIDSRHITLTSKMVQEHSGLHVQPHKAIVGANAFAHESGIHQDGMLKYKGTYEIISPDDIGLTRANEFGIVLGKLSGRHAVRSKLVELGYEIGDKEFEDFFKRYKEVAEKKKRVTDEDLEALLSDEIFQPKVIWSLADVQATCGTLALSTATVKLIAPDGEEKIACSVGTGPVDAAYKAVDKIIQIPTVLREYSMTSVTEGIDAIATTRVVVTGDVSNNAKHALTGQSFNRSFSGSGASMDIVVSSVRAYLSALNKICSFAGAVKASSDVAETASVPSTE

SEQ ID NO: 1863 - protein, 649 aa, Zea mays
MAGKGDGPAIGIDLGTTYSCVGVWQHDRVEIIANDQGNRTTPSYVAFTDSERLIGDAAKNQVAMNPINTVFDAKRLIGRRFSDASVQSDIKLWPFKVISGPGEKPMIVVQHKGEEKQFAAEEISSMVLIKMREIAEAYLGSTIKNAVVTVPAYFNDSQRQATKDAGVIAGLNVLRIINEPTAAAIAYGLDKKATSVGEKNVLIFDLGGGTFDVSLLTIEEGIFEVKATAGDTHLGGEDFDNRMVNHFVQEFKRKNKKDITGNPRALRRLRTACERAKRTLSSTAQTTIEIDSLYEGIDFYSTITRARFEELNMDLFRKCMEPVEKCLRDAKMDKSTVHDVVLVGGSTRIPRVQQLLQDFFNGKELCKNINPDEAVAYGAAVQAAILSGEGNEKVQDLLLLDVTPLSLGLETAGGVMTVLIPRNTTIPTKKEQVFSTYSDNQPGVLIQVYEGERTRTRDNNLLGKFELSGIPPAPRGVPQITVCFDIDANGILNVSAEDKTTGQKNKITITNDKGRLSKEEIEKMVQDAEKYKSEDEEHKKKVEAKNSLENYSYNMRNTIKDEKIASKLPADDKKKIEDAIDAAISWLDANQLAEADEFEDKMKELESLCNPIIAKMYQGAGEDMGGAGGMDEDAPAGSGGPGPKIEEVD

SEQ ID NO: 1864 - protein, 931 aa, Zea mays
MSKNLMQALLFFLLLLIKFFPSHTSVPHAMNAMQDLPSIAMSSNQNESGGGGGAGPPLPTAFKSPSTDGKSGSRRSTRFKDEDEYVEVTLDVRDGGGGGDDVAVLAIKDDVRDDTQDAASLLDRPAPGGAGGGLSSKLRAARARLGRIASGKRAAVPLSALLRRDPDRARLDRSVVTALRGLQFLNQAAVTEGWPEVEKRFHRLAVDGFLLRSRFGQCIGMVGSEEFAAQIFDALARRRGITAMVLTKDQVREFWEQLSDPGFDAKLQTFFDMVDKNADGQITEEELKEVLTLTASANKLSKILERVDEYTALIMEELDPDSLGYIEIANLESLLLQPPSQAPTRLVTHSSNISQLISQRLAPARDDGPLRRGARAVLYFAEDNWKRVWVMALWLAINAGLFTWKFLAYRRHPTFDVMGYCVCVAKGGAETTKFNMALILLPVCRNTITWLRSRTRLGAAVPFNDNINFHKVVAGGVAVGVALHAVTHLTCDFPRLLHASAAAYEPMKAYFGQRRIPNYWWFVRGVEGITGVIMVVLMAVAYTLAHPWFRRGKLSEGNPLRRLSGFNMFWYSHHLFVIVYVAFVVHGVCLYINRTWYKQTTWMYLAIPILLYAGERLLRALRSHGLTTVRIEKVALYPGNVIAIHMSKPHGFSYKSGQYIYVNCGEVSPFEWHPFTITSAPGDDYLSMHIRCRGDWTASFRALFAQVCRPPAAGQSGLLRADFASSTAAGGGGKLPKLLIDGPYGAPAQDYRKYDVLLLIGLGIGATPLISIVKDVLNNISDNKDEEQPAEFMTRRVYFYWCTREEGSFEWFRGVMNEVAERDARGDVVELHNHCTSVYEEGDARSALLVMLQALHHAKSGVDVVSGTRVRTHFARPNWRDVFKRVACNHQGQRVGVFYCGDQKVTPELRRLSQDFSHKTTTKFVFHKENF

SEQ ID NO: 1865 - protein, 1939 aa, Sus scrofa
MSSDQEMAIFGEAAPYLRKSEKERIEAQNKPFDAKTSVFVAEPKESFVKGTVQSREGGKVTVKTEAGATLTVKEDQVFPMNPPKFDKIEDMAMMTHLHEPAVLYNLKERYAAWMIYTYSGLFCVTVNPYKWLPVYNAEVVTAYRGKKRQEAPPHIFSISDNAYQFMLTDRENQSILITGESGAGKTVNTKRVIQYFATIAVTGEKKKEEPTSGKMQGTLEDQIISANPLLEAFGNAKTVRNDNSSRFGKFIRIHFGTTGKLASADIETYLLEKSRVTFQLKAERSYHIFYQIMSNKKPELIEMLLITTNPYDYAFVSQGEITVPSIDDQEELMATDSAIEILGFTSDERVSIYKLTGAVMHYGNLKFKQKQREEQAEPDGTEVADKAAYLQGLNSADLLKALCYPRVKVGNEFVTKGQTVQQVYNAVGALAKAVYDKMFLWMVTRINQQLDTKQPRQYFIGVLDIAGFEIFDFNSLEQLCINFTNEKLQQFFNHHMFVLEQEEYKKEGIEWEFIDFGMDLAACIELIEKPMGIFSILEEECMFPKATDTSFKNKLYEQHLGKSNNFQKPKPAKGKVEAHFSLIHYAGTVDYNITGWLDKNKDPLNETVVGLYQKSSVKTLAFLFTGAAGADAEAGGGKKGGKKKGSSFQTVSALFRENLNKLMTNLRSTHPHFVRCIIPNETKTPGAMEHELVLHQLRCNGVLEGIRICRKGFPSRILYADFKQRYKVLNASAIPEGQFIDSKKASEKLLGSIDIDHTQYKFGHTKVFFKAGLLGLLEEMRDEKLAQLITRTQARCRGFLARVEYQKMVERRESIFCIQYNIRAFMNVKHWPWMKLYFKIKPLLKSAETEKEMANMKEEFEKTKESLAKAEAKRKELEEKMVALMQEKNDLQLQVQAEADSLADAEERCDQLIKTKIQLEAKIKEVTERAEDEEEINAELTAKKRKLEDECSELKKDIDDLELTLAKVEKEKHATENKVKNLTEEMAGLDETIAKLTKEKKALQEAHQQTLDDLQAEEDKVNTLTKAKTKLEQQVDDLEGSLEQEKKLRMDLERAKRKLEGDLKLAQESTMDIENDKQQLDEKLKKKEFEMSNLQSKIEDEQALAMQLQKKIKELQARIEELEEEIEAERASRAKAEKQRSDLSRELEEISERLEEAGGATSAQIEMNKKREAEFQKMRRDLEEATLQHEATAATLRKKHADSVAELGEQIDNLQRVKQKLEKEKSEMKMEIDDLASNMETVSKAKGNLEKMCRTLEDQLSELKTKEEEQQRLINDLTAQRARLQTESGEYSRQLDEKDTLVSQLSRGKQAFTQQIEELKRQLEEEIKAKSALAHAVQSSRHDCDLLREQYEEEQEAKAELQRAMSKANSEVAQWRTKYETDAIQRTEELEEAKKKLAQRLQDAEEHVEAVNAKCASLEKTKQRLQNEVEDLMIDVERSNAACAALDKKQRNFDKILAEWKQKYEETHAELEASQKESRSLSTELFKVKNAYEESLDQLETLKRENKNLQQEISDLTEQIAEGGKRIHELEKIKKQVEQEKSEIQAALEEAEASLEHEEGKILRIQLELNQVKSEVDRKIAEKDEEIDQLKRNHVRVVESMQSMLDAEIRSRNDAIRLKKKMEGDLNEMEIQLNHANRMAAEALRNYRNTQGILKDTQIHLDDALRSQEDLKEQLAMVERRANLLQAEIEELRATLEQTERSRKVAEQELLDASERVQLLHTQNTSLINTKKKLETDISQIQGEMEDIIQEARNAEEKAKKAITDAAMMAEELKKEQDTSAHLERMKKNLEQTVKDLQHRLDEAEQLALKGGKKQIQKLEARVRELEGEVESEQKRNVETVKGLRKHERRVKELTYQTEEDRKNILRLQDLVDKLQAKVKSYKRQAEEAEEQSNVNLSKFRKLQHELEEAEERADIAESQVNKLRVKSREVHTKIISEE

SEQ ID NO: 1866 - protein, 1939 aa, Sus scrofa
MSSDQEMAIFGEAAPYLRKSEKERIEAQNRPFDAKTSVFVAEPKESFVKGTIQSREGGKVTVKTEAGATLTVKEDQVFPMNPPKFDKIEDMAMMTHLHEPGVLYNLKERYAAWMIYTYSGLFCVTVNPYKWLPVYNPEVVTAYRGKKRQEAPPHIFSISDNAYQFMLTDRENQSILITGESGAGKTVNTKRVIQYFATIAVTGEKKKEEPTSGKMQGTLEDQIISANPLLEAFGNAKTVRNDNSSRFGKFIRIHFGTTGKLASADIETYLLEKSRVTFQLKAERSYHIFYQITSNRKPELIEMLLITTNPYDYPFISQGEISVASIDDQEELIATDSAIDILGFTNEEKVSIYKLTGAVMHYGNLKFKQKQREEQAEPDGTEVADKAAYLQSLNSADLLKALCYPRVKVGNEYVTKGQTVEQVTNAVGALAKAVYEKMFLWMVTRINQQLDTKQPRQYFIGVLDIAGFEIFDFNSLEQLCINFTNEKLQQFFNHHMFVLEQEEYKREGIEWTFIDFGMDLAACIELIEKPMGIFSILEEECMFPKATDTSFKNKLYEQHLGKSANFQKPKPAKGKVEAHFSLIHYAGTVDYNITGWLDKNKDPLNDTVVGLYQKSALKTLAFLFSGAQTGEAEAGGTKKGGKKKGSSFQTVSALFRENLNKLMTNLRSTHPHFVRCIIPNETKTPGAMEHELVLHQLRCNGVLEGIRICRKGFPSRILYADFKQRYKVLNASAIPEGQYIDSKKASEKLLASIDIDHTQYKFGHTKVFFKAGLLGLLEEMRDDKLAQLITRTQARCRGFLARVEYQKMVERRESIFCIQYNIRAFMNVKHWPWMKLFFKIKPLLKSAETEKEMATMKEEFQKTKDELAKSEAKRKELEEKMVTLLKEKNDLQLQVQAEAEGLADAEERCDQLIKTKIQLEAKIKEVTERAEDEEEINAELTAKKRKLEDECSELKKDIDDLELTLAKVEKEKHATENKVKNLTEEMAGLDETIAKLTKEKKALQEAHQQTLDDLQAEEDKVNTLTKAKTKLEQQVDDLEGSLEQEKKLRMDLERAKRKLEGDLKLAQESIMDIENEKQQLDEKLKKKEFEISNLQSKIEDEQALAIQLQKKIKELQARIEELEEEIEAERASRAKAEKQRSDLSRELEEISERLEEAGGATSAQIEMNKKREAEFQKMRRDLEEATLQHEATAAALRKKHADSVAELGEQIDNLQRVKQKLEKEKSEMKMEIDDLASNMETVSKAKGNLEKMCRTLEDQLSELKSKEEEQQRLINDLTAQRGRLQTESGEFSRQLDEKEALVSQLSRGKQAYTQQIEELKRQLEEEIKAKNALAHALQSSRHDCDLLREQYEEEQESKAELQRALSKANTEVAQWRTKYETDAIQRTEELEEAKKKLAQRLQAAEEHVEAVNAKCASLEKTKQRLQNEVEDLMLDVERTNAACAALDKKQRNFDKILAEWKQKYEETHAELEASQKEARSLGTELFKMKNAYEESLDQLETLKRENKNLQQEISDLTEQIAEGGKRIHELEKIKKQVEQEKSEIQAALEEAEASLEHEEGKILRIQLELNQVKSEVDRKIAEKDEEIDQLKRNHVRVVESMQSMLDAEIRSRNDAIRLKKKMEGDLNEMEIQLNHANRMAAEALRNYRNTQGILKDTQIHLDDALRGQEDLKEQLAMVERRANLLQAEIEELRATLEQTERSRKVAEQELLDASERVQLLHTQNTSLINTKKKLETDISQMQGEMEDILQEARNAEEKAKKAITDAAMMAEELKKEQDTSAHLERMKKNMEQTVKDLQHRLDEAEQLALKGGKKQIQKLEARVRELEGEVESEQKRNAEAVKGLRKHERRVKELTYQTEEDRKNILRLQDLVDKLQAKVKSYKRQAEEAEEQSNTNLSKFRKLQHELEEAEERADIAESQVNKLRVKSREVHTKVISEE

SEQ ID NO: 1867 - protein, 1937 aa, Sus scrofa
MSSDQEMAIFGEAAPYLRKSEKERIEAQNKPFDAKTSVFVAEPKESFVKGTVQSREGGKVTVKTEAGATLTVKEDQVFPMNPPKFDKIEDMAMMTHLHEPAVLYNLKERYAAWMIYTYSGLFCVTVNPYKWLPVYNAEVVTAYRGKKRQEAPPHIFSISDNAYQFMLTDRENQSILITGESGAGKTVNTKRVIQYFATIAVTGEKKKEEPTPGKMQGTLEDQIISANPLLEAFGNAKTVRNDNSSRFGKFIRIHFGTTGKLASADIETYLLEKSRVTFQLKAERSYHIFYQIMSNKKPELIEMLLITTNPYDYAFVSQGEITVPSIDDQEELMATDSAIEILGFTSDERVSIYKLTGAVMHYGNLKFKQKQREEQAEPDGTEVADKAAYLQGLNSADLLKALCYPRVKVGNEFVTKGQTVQQVYNAVGALAKAVYDKMFLWMVTRINQQLDTKQPRQYFIGVLDIAGFEIFDFNSLEQLCINFTNEKLQQFFNHHMFVLEQEEYKKEGIEWEFIDFGMDLAACIELIEKPMGIFSILEEECMFPKATDTSFKNKLYEQHLGKSNNFQKPKPAKGKAEAHFSLIHYAGTVDYNITGWLDKNKDPLNETVVGLYQKSSVKTLAFLFAERQSSEEGGTKKGGKKKGSSFQTVSALFRENLNKLMTNLRSTHPHFVRCIIPNETKTPGAMEHELVLHQLRCNGVLEGIRICRKGFPSRILYADFKQRYKVLNASAIPEGQFIDSKKASEKLLGSIDIDHTQYKFGHTKVFFKAGLLGTLEEMRDEKLAQLITRTQAMCRGFLMRVEFRKMMERRESIFCIQYNIRAFMNVKHWPWMKLYFKIKPLLKSAETEKEMANMKEEFEKTKEDLAKSEAKRKELEEKMVALMQEKNDLQLQVQAEADGLADAEERCDQLIKTKIQLEAKIKEVTERAEDEEEINAELTAKKRKLEDECSELKKDIDDLELTLAKVEKEKHATENKVKNLTEEMAGLDENIAKLTKEKKALQEAHQQTLDDLQAEEDKVNTLTKAKTKLEQQVDDLEGSLEQEKKLRMDLERAKRKLEGDLKLAQESTMDIENDKQQLDEKLKKKEFEMSNLQSKIEDEQALAMQLQKKIKELQARTEELEEEIEAERASRAKAEKQRSDLSRELEEISERLEEAGGATSAQIEMNKKREAEFQKMRRDLEEATLQHEATAAALRKKHADSVAELGEQIDNLQRVKQKLEKEKSELKMEIDDLASNMETVSKAKGNLEKMCRTLEDQLSEVKTKEEEHQRLINELSAQKARLQTESGEFSRQLDEKEALVSQLSRGKQAFTQQIEELKRQLEEETKAKSALAHAVQSSRHDCDLLREQYEEEQEAKAELQRAMSKANSEVAQWRTKYETDAIQRTEELEEAKKKLAQRLQDAEEHVEAVNAKCASLEKTKQRLQNEVEDLMLDVERSNAACAALDKKQRNFDKILAEWKHKYEETQAELEASQKESRSLSTELFKVKNAYEESLDQLETLKRENKNLQQEISDLTEQIAEGGKHIHELEKVKKQIEQEKSELQAALEEAEASLEHEEGKILRIQLELNQVKSEIDRKIAEKDEEIDQMKRNHIRVVESMQSTLDAEIRSRNDALRIKKKMEGDLNEMEIQLNHANRQATEAIRNLRNTQGVLKDTQLHLDDAIRGQDDLKEQLAMVERRANLMQAEIEELRASLEQTERSRRVAEQELLDASERVQLLHTQNTSLINTKKKLETDISQIQGEMEDIVQEARNAEEKAKKAITDAAMMAEELKKEQDTSAHLERMKKNMEQTVKDLQHRLDEAEQLALKGGKKQIQKLEARVRELENEVENEQKRNVEAVKGLRKHERRVKELTYQTEEDRKNVLRLQDLVDKLQSKVKAYKRQAEEAEEQSNVNLSKFRKLQHELEEAEERADIAESQVNKLRVKSREVHTKVISEE

SEQ ID NO: 1868 - protein, 1935 aa, Sus scrofa
MVDAEMAAFGEAAPYLRKSEKERLEAQTRPFDLKKDVYVPDDKEEFVKAKILSREGGKVTAETEHGKTVTVKEDQVLQQNPPKFDKIEDMAMLTFLHEPAVLYNLKERYASWMIYTYSGLFCVTINPYKWLPVYNAEVVAAYRGKKRSEAPPHIFSISDNAYQYMLTDRENQSILITGESGAGKTVNTKRVIQYFAVIAAIGDRSKKEQTPGKGTLEDQIIQANPALEAFGNAKTVRNDNSSRFGKFIRIHFGATGKLASADIETYLLEKSRVIFQLKAERDYHIFYQILSNKKPELLDMLLITNNPYDYAFISQGETTVASIDDAEELMATDNAFDVLGFTSEEKNSMYKLTGAIMHFGNMKFKLKQREEQAEPDGTEEADKSAYLMGLNSADLLKGLCHPRVKVGNEYVTKGQNVQQVMYATGALAKAVYEKMFNWMVTRINTTLETKQPRQYFIGVLDIAGFEIFDFNSFEQLCINFTNEKLQQFFNHHMFVLEQEEYKKEGIEWEFIDFGMDLQACIDLIEKPMGIMSILEEECMFPKATDMTFKAKLYDNHLGKSNNFQKPRNIKGRPEAHFALIHYAGTVDYNIIGWLQKNKDPLNETVVDLYKKSSLKLLSNLFANYAGADTPVEKGKGKAKKGSSFQTVSALHRENLNKLMTNLRSTHPHFVRCIIPNETKSPGVIDNPLVMHQLRCNGVLEGIRICRKGFPNRILYGDFRQRYRILNPAAIPEGQFIDSRKGAEKLLGSLDIDHNQYKFGHTKVFFKAGLLGLLEEMRDERLSRIITRIQAQSRGVLSRMEFKKLLERRDSLLIIQWNIRAFMSVKNWPWMKLYFKIKPLLKSAETEKEMATMKEEFGRLKEALEKSEARRKELEEKMVSLLQEKNDLQLQVQAEQDNLADAEERCDQLIKNKIQLEAKVKEMTERLEDEEEMNAELTAKKRKLEDECSELKRDIDDLELTLAKVEKEKHATENKVKNLTEEMAGLDEIIAKLTKEKKALQEAHQQALDDLQAEEDKVNTLTKAKVKLEQHVDDLEGSLEQEKKVRMDLERAKRKLEGDLKLTQESIMDLENDKQQLDERLKKKDFELNALNARIEDEQALGSQLQKKLKELQARIEELEEELEAERTARAKVEKLRSDLSRELEEISERLEEAGGATSVQIEMNKKREAEFQKMRRDLEEATLQHEATAAALRKKHADSVAELGEQIDNLQRVKQKLEKEKSEFKLELDDVTSNMEQIIKAKANLEKMCRTLEDQMNEHRSKAEETQRSVNDLTSQRAKLQTENGELSRQLDEKEALISQLTRGKLTYTQQLEDLKRQLEEEVKAKNALAHALQSARHDCDLLREQYEEETEAKAELQRVLSKANSEVAQWRTKYETDAIQRTEELEEAKKKLAQRLQDAEEAVEAVNAKCSSLEKTKHRLQNEIEDLMVDVERSNAAAAALDKKQRNFDKILAEWKQKYEESQSELESSQKEARSLSTELFKLKNAYEESLEHLETFKRENKNLQEEISDLTEQLGSSGKTIHELEKVRKQLEAEKLELQSALEEAEASLEHEEGKILRAQLEFNQIKAEMERKLAEKDEEMEQAKRNHLRVVDSLQTSLDAETRSRNEALRVKKKMEGDLNEMEIQLSHANRMAAEAQKQVKSLQSLLKDTQIQLDDAVRANDDLKENIAIVERRNNLLQAELEELRAVVEQTERSRKLAEQELIETSERVQLLHSQNTSLINQKKKMEADLSQLQTEVEEAVQECRNAEEKAKKAITDAAMMAEELKKEQDTSAHLERMKKNMEQTIKDLQHRLDEAEQIALKGGKKQLQKLEARVRELENELEAEQKRNAESVKGMRKSERRIKELTYQTEEDRKNLLRLQDLVDKLQLKVKAYKRQAEEAEEQANTNLSKFRKVQHELDEAEERADIAESQVNKLRAKSRDIGTKGLNEE

SEQ ID NO: 1869 - protein, 377 aa, Sus scrofa; identical to SEQ ID NO: 898

SEQ ID NO: 1870 - protein, 1992 aa, Sus scrofa
  MOD_RES (653)..(653): Any amino acid
  MOD_RES (1020)..(1020): Any amino acid
MTTQAPTFTQPLQSVVVLEGSTATFEAHVSAKCCVHLSLCSCMGKIIVQLTFLRAELSFRDGLARLTIPAVTKANSGRYSLRATNGSGQATSTAELLVTAETAPPNFVQRLQSMTVRQGSQVRLQVRVTGIPGAEIQSSVDFQISQEGDLYSLLIAEAYPEDSGTYSVNATNSVGRATSTAELLVQGEEVVPAKKTKTIVSTAQISETRQTRIEKKIEAHFDARSIATVEMVIDGAAGQQLPHKTPPRIPPKPKSRSPTPPSIAAKAQLARQQSPSPIRHSPSPVRHVRAPTPSPVRSVSPAGRISTSPIRSVKSPLLIRKTPTMPPGPEVPPPWKQEGYMASTEAEMRETTVTSATQIRTEERWEGRYGIQEQVTISGAAGAAASVSASAAFAAGAVATGAAEVKQETDKSAAVATVVAAVDMARVREPVISAVEQTAQRTTTTAVHIQPAQEQIRKEAEKTAVTKVVVAADKAKEQELKSRTREVITTKQEQVHVTHEQIRKETEKAFVPKVVISTTKAKEQETRITGEITTKEEQKQITQEKIMKETRKTVVPKVIVATPKVKEQDLVSRTREGITTQREQVQITQEKMRKEAEKTALSTIAVATAKAKEQETILRTREEMATRQEQIQVIHGKVGVGKKAEAVATVVAXDQARVREPREPGHVEESHAQQTTLEYGYKEHVSAAKVTEHVSAAKVAEHPPRPASEPHVVPKAVKPRVIQAPSETHITTTDQMGMHISTQIKKTTDLTSERLVHVDKRPRTASPHFTVSKISVPKAEHGYEASIAGSAIATLQKELSATPSAQKVTKSVKAPTVKPAEARVRAEPTPSPQFPFADTAETFKSQAGIEVKKEVGVSITAAAVREERFEVLREREAKVTETARVPAPVEIPVTPPTLVSGLKNVTVIEGESVTLECHISGYPSPKVTWYREDYQIESSIDFQITFQSGIARLMIREAFAEDSGRFTCSAVNEAGTVSTSCYLAVQVSEEFEKETTAVAEKITTEEKRFDFFNPFSIVVXDTSIAEEPAAPGEPAAPFFITKPVVQKLVEGGSIVFECQVGGNPKPHVYWKKSGVPLTSGYRYKVSYNKQTGECKLVISMTFADDAGEYTIVIRNKHGETSASASLLEESDYESLMRSQQEMLYQTQMTAFVQEPKVGEIAPGYVYSEYEKEYEKEQALIRKKMAKDTVMVRTFVEDQEFHISSFEERLIKEIEYRIIKTTLEELLEEDGEEKMAVDISESEAIEAGFDLRVKNYRILEGMGVTFHCKMSGYPLPKIAWYKDGKRIRHGERYHMDFLQDGRASLRIPVVLPEDEGIYTAFASNIKGNAICSGKLYVEPAAPLSAPTYIPTPEPVSRIRSISPRSVSRSPIRISPARMSPARMSPARLSPGRRLEKPVFVLKPTSFKCLEGQTARFDLKVVGRPMPETFWFHNGQQIVNDYTHKVVIKEDGTQSLIIVPASPSDSGEWTVVAQNRAGKSSISVILTVEAVEHQVKPVFVEKLKNVNVKEGSRLEMKVRATGNPNPDIVWLKNSEIIVPHKYPKIRIEGTKGEAALKIDSTVSQDSAWYTATAINKAGRDTTRCKVNVEVEFAEPEPERRLIIPRGTYRAKEIAAPELEPLHLRYGQEQWEEGDLYDKEKQQKPFFKKKLTSLRLKRFGPAHFECRLTPIGDPTMVVEWLHDGKPLEAANRLRMINEFGYCSLDYGVAYSRDSGVITCRATNKYGTDHTSATLIVKDEKSLVEESQLPEGRKGLQRIEELERMAHEGALTGVTTDQKEKQKPDIVLFPEPVRVLEGETARFRCRVTGYPQPKVNWYLNGQLIRKSKRFRVRYDGIHYLDIVDCKSYDTGEVKVTAENPEGVTEHKVKLEIQQREDFRSVLRRAPEPKPEFHIHEPGKLQFEVQKVDRPVDTTETKEIVRLKRAERITHEKVPEESEELRSKFKRRTEEGYYEAITAVELKSRKKDESYEELLRKTKEELLHWTKELTEEEKKAL

SEQ ID NO: 1871 - protein, 842 aa, Sus scrofa
MSRPLTDQEKRKQISVRGLAGVENVAELKKNFNRHLHFTLVKDRNVANARDYYFALAYTVRDHLVGRWIRTQQHYYEKDPKRIYYLSLEFYMGRTLQNTMVNLALENACDEATYQLGLDMEELEEMEEDAGLGNGGLGRLAACFLDSMATLGLAAYGYGIRYEFGIFNQKITGGWQMEEADDWLRYGNAWEKARPEFTLPVHFYGRVEHTNQGAKWVDTQVVLAMPYDTPVPGYRNNVVNTMRLWSAKAPNDFNLKDFNVGGYIQAVLDRNLAENISRVLYPNDNFFEGKELRLKQEYFVVAATLQDIIRRFKSSKFGCRDPVRTSFDAFPDKVAIQLNDTHPSLAIPELMRILVDEERLEWEKAWDVTVRTCAYTNHTVLPEALERWPVHLMETLLPRHLQIIYEINQRFLNRVAAAYPGDVDRLRRMSLVEEGAVKRINMAHLCIAGSHAVNGVARIHSEILKKTIFKDFYELEPHKFQNKTNGITPRRWLVMCNPGLAEVIAERIGEEYIADLDQLRKLLSYVDDEAFIRDVAKVKQENKLKFSAYLEREYKVHINPNSLFDIQVKRIHEYKRQLLNCLHVITLYNRIKKEPNKFVVPRTVMIGGKAAPGYHMAKMIIKLITAIGDVVNHDPVVGDRLRVIFLENYRVSLAEKVIPAADLSEQISTAGTEASGTGNMKFMLNGALTIGTMDGANVEMAEEAGEENFFIFGMRVEDVERLDQKGYNAQEYYDRIPELRHVIDQLSSGFFSPKQPDLFKDIVNMLMHHDRFKVFADYEDYIKCQERVSALYKNPREWTRMVIRNIATSGKFSSDRTIAQYAREIWGVEPSRQRLPAPDEKI

SEQ ID NO: 1872 - protein, 894 aa, Sus scrofa
MNQVEPGVQYNYVYEDDEYMIQEEEWDRDLLLDPAWEKQQRKTFTAWCNSHLRKAGTQIENIEEDFRNGLKLMLLLEVISGERLPKPDRGKMRFHKIANVNKALDYIASKGVKLVSIGAEEIVDGNVKMTLGMIWTIILRFAIQDISVEETSAKEGLLLWCQRKTAPYRNVNIQNFHTSWKDGLGLCALIHRHRPDLIDYSKLNKDDPIGNINLAMEIAEKHLDIPKMLDAEDIVNTPKPDERAIMTYVSCFYHAFAGAEQAETAANRICKVLAVNQENERLMEEYERLASELLEWIRRTIPWLENRTPEKTMQAMQKKLEDFRDYRRKHKPPKVQEKCQLEINFNTLQTKLRISNRPAFMPSEGKMVSDIAGAWQRLEQAEKGYEEWLLNEIRRLERVEHLAEKFRQKASTHETWAYGKEQILLQKDYESASLTEVRALLRKHEAFESDLAAHQDRVEQIAAIAQELNELDYHDAVNVNDRCQKICDQWDRLGTLTQKRREALERTEKLLETIDQLHLEFAKRAAPFNNWMEGAMEDLQDMFIVHSIEEIQSLITAHEQFKATLPEADGERQSILAIQNEVEKVIQSYNIRISSSNPYSTVTVDDIRAKWDKVKQLVPIRDQSLQEELARQHANERLRRQFAAQANAIGPWIQNKMEEIARSSIQITGALEDQMNQLKQYEHNIINYKNNIDKLEGDHQLIQEALVFDNKHTNYTMEHIRVGWELLLTTIARTINEVETQILTRDAKGITQEQMNEFRASFNHFDRRKNGLMDHEDFRACLISMGYDLGEAEFARIMTLVDPNGQGTVTFQSFIDFMTRETADTDTAEQVIASFRILASDKPYILAEELRRELPPDQAQYCIKRMPAYSGPGSVPGALDYTAFSSALYGESDL

SEQ ID NO: 1873 - protein, 381 aa, Sus scrofa
MPFGNTHNKYKLNFKAEEEYPDLSKHNNHMAKALTLEIYKKLRDKETPSGFTLDDVIQTGVDNPGHPFIMTVGCVAGDEESYVVFKDLFDPIIQDRHGGYKPTDKHKTDLNHENLKGGDDLDPNYVLSSRVRTGRSIKGYTLPPHCSRGERRAVEKLSVEALNSLTGEFKGKYYPLKSMTEQEQQQLIDDHFLFDKPVSPLLLASGMARDWPDARGIWHNDNKSFLVWVNEEDHLRVISMEKGGNMKEVFRRFCVGLQKIEEIFKKAGHPFMWNEHLGYVLTCPSNLGTGLRGGVHVKLAHLSKHPKFEEILTRLRLQKRGTGGVDTAAVGSVFDVSNADRLGSSEVEQVQLVVDGVKLMVEMEKKLEKGQSIDDMIPAQK

SEQ ID NO: 1874 - protein, 607 aa, Sus scrofa
MKWVTFISLLFLFSSAYSRGVFRRDTYKSEIAHRFKDLGEQYFKGLVLIAFSQHLQQCPYEEHVKLVREVTEFAKTCVADESAENCDKSIHTLFGDKLCAIPSLREHYGDLADCCEKEEPERNECFLQHKNDNPDIPKLKPDPVALCADFQEDEQKFWGKYLYEIARRHPYFYAPELLYYAIIYKDVFSECCQAADKAACLLPKIEHLREKVLTSAAKQRLKCASIQKFGERAFKAWSLARLSQRFPKADFTEISKIVTDLAKVHKECCHGDLLECADDRADLAKYICENQDTISTKLKECCDKPLLEKSHCIAEAKRDELPADLNPLEHDFVEDKEVCKNYKEAKDVFLGTFLYEYSRRHPDYSVSLLLRIAKIYEATLEDCCAKEDPPACYATVFDKFQPLVDEPKNLIKQNCELFEKLGEYGFQNALIVRYTKKVPQVSTPTLVEVARKLGLVGSRCCKRPEEERLSCAEDYLSLVLNRLCVLHEKTPVSEKVTKCCTESLVNRRPCFSALTPDETYKPKEFVEGTFTFHADLCTLPEDEKQIKKQTALVELLKHKPHATEEQLRTVLGNFAAFVQKCCAAPDHEACFAVEGPKFVIEIRGILA

SEQ ID NO: 1875 - protein, 434 aa, Sus scrofa
MAMQKIFAREILDSRGNPTVEVDLHTAKGRFRAAVPSGASTGIYEALELRDGDKSRYLGKGVLKAVEHINKTLGPALLEKKLSVVDQEKVDKFMIELDGTENKSKFGANAILGVSLAVCKAGAAEKGVPLYRHIADLAGNPDLVLPVPAFNVINGGSHAGNKLAMQEFMILPVGASSFREAMRIGAEVYHHLKGVIKGKYGKDATNVGDEGGFAPNILENNEALELLKTAIQAAGYPDKVVIGMDVAASEFYRNGKYDLDFKSPDDPSRHITGEKLGELYKSFIKNYPVVSIEDPFDQDDWKTWTSFLSGVNIQIVGDDLTVTNLKRIAQAVEKKACNCLLLKVNQIGSVTESIQACKLAQSNGWGVMVSHRSGETEDTFIADLVVGLCTGQIKTGAPCRSERLAKYNQLMRIEEALGDKAVFAGRKFRNPKAK

SEQ ID NO: 1876 - protein, 993 aa, Sus scrofa
MEAAHSKTTEECLAYFGVSETTGLTPDQVKRHLEKYGHNELPAEEGKSLWELVIEQFEDLLVRILLLAACISFVLAWFEEGEETVTAFVEPFVILLILIANAIVGVWQERNAENAIEALKEYEPEMGKVYRADRKAVQRIKARDIVPGDIVEVAVGDKVPADIRILTIKSTTLRVDQSILTGESVSVIKHTEPVPDPRAVNQDKKNMLFSGTNIAAGKAIGIVATTGVNTEIGKIRDQMAATEQDKTPLQQKLDEFGEQLSKVISLICVAVWLINIGHFNDPVHGGSWIRGAIYYFKIAVALAVAAIPEGLPAVITTCLALGTRRMAKKNAIVRSLPSVETLGCTSVICSDKTGTLTTNQMSVCKMFVIDKVEGDICLLNEFSITGSTYAPEGEVLKNDKPVRAGQYDGLVELATICALCNDSSLDFNEAKGVYEKVGEATETALTTLVEKMNVFNTDVRNLSKVERANACNSVIRQLMKKEFTLEFSRDRKSMSVYCSPAKSRAAVGNKMFVKGAPEGVIERCNYVRVGTTRVPMTGPVKERILSVIKEWGTGRDTLRCLALATRDTPPKREDMVLDDSARFMEYETDLTFVGVVGMLDPPRKEVTGSIQLCRDAGIRVIMITGDNKGTAIAICRRIGIFGENEDVADRAYTGREFDDLPLPEQREACRRACCFARVEPSHKSKIVEYLQSYDEITAMTGDGVNDAPALKKAEIGIAMGSGTAVAKTASEMVLADDNFSTIVAAVEEGRAIYNNMKQFIRYLISSNVGEVVCIFLTAALGLPEALIPVQLLWVNLVTDGLPATALGFNPPDLDIMDRPPRSPKEPLISGWLFFRYMAIGGYVGAATVGAAAWWFLYADDGPHVTYSQLTHFMKCGEHNPDFEGVDCEVFEAPQPMTMALSVLVTIEMCNALNSLSENQSLMRMPPWVNIWLVGSIGLSMSLHFLILYVDPLPMIFKLQALDLAHWLMVLKISLPVIGLDEILKFVARNYLEG

SEQ ID NO: 1877 - protein, 540 aa, Sus scrofa
SSGPKTSEAMPKPHSDAGTAFIQTQQLHAAMADTFLEHMCRLDIDSPPITARNTGIICTIGPASRSVETLKEMIKSGMNVARLNFSHGTHEYHAETIKNVRAATESFASDPILYRPVAVALDTKGPEIRTGLIKGSGTAEVELKKGATLKITLDNAYMEKCDENVLWLDYKNICKVVDVGSKVYVDDGLISLLVKQKGPDFLVTEVENGGFLGSKKGVNLPGAAVDLPAVSEKDIQDLKFGVEQDVDMVFASFIRKAADVHEVRKVLGEKGKNIKIISKIENHEGVRRFDEILEASDGIMVARGDLGIEIPAEKVFLAQKMMIGRCNRAGKPVICATQMLESMIKKPRPTRAEGSDVANAVLDGADCIMLSGETAKGDYPLEAVRMQHLIAREAEAAIYHLQLFEELRRLAPITSDPTEAAAVGAVEASFKCCSGAIIVLTKSGRSAHQVARYRPRAPIIAVTRNHQTARQAHLYRGIFPVVCKDPVQEAWAEDVDLRVNLAMNVGKARGFFKKGDVVIVLTGWRPGSGFTNTMRVVPVP

SEQ ID NO: 1878 - protein, 903 aa, Sus scrofa
MMMVMQPEGLGTREGPFAGGSGGGGEYMEQEEDWDRDLLLDPAWEKQQRKTFTAWCNSHLRKAGTQIENIEEDFRNGLKLMLLLEVISGERLPRPDKGKMRFHKIANVNKALDFIASKGVKLVSIGAEEIVDGNLKMTLGMIWTIILRFAIQDISVEETSAKEGLLLWCQRKTAPYRNVNVQNFHTSWKDGLALCALIHRHRPDLIDYAKLRKDDPIGNLNTAFEVAEKYLDIPKMLDAEDIVNTPKPDEKAIMTYVSCFYHAFAGAEQAETAANRICKVLAVNQENEKLMEEYEKLASELLEWIRRTVPWLENRVGEPSMSAMQRKLEDFRDYRRLHKPPRVQEKCQLEINFNTLQTKLRLSHRPAFMPSEGKLVSDIANAWRGLEQVEKGYEDWLLSEIRRLQRLQHLAEKFQQKASLHEAWTRAGKEDMLSQRDYESASLQEVRALLRRHEAFESDLAAHQDRVEHIAALAQELNELDYHEAASVNSRCQAICDQWDNLGTLTQKRRDALERMEKLLETIDQLQLEFARRAAPFNNWLDGAVEDLQDVWLVHSVEETQSLVTAHEQFKATLPEADRERGAILGIQGEIQKICQTYGLRPSSTNPYIALSPQDINTKWDTVRKLVPSRDQMLQEELTRQQVNERLRRQFAAQANAIGPWIQGKVEEVGRLAAGMAGSLEEQMAGLRQQEQNIINYKSNIDRLEGDHQLLQESLVFDNKHTVYSMEHIRVGWEQLLTSIARTINEVENQVLTRDAKGLSQEQLNEFRASFNHFDRKRNGMMEPDDFRACLISMGYDLGEVEFARIMTMVDPNAAGVVTFQAFIDFMTRETAETDTAEQVVASFKILAGDKNYITAEELRRELPAEQAEYCIRRMAPYKGAGAPAGALDYVAFSSALYGESDL

SEQ ID NO: 1879 - protein, 333 aa, Sus scrofa
MVKVGVNGFGRIGRLVTRAAFNSGKVDIVAINDPFIDLHYMVYMFQYDSTHGKFHGTVKAENGKLVINGKAITIFQERDPANIKWGDAGATYVVESTGVFTTMEKAGAHLKGGAKRVIISAPSADAPMFVMGVNHEKYDNSLKIVSNASCTTNCLAPLAKVIHDHFGIVEGLMTTVHAITATQKTVDGPSGKLWRDGRGAAQNIIPASTGAAKAVGKVIPELNGKLTGMAFRVPTPNVSVVDLTCRLEKPAKYDDIKKVVKQASEGPLKGILGYTEDQVVSCDFNSDTHSSTFDAGAGIALNDHFVKLISWYDNEFGYSNRVVDLMVHMASKE

SEQ ID NO: 1880 - protein, 1042 aa, Sus scrofa
MENAHTKTVEEVLGHFGVNESTGLSLEQVKKLKERWGSNELPAEEGKTLLELVIEQFEDLLVRILLLAACISFVLAWFEEGEETITAFVEPFVILLILVANAIVGVWQERNAENAIEALKEYEPEMGKVYRQDRKSVQRIKAKDIVPGDIVEIAVGDKVPADIRLTSIKSTTLRVDQSILTGESVSVIKHTDPVPDPRAVNQDKKNMLFSGTNIAAGKAMGVVVATGVNTEIGKIRDEMVATEQERTPLQQKLDEFGEQLSKVISLICIAVWIINIGHFNDPVHGGSWIRGAIYYFKIAVALAVAAIPEGLPAVITTCLALGTRRMAKKNAIVRSLPSVETLGCTSVICSDKTGTLTTNQMSVCRMFILDKVEGDTCSLNEFTITGSTYAPIGEVHKDDKPVKCHQYDGLVELATICALCNDSALDYNEAKGVYEKVGEATETALTCLVEKMNVFDTELKGLSKIERANACNSVIKQLMKKEFTLEFSRDRKSMSVYCTPNKPSRTSMSKMFVKGAPEGVIDRCTHIRVGSTKVPMTPGVKQKIMSVIREWGSGSDTLRCLALATHDNPMRREEMNLEDSANFIKYETNLTFVGCVGMLDPPRIEVASSVKLCRQAGIRVIMITGDNKGTAVAICRRIGIFGQDEDVTSKAFTGREFDELNPSAQREACLNARCFARVEPSHKSKIVEFLQSFDEITAMTGDGVNDAPALKKSEIGIAMGSGTAVAKTASEMVLADDNFSTIVAAVEEGRAIYNNMKQFIRYLISSNVGEVVCIFLTAALGFPEALIPVQLLWVNLVTDGLPATALGFNPPDLDIMNKPPRNPKEPLISGWLFFRYLAIGCYVGAATVGAAAWWFIAADGGPRVTFYQLSHFLQCKEDNPDFEGVDCAVFESPYPMTMALSVLVTIEMCNALNSLSENQSLLRMPPWENIWLVGSICLSMSLHFLILYVEPLPLIFQITPLNLTQWLMVLKISLPVILMDETLKFVARNYLEPGKECVQPATKSCSFSACTDGISWPFVLLIMPLVIWVYSTDTNFSDMFWS

SEQ ID NO: 1881 - protein, 1137 aa, Sus scrofa
DEEEASPPSALPPGLSSRALERKDSEWSVGEPPAGEEQDKQNANSQLSTLFVEKPQSGEVKVGENITFIAKVKAEDLLRKPTIKWFKGKWMDLASKAGKHLQLKETFERHSRVYTFEMQIIKAKENYAGNYRCEVTYKDKFDSCSFDLEVHESTGTTPNIDIRSAFKRSGDGQDDAGELDFSGLLKRREVKQQEEEPEVDVWELLKNANPNEYERIAFQYGITDLRGMLKRLKRMRRVEKKSAAFSKILDPAYQVDKGGRVRFAVELADPKLEVKWYKNGQEIRPSTKYIFEHKGCERIMFINNCGLTDDSEYYVTAGDEKCSTELFVREPPVMVTKQLEDTKAYCGERVELECEVSEDDANVKWFKNGEEIIPGPKSRYRIKVDGKKHILIIEGATKADTAEYSVMTTGGQSSAKLSVDLKPLKILTPLTDQTVNLGKEICLKCEISENISGKWTKNSLPVQETDRLKIIHKGRIHKLVIANALTEDEGDYVFAPDAYSVTLPAKVHVIDPPRINLDGLGPDNTVTVIAGNKLRLEIPISGEPPPKVIWSRADKAIMEGSGRIRAESYPDSSTLVIDVAERDDSGVYNISLKNEAGEAHASIKVKVVDIPDPPVAPNVKEVGDDWCIMTWDPPLYDGGSPILGYFIERKKKQSSRWMRLNFDLCKETTFEPKKMIEGVAYEVRIFAVNAVGISKPSMPSRPFVPLAVTSPPTLLAVDSVTDTTVTMKWRPPDQIGAAGLDGYVLEYCYEGSDNWLPAHKDLIDKTKFTITDLPTDAKIFVRVKAVNAAGASEPKYYSQPILVKQIIEPPKIRIPRHLKQTYIRRVGEAINLVIPFQGKPKPELTWKKDGKEIDKNQINIRNSETDSIIFIRKAERSHSGKYDLEVKVEKFMETASIDIQVVDRPGPPQVVKIDDVWGENVALSWTPPKDDGNAAITGYTIQKADKKSMEWFTVIEHYHRTSATISELVIGNEYYFRVFSENMCGLSEDATMTKESAVIAKDGKIYKNPVYEDFDFTEAPMFTQPLVNTYAVAGYNATLNCSVRGNPKPKITWMKNKVTIKDDPRYRMFSNQGVCTLEIRKPSPYDGGTYCCKAVNDLGTVEIECKLEVKVIYQGVNTPGQPVFLEGQQQVLKVPIP

SEQ ID NO: 1882 - protein, 1366 aa, Sus scrofa
MLSFVDTRTLLLLAVTSCLATCQSLQEATARKGPTGDRGPRGERGPPGPPGRDGDDGIPGPPGPPGPPGPPGLGGNFAAQYDGKGVGAGPGPMGLMGPRGPPGAVGAPGPQGFQGPAGEPGEPGQTGPAGARGPPGPPGKAGEDGHPGKPGRPGERGVVGPQGARGFPGTPGLPGFKGIRGHNGLDGLKGQPGAPGVKGEPGAPGENGTPGQTGARGLPGERGRVGAPGPAGARGNDGSVGPVGPAGPIGSAGPPGFPGAPGPKGELGPVGNPGPAGPAGPRGEVGLPGVSGPVGPPGNPGANGLPGAKGAAGLPGVAGAPGLPGPRGIPGPAGAAGATGARGLVGEPGPAGSKGESGNKGEPGAAGPQGPPGPSGEEGKRGPNGEVGSAGPPGPPGLRGNPGSRGLPGADGRAGVMGPPGSRGPTGPAGVRGPNGDSGRPGEPGLMGPRGFPGSPGNVGPAGKEGPAGLPGIDGRPGPIGPAGARGEPGNIGFPGPKGPTGDPGKNGEKGHAGLAGARGAPGPDGNNGAQGPPGPQGVQGGKGEQGPAGPPGFQGLPGPAGTAGEVGKPGERGIPGEFGLPGPAGPRGERGPPGESGAAGPAGPIGSRGPSGPPGPDGNKGEPGVLGAPGTAGPSGPSGLPGERGAAGIPGGKGEKGETGLRGDVGSPGRDGARGAPGAVGAPGPAGANGDRGEAGPAGPAGPAGPRGSPGERGEVGPAGPNGFAGPAGAAGQPGAKGERGTKGPKGENGPVGPTGPVGAAGPAGPNGPPGPAGSRGDGGPPGATGFPGAAGRIGPPGPSGISGPPGPPGPAGKEGLRGPRGDQGPVGRTGETGASGPPGFAGEKGPSGEPGTAGPPGTPGPQGILGAPGFLGLPGSRGERGLPGVAGSVGEPGPLGIAGPPGARGPPGAVGNPGVNGAPGEAGRDGNPGSDGPPGRDGQAGHKGERGYPGNPGPAGAAGAPGPQGAVGPAGKHGNRGEPGPAGSVGPAGAVGPRGPSGPQGIRGEKGEPGDKGPRGLPGLKGHNGLQGLPGLAGHHGDQGAPGPVGPAGPRGPAGPSGPAGKDGRTGQPGAVGPAGIRGSQGSQGPAGPPGPPGPPGPPGPSGGGYDFGYEGDFYRADQPRSPPSLRPKDYEVDATLKSLNNQIETLLTPEGSRKNPARTCRDLRLSHPEWSSGYYWIDPNQGCTMDAIKVYCDFSTGETCIRAQPENIPAKNWYRNSKVKKHVWLGETINGGTQFEYNMEGVTTKEMATQLAFMRLLANHASQNITYHCKNSIAYMDEETGNLKKAVILQGSNDVELVAEGNSRFTYTVLVDGCSKKTNEWRKTIIEYKTNKPSRLPILDIAPLDIGDADQEVSVDVGPVCFK

SEQ ID NO: 1883 - protein, 2038 aa, Sus scrofa
DYENKIKGKWSETPCFEIATARMNAKNISTRKYQEDFENMKDQIYFMQTETPEYKVNKQAGTAASKVKYKEDYEKNKGKADYNVLPASENPLLRHLKAAGDALSDKRYKENYEKTKAKSINYCETPKFKLDTVLHNFSSDTKYKDSYLKNILGHYVGSFEDPYHTHCMKVAAENSDKNYKAEYEEDRGKGFFPQTITQEYEAIKKLDQCKDHTYKVHPDKTKFTQVTDSPVLVQAQVNSKQLSDLNYKAKHENEKFKCHIPPDTPAFIQHKVNAYNLSDNVYKHDWEKTKAKKFDIKVDAIPLLAAKANTKNTSDVMYKKDYEKSKGKMIGALSINDDPKMLHSLKTAKNQSDRLYKENYEKTKAKSMNYCETPKYQLDTLLKNFSEAKYKDSYVQNVLGHYIGSFEDPYQLHCMKVSAQNSDKNYKAEYEEDKGKCYFPQTITQEYEAIKKLDQCKDHTYKVHPDKTKFTAVTDTPVLLQAQLNTKQLSDLNYKAKHEGEKFKCNIPADAPQFIQHRVNAYNLSDNVYKHDWEKTKAKKFDIKVDAIPLLAAKANTKNTSDVMYKKDYEKSKGKMIGALSINDDPKMLHSLKTAKNQSDREYRKDYEKSKTIYTAPLDMLQVTQAKKSQAIASDVDYKHLLHNYSYPPDSINVDLAKKAYALQSDLDFFFSADQNLCIKKFFWVVVFRSLKLKEGCNYKHKSEFMKQKKYRQHPETLKFTSIEDAPIIVQSKINQAQRSDIAYKAKGEEIIHKYSLPADLPQFIQAKVNAYNISESMYKADLKDLSKKGYDLRTDAIPIKAAKAARQAASDVQYKKDYEKAKGKMVGFQSLQDDPKLVHYMNVAKIQSDREYKKDYEKTKTKYNTPHDMFNVVAAKKAQDVASNVNYRHSLHHYTYLPDAMDLELSKNMMHIQSDNAYKEDYNTWMKGIGWIPLGSLEVEKVKKAGDALNEKKYRQHPDTLKFTSIVDSPVMVQAKQNTRQVSDILYKAKGEDVKHKYTMGPDLPQFLQAKCNAYNISDVCYKRDWHDLIAKGNNVLGDAIPITAAKASRNIASDYKYKEAYEKAKGKHVGFRSLQDDPKLVHYMNVAKLQSDREYKKNYENTKTSYHTPGDMVSITAAKMAQDVATNVNYKQPIHHYTYLPDALSLEHTRNVNQIQSDNVYKDEYNHFFKGIGWIPLGSLEVEKVKKAGDALNERKYRQHPDTIKFTSVPDSMGMVLAQHNTKQLSDLNYKVEGEKLKHKYTMDPDVPQFIQAKVNAINMSDAHYKADWKKTLANGYDLTPDAIPIVAAKSSRNIASDFKYKEAYEKAKGKQVGFRSLQDDPKLVHYMNVAKIQSDREYKKGYEASKTRYHTPLDMLSVTAAKKSQEVATNTNYKQPFHHYTLLPDALNVEHSRNAMQIQSDNLYKSDFTNWMKGIGWIPMESLEVEKAKKAGEILSEKKYRQHPEKLKFTYAMDTMEQALNKSNKLIMDKRLYTEKWNKDKTTIHVMPDTPDILLSRVNQITLSDKLYKAGWEEEKKKGYDLRPDAISIKAARASRDIASDYKYKQAYEQAKGKHIGFRSLEDDPKLVHFMQVAKMQSDREYKKAYEKSKTSFHTPVDMLSVVAAKKSQEVATNANYRNVIHTYNMLPDAMSFELAKNMMQLQSDNQYKADYADFMKGIGWLPLGSLEAEKNKKAMEIISEKKYRQHPDTLKYSTLMDSMNMVLAKNNAKIMNEHLYKQAWEADKTKVHIMPDIPQIILAKANAVNMSDKLYKLSLEESKKKGYDLRTDAISIQAAKASRDIASDYKYKHSYEKERGKMVGFRSLEDDPKLVHSMQVAKMQSDREYKKSYEKTKTSYHTPADMLSVTAARDAQANITNTNYKHLIHKYILLPDAMNIQLSKNMNHIQSDNEYKQDYNECYKGLGWSPAGSLEVEKAKKATEYASDQKYRQHPSNFQFQKLNDSMDMVLAKQNAHTMNKYLYTADWNKDKTKIHVMPDTPDILQAKQNQTLFSQKLYKLGWEEALKKGYDLPVDAISVQLAKVSRDNASDIKYQKG

SEQ ID NO: 1884 - protein, 296 aa, Sus scrofa
MASHRHAGPSSYKVGTMAEKFDCHYCRDPLQGKKYVQKDGHHCCLKCFDKFCANTCVECRKPIGADSKEVHYKNRYWHDTCFRCSKCLHPLANETFMAKDNKILCNKCTTREDSPKCKGCFKPIVAGDQNVEYKGTVWHKDCFTCSNCKQVIGTGSFFPKGEDFYCVTCHETKFAKHCVKCNKAITSGGITYQDQPWHAECFVCVTCSKKLAGQRFTAVEDQYYCVDCYKNFVAKKCAGCKNPITGFGKGSSVVAYEGQSWHDYCFHCKKCSVNLANKRFVFHQEQVYCPDCAKKL

SEQ ID NO: 1885 - protein, 192 aa, Sus scrofa
MAPKKDVKKPAAAAAPAPAPAPAPAPAPAPPKEEKIDLSAIKIEFSKEQQDEFKEAFLLFDRTGECKITLSQVGDVLRALGTNPTNAEVKKVLGNPSNEEMNAKKIEFEQFLPMLQAISNNKDQGSYEDFVEGLRVFDKEGNGTVMGAELRHVLATLGEKMKEEEVEALMAGQEDSNGCINYEAFVKHIMSI

SEQ ID NO: 1886 - protein, 248 aa, Sus scrofa
MAPARKFFVGGNWKMNGRKNNLGELINTLNAAKLPADTEVVCAPPTAYIDFARQKLDPKIAVAAQNCYKVANGAFTGEISPGMIKDLGATWVVLGHSERRHVFGESDELIGQKVAHALAEGLGVIACIGEKLDEREAGITEKVVFEQTKVIADNVKDWNKVVLAYEPVWAIGTGKTATPQQAQEVHEKLRGWLKTHVSEAVAQSTRIIYGGSVTGATCKELASQPDVDGFLVGGASLKPEFVDIINAK

SEQ ID NO: 1887 - protein, 5035 aa, Sus scrofa
MGDGGEGEDEVQFLRTDDEVVLQCNATVLKEQLKLCLAAEGFGNRLCFLEPTSNAQNVPPDLAICCFVLEQSLSVRALQEMLANTVEAGVESSQGGGHRTLLYGHAILLRHAHSGMYLSCLTTSRSMTDKLAFDVGLQEDATGEACWWTTHPASKQRSEGEKVRVGDDLILVSVSSERYLHLSTASGELQVDASFMQTLWNMNPICSGCEEGYVTGGHVLRLFHGHMDECLTISPADSDDQRRLVYYEGGSVCTHARSLWRLEPLRISWSGSHLRWGQPLRIRHVTTGRYLALIEDQGLVVVDASKAHTKATSFCFRISKEKLDTAPKRDVEGMGPPEIKYGESLCFVQHVASGLWLTYAAPDPKALRLGVLKKKAILHQEGHMDDALSLTRCQQEESQAARMIYSTAGLYNHFIKGLDSFSGKPRGSGAPAGTALPLEGVILSLQDLIGYFEPPSEELQHEEKQSKLRSLRNRQSLFQEEGMLSLVLNCIDRLNVYTTAAHFAEFAGEEAAESWKEIVNLLYEILASLIRGNRANCALFSNNLDWLVSKLDRLEASSGILEVLYCVLIESPEVLNIIQENHIKSIISLLDKHGRNHKVLDVLCSLCVCNGVAVRSNQDLITENLLPGRELLLQTNLINYVTSIRPNIFVGRAEGTTQYSKWYFEVMVDEVVPFLTAQATHLRVGWALTEGYSPYPGGGEGWGGNGVGDDLYSYGFDGLHLWTGHVPRLVTSPGQHLLAPEDVVSCCLDLSVPSISFRINGCPVQGVFEAFNLNGLFFPVVSFSAGVKVRFLLGGRHGEFKFLPPPGYAPCHEAVLPRERLRLEPIKEYRREGPRGPHLVGPSRCLSHTDFVPCPVDTVQIVLPPHLERIREKLAENIHELWALTRIEQGWTYGPVRDDNKRLHPCLVDFHSLPEPERNYNLQMSGETLKTLLALGCHVGMADEKAEDNLRKTKLPKTYMMSNGYKPAPLDLSHVRLTPAQTTLVDRLAENGHNVWARDRVAQGWSYSAVQDIPARRNPRLVPYRLLDEATKRSNRDSLCQAVRTLLGYGYNIEPPDQEPSQVESQSRWDRVRIFRAEKSYAVQSGRWYFEFEAVTTGEMRVGWARPELRPDVELGADELAYVFNGHRGQRWHLGSELFGRPWQSGDVVGCMIDLTENTIIFTLNGEVLMSDSGSETAFRDIEVGDGFLPVCSLGPGQVGHLNLGQDVSSLRFFAICGLQEGFEPFAINMQRPVTTWFSKSLPQFEAVPLEHPHYEVSRVDGTVDTPPCLRLTHRTWGSQNSLVEMLFLRLSLPVQFHQHFRCTAGATPLAPPGLQPPAEDEARAAEPDPDYENLRRSAGRWGEAEGGKEGTAKEGAPGGTAQAGVEAQPPRAENEKDATTEKNKKRGFLFKAKKAAMMTQPPATPTLPRLPHEVVPADDRDDPDIILNTTTYYYSVRVFAGQEPSCVWVGWVTPDYHQHDMNFDLTKVRAVTVTMGDEQGNIHSSLKCSNCYMVWGGDFVSPGQQGRISHTDLVIGCLVDLATGLMTFTANGKESNTFFQVEPNTKLFPAVFVLPTHQNVIQFELGKQKNIMPLSAAMFLSERKNPAPQCPPRLEMQMLMPVSWSRMPNHFLRVETRRAGERLGWAVQCQEPLTMMALHIPEENRCMDILELSERLDLQQFHSHTLRLYRAVCALGNNRVAHALCSHVDQAQLLHALEDAHLPGPLRAGYYDLLISIHLESACRSRRSMLSEYIVPLTPETRAITLFPPGKRTENGPRRHGLPGVGVTTSLRPPHHFSAPCFVAALPAVGAAEAPARLSPSIPLEALRDKALRMLGEAVRDGGQHARDPVGGSVEFQFVPVLKLVSTLLVMGIFGDEDVKQILKMIEPEVFTEEEEEEEEEEEEEEEDEEEKEEDEEEEAREKEDEEKEEEETAEGEKEEYLEEGLLQMKLPESVKLQMCNLLEYFCDQELQHRVESLAAFAERYVDKLQANQRDRYGILMKAFTMTAAETARRTREFRSPPQEQINMLLHFKDGEDEEDCPLPDEIRQDLLEFHQDLLTHCGIQLEGEEEEPEEEATLGSRLMSLLEKVRLVKKKEEKSEEEPPAEESKAQSLQELVSHTVVRWAQEDFVQSPELVRAMFSLLHRQYDGLGELLRALPRAYTISPSSVEDTMSLLECLGQIRSLLIVQMGPQEENLMIQSIGNIMNNKVFYQHPNLMRALGMHETVMEVMVNVLGGGESKEIRFPKMVTSCCRFLCYFCRISRQNQRSMFDHLSYLLENSGIGLGMQGSTPLDVAAASVIDNNELALALQEQDLEKVVSYLAGCGLQSCPMLLAKGYPDIGWNPCGGERYLDFLRFAVFVNGESVEENANVVVRLLIRKPECFGPALRGEGGSGLLATIEEAIRISEDPARDGPGVRRDRRREHFGEEPPEENRVHLGHAIMSFYAALIDLLGRCAPEMHLIQAGKGEALRIRAILRSLVPLDDLVGIISLPLQIPTLGKDGALVQPKMSASFVPDHKASMVLFLDRVYGIENQDFLLHVLDVGFLPDMRAAASLDTATFSTTEMALALNRYLCLAVLPLITKCAPLFAGTEHRAIMVDSMLHTVYRLSRGRSLTKAQRDVIEECLMALCRYIRPSMLQHLLRRLVFDVPILNEFAKMPLKLLTNHYERCWKYYCLPTGWANFGVTSEEELHLTRKLFWGIFDSLAHKKYDPELYRMAMPCLCAIAGALPPDYVDASYSSKAEKKATVDAEGNFDPRPVETLNVIIPEKLDSFINKFAEYTHEKWAFDKIQNNWSYGENIDEELKTHPMLRPYKTFSEKDKEIYRWPIKESLKAMIAWEWTIEKAREGEEEKTEKKKTRKISQSAQTYDAREGYNPQPPDLSGVTLSRELQAMAEQLAENYHNTWGRKKKQELEAKGGGTHPLLVPYDTLTAKEKARDREKAQELLKFLQMNGYAVTRGLKDMELDTSSIEKRFAFGFLQQLLRWMDISQEFIAHLEAVVSSGRVEKSPHEQEIKFFAKILLPLINQYFTNHCLYFLSTPAKVLGSGGHASNKEKEMITSLFCKLAALVRHRVSLFGTDAPAVVNCLHILARSLDARTVMKSGPEIVKAGLRSFFESASEDIEKMVENLRLGKVSQARTQVKGVGQNLTYTTVALLPVLTTLFQHIAQHQFGDDVILDDVQVSCYRTLCSIYSLGTTRNPYVEKLRPALGECLARLAAAMPVAFLEPQLNEYNACSVYTTKSPRERAILGLPNSVEEMCPDIPVLERLMADIGGLAESGARYTEMPHVIEITLPMLCSYLPRWWERGPEAPPPALPAGAPPPCTAVTSDHLNSLLGNILRIIVNNLGIDEASWMKRLAVFAQPIVSRARPELLHSHFIPTIGRLRKRAGKVVAEEEQLRLEAKAEAEEGELLVRDEFSVLCRDLYALYPLLIRYVDNNRAHWLTEPNPSAEELFRMVGEIFIYWSKSHNFKREEQNFVVQNEINNMSFLTADNKSKMAKSGGSDQERTKKKRLGDRYSVQTSLIVATLKKMLPIGLNMCAPTDQELITLAKTRYALKDTDEEVREFLQNNLHLQGKVEGSPSLRWQMALYRGLPGREEDADDPEKIVRRVQEVSAVLYHLEQMEHPYKSKKAVWHKLLSKQRRRAVVACFRMTPLYNLPTHRACNMFLESYKAAWILTEDHSFEDRMIDDLSKAGEQEEEEEEVEEKKPDPLHQLVLHFSRTALTEKSKLDEDYLYMAYADIMAKSCHLEEGGENGEAQEEVEVSFEEKEMEKQRLLYQQARLHNRGAAEMVLQMISACKGETGAMVSSTLKLGISILNGGNADVQQKMLDYLKDKKEVGFFQSIQALMQTCSVLDLNAFERQNKAEGLGMVNEDGTVINRQNGEKVMADDEFTQDLFRFLQLLCEGHNNDFQNYLRTQTGNTTTINIIICTVDYLLRLQESISDFYWYYSGKDVIEEQGKRNFSKAMSVAKQVFNSLTEYIQGPCTGNQQSLAHSRLWDAVVGFLHVFAHMMMKLAQDSSQIELLKELLDLQKDMVVMLLSLLEGNVVNGMIARQMVDMLVESSSNVEMILKFFDMFLKLKDIVGSEAFQDYVTDPRGLISKKDFQKAMDSQKQFTGPEIQFLLSCSEADENEMIDCEEFANRFQEPARDIGFNVAVLLTNLSEHVPHDPRLRNFLELAESILEYFRPYLGRIEIMGASRRIERIYFEISETNRAQWEMPQVKESKRQFIFDVVNEGGESEKMELFVSFCEDTIFEMQIAAQISEPEGEPEEDEDEGAGLAEAGAEGAEEGAVGPEGAAGTAAAGLTARLAAATSRALRGLSYRSLRRRVRRLRRLTAREAATALAALLWAALAHAGAAGAGAAAGALRLLWGSLFGGGLVEGAKKVTVTELLAGMPDPTGDEVHGEQPAGPGGEADGEGAGEGAGEAWEGAGDEEVAVQEAGPGGADGAVAVAEGGPFRPEGAGGLGDMGDTTPAEPPTPEGSPIIKRKLGVDGEEEELPPEPEPEPEPEPEKADAENGEKEEVPKPPPEPPKKTAPPPPPPKKEEGGSGGLEFWGELEVQRVKFLNYLSRNFYTLRFLALFLAFAINFILLFYKVSDSPPGEDDMEGSAAGDLSGAGSGGGSGWGSGAGEEVEGDEDENMVYYFLEESTGYMEPALRCLSLLHTLVAFLCIIGYNCLKVPLVIFKREKELARKLEFDGLYITEQPEDDDVKGQWDRLVLNTPSFPSNYWDKFVKRKVLDKHGDIYGRERIAELLGMDLATLEITAHNERKPEPPPGLLTWLMSIDVKYQIWKFGVIFTDNSFLYLGWYMVMSLLGHYNNFFFAAHLLDIAMGVKTLRTILSSVTHNGKQLVMTVGLLAVVVYLYTVVAFNFFRKFYNKSEDEDEPDMKCDDMMTCYLFHMYVGVRAGGGIGDEIEDPAGDEYELYRVVFDITFFFFVIVILLAIIQGLIIDAFGELRDQQEQVREDMETKCFICGIGSDYFDTTPHRFETHTLEEHNLANYMFFLMYLINKDETEHTGQESYVWKMYQERCWDFFPAGDCFRKQYEDQLS

SEQ ID NO: 1888 - protein, 298 aa, Sus scrofa
MSDQAWSFLKDFLAGGVAAAISKTAVAPIERVKLLLQVQHASKQISAEKQYKGIIDCVVRIPKEQGFLSFWRGNLANVIRYFPTQALNFAFKDKYKQIFLGGVDRHKQFWRYFAGNLASGGAAGATSLCFVYPLDFARTRLAADVGKGAAQREFTGLGNCLAKIFKSDGLRGLYQGFNVSVQGIIIYRAAYFGVYDTAKGMLPDPKNVHIIVSWMIAQTVTAVAGLVSYPFDTVRRRMMMQSGRKGADIMYTGTVDCWRKIAKDEGPKAFFKGAWSNVLRGMGGAFVLVLYDEIKKYV

SEQ ID NO: 1889 - protein, 169 aa, Sus scrofa
MAPKKAKRRAAAEGSSNVFSMFDQTQIQEFKEAFTVIDQNRDGIIDKEDLRDTFAAMGRLNVKNEELDAMMKEASGPINFTVFLTMFGEKLKGADPEDVITGAFKVLDPEGKGTIKKHFLEELLTTQCDRFSQEEIKNMWAAFPPDVGGNVDYKNICYVITHGDAKDQE

SEQ ID NO: 1890 - protein, 417 aa, Sus scrofa
MSLSNKLTLDKLDVKGKRVVMRVDFNVPMKNNQITNNQRIKAAIPSIKFCLDNGAKSVVLMSHLGRPDGIPMPDKYSLEPVAVELKSLPGKDVLFLKDCVGPEVEKACADPAAGSVILLENLRFHVEEEGKGKDASGSKVKADPAKIEAFRASLSKLGDVYVNDAFGTAHRAHSSMVGVNLPKKAGGFLMKKELNYFAKALESPERPFLAILGGAKVADKIQLINNMLDKVNEMIIGGGMAFTFLKVLNNMEIGTSLFDEEGSKIVKDLMSKAEKNGVKITLPVDFVTADKFDENAKIGQATVASGIPAGWMGLDCGPESSKKYSEAVARAKQIVWNGPVGVFEWEAFAQGTKALMDEVVKATSRGCITIIGGGDTATCCAKWNTEDKVSHVSTGGGASLELLEGKVLPGVDALSNV

SEQ ID NO: 1891 - protein, 1089 aa, Sus scrofa
DADPLVMGAPGAPMDVHCHDANRDYVIVTWKPPNTTKESPVLGYFIDRCEVGTDNWVQCNDAPVKICKYPVSGLVEGRSYTFRVRAVNSAGVSRPSRASEAVAALDPLDLKRLQGIHWEGDKDIVIYQDDLEGEVQIPRPPTNVHASEISRTYVVLSWDPPTPRGKEPLMYFIEKSVVGSGTWQRENAQTAVRSPRYAVFDLAEGKSYVFRVLSANKHGLSDPSEITSPIQAQDTIVVPSAPGRVLASRNTKTSVVVQWDQPKHGEDLLGYYVDCCVAGSNVWEPCNHKPIGYNRFVVHGLTTGEQYIFRVKAVNAVGTSENSQESDVIKVQAALTVPSHPYGITLLNCDGHSMTLGWKVPKFSGGSPIIGYYVDKREGHHKNWHEVNSSPLKERILTVEGLTEGSTYEFKIAAANLVGIGLPSDPSELFKCEAWTAPEPGPAYDLTFCEVRDTSLVLLWKAPVYSGSSPVSGYFVDFKEEDSGEWNTVNEVATANRYLKVCDLHQGKTYVFRVRAVNANGVGKPSDTSEPVLVEARPGTKEISAGVDEEGNIYLSFDCQEMTDASHFTWCKSYEDIADDERFKVETVGDHSKLYFKHPDKVDLGTYSVSVSDTDGVSSSFVLDEEELERLMALSNEIKNPTIPLKSELAYEIFDKGQVRFWLQAEHLSPDASYRFVINDREVPDSETHRIKCDKSTGIVEMVMDRFTIENEGTYTVQIHDGKAKNQSSLVLIGDAFKAVLEEAEFQRKEFLRKQGPHFSEYLHWDVTEECEVRLVCKVANTKKETVFKWLKDDVLYETEKLPDLEKGVCELLIPKLSKKDHGEYKATLKDERGQDVSILEIAGKVYEDMILAMSRVCGASASPLKILCTPEGIRLQCFMKYFMEEMKVNWYHKDAKIASSEHMRIGGSEEMAWLQICEPTEKDKGKYTFEIFDGKNNHQRSLDLSGQAFDEAFAEFQQLKAAAFAEKNRGKVIGGLPDVVTIMEGKTLNLTCTVFGNPDPEVVWFKNDKDIELSEHFSVKVEQAKYVSMTIKGVTSEDSGKYSIHVKNKYGGEKIDVTVSVYKHGEEIPDVVLPQQAKPKLIPASASE

SEQ ID NO: 1892 - protein, 332 aa, Sus scrofa
MATLKDQLIHNLLKEEHVPHNKITVVGVGAVGMACAISILMKELADEIALVDVMEDKLKGEMMDLQHGSLFLRTPKIVSGKDYNVTANSRLVVITAGARQQEGESRLNLVQRNVNIFKFIIPNIVKYSPNCKLLVVSNPVDILTYVAWKISGFPKNRVIGSGCNLDSARFRYLMGERLGVHPLSCHGWILGEHGDSSVPVWSGVNVAGVSLKNLHPELGTDADKEHWKAVHKQVVDSAYEVIKLKGYTSWAIGLSVADLAESIMKNLRRVHPISTMIKGLYGIKEDVFLSVPCILGQNGISDVVKVTLTPEEEAHLKKSADTLWGIQKELQF

SEQ ID NO: 1893 - protein, 1140 aa, Sus scrofa
MPEAKPATKKAPAGKDAAKPAPKEAPPKGAPEEPPKEAPPEDQSPTAEEPTGIFLKKPDSVSVENGKDALIVAKVNGKELPGKPEIKWFKGKWLELGSKSGARFSFKESHDSASNVYTLELRIGKVVLGDRGDYRLEVKAKDFCDSCAFNIDVEAPRQDSAGQSLESFKRSGEGKPEGAGELDFSGLLKKRQVVEEEKKKKKDDDDLGIPPEIWELLKGAKKSEYEKIAFQYGITDLRGMLKRLKKAKVEVKKSAAFTKKLDPAYQVDQGNKIKLVVEISDPDLPLKWYKNGQEIKPSSKYVFENVGKKRILCINKCTLADDAAYEVAVKDEKCFTELFVREPPVLIVTPLEDQQVYVGDRVEMTVEVSEEGAQVMWLKDGVELTREDSFKSRYRFKKDGKRHILIYSDVSLEDRGRYQVMTNGGQCEAELSVEEKQLEVLQDIADLTVKASEQAVFKCEVSDEKVTGKWYKNGVEVRPSKRITISHVGRFHKLVIDDVRPEDEGDYTFVPDGYALSLSAKLNFLEIKVEYVPKQEPPKIHLDCSGKTSENAVVVVAGNKLRLDVSITGEPPPVATWMKEDEVFSGTEGRVRLEQRADISSFVIESAERGDEGRYTIKVTNPAGEDVASIFLRVVDVPDPPEAVRVTTVGEDWAILVWEPPKYDGGQPVTGYLLERKKKGSQRWMKLNFEVFTETTYESTNMIEGILYEMRVFAVNAIGVSQPSVNTKPFMPIAPTSEPQHLTVEDVTDTTTTLKWRPPDRIGAGGIDGYLVEYCVEGSDEWIPANTEPVERCGFTVKNLPTGARITFRVVGVNIAGRSQPATLAQPVTIREIVEQPKIRLPRHLRQTYIRKVGEHLNLVIPFQGKPRPQVVWTKGGAPIDTSRVHVRTSNFDTVFFVRQAARSDSGEYELSVQIENMKDTATVHIRVVEKAGPPQNVMVKEVWGTNALVEWQPPKDDGNTEITGYFVQKADKKTMEWFNVYEHNRHTSCTVSDLIMGNEYYFRVYSENICGLSDSPGVSKNTARILKTGITFKLPEFKEHDFRTPPKFLTPLPDRVVVAGYTAALNCAVRGHPKPKVVWMKNQMEIGEDPKFLMTNHQGVLTLNIRRPSPFDSGTYSCRAVNELGEALAECKLEVRVPQ

SEQ ID NO: 1894 - protein, 260 aa, Sus scrofa
MAKEWGYADHNGPDHWHELYPIAKGDNQSPIELHTKDIKHDPSLLPWTASYDPGSAKTILNNGKTCRVVFDDTYDRSMLRGGPLTAAYRLRQFHLHWGSSDDHGSEHTVDGVKYAAELHLVHWNSKYNSFATALKHPDGVAVVGIFLKIGREKGEFQLVLDALDKIKTKGKEAPFTNFNPSCLFPACRDYWTYHGSFTTPPCEECIVWLLLKEPITVSSDQMAKLRSLYSSAENEPPVPLVRNWRPPQPIKGRIVKASFK

SEQ ID NO: 1895 - protein, 253 aa, Sus scrofa
MATHRLVMVRHGESTWNQENRFCGWFDAELSEKGAEEAKRGAHAIKDAKMEFDICYTSVLKRAIRTLWTILDGTDQMWLPVVRTWRLNERHYGGLTGLNKAETAAKHGEEQVKIWRRSFDIPPPPMDEKHPYYSSISKERRYAGLKPGELPTCESLKDTIARALPFWNDEIAPQIKAGKRVLIAAHGNSLRGIVKHLEGMSDQAIMELNLPTGIPIVYELDQALKPTKPMRFLGDEETVRKAMEAVAAQGKAK

SEQ ID NO: 1896 - protein, 2640 aa, Sus scrofa
PKYREVWDKDKTSVHIMPDTPEINLARANALNVSNKIYREGWDEMKMSCDVRLDAIPIQAAKASREIASDYKYKLDHEKQKGHYVGTLTARDDNKIRWALIAGKIQNEREYRLHWAKWKSKFQSPADMLSITHSKNCQALVSDIDYRNYLHQWTCLPDQHDVIQARKAYDLQSDAIYKADLEWLRGIGWMPSDSVSVNHAKHAADIFSEKKYRTKIETLNFTPVDDRVDYVTAKQSGEILNDIKYRKDWNDTKSKYTLTETPQLHAAQEAARILDQYLYKESWEKQKATGYILPPDAVPFVHAHHSSDVQSELKYKADHVKQKGHYVGVPTMRDDPKLVWFEHAGQIQNDRLYKEHYHKTKAKINIPPDMVSVVAAKEGQILVSDIDYRNYLHQWTCHPDQNDVIQARKAYDLQSDNVYKADLEWLRGIGWIPLDSVDHVRVTRNQEMVNQIKYKKDALANYPNFTSVVDPPAVVLAKINSVNQSDVKYKETFNKLLKGKYIFSPDTPYITHSKDMGKLYSTILYKGAWEGTKAYGYTLDERYIPIVGAKHADFVNSELKYKETYEKQKGHYLAGKEISEFPNVVHCLDFQKMRSVLNYRRHYEDTKANVHIPNDMMNHVLAKRCQYILSDLEYRHYFHQWTSLPEEPNVIRARNAQEILSDNVYKDDLNWLKGIGCYVWDTPQILHAKKSYDLQSQILYTADGKENLKNYNMVTDTPLYVTALQSGINASEVKYKENYHQIKDKYTTVLETVDYDRTRNLKDLYSSNVYKEAWDKVKATSYILPSNTVSLTHAKNQKHLASHIKYREEYEKFKALYTLPKSVDDDPNTARCLRVGKFNIDRLYRSVYEKNKMKIHMVPDMVEMVTAKDSQKKVSEIDYRLHLHEWICHPDLQVNSHVRKVTDQISDIVYKDDLNWLKGIGCYVWDTPEILHAKHAYDLRNDIKYQAHVKKTRNNYKLVTDTPLYVQAVKSGKQLSDAVYHYDYVHSVRGKVAPTTKTVDLDRALHAYKLQSENLYRKDGLNSLPTGYRLPGDTPHFKHNKDIRYMSSYFKYKEVYEHFKANGYTLGPKDVPFVHVRRVNNVTSERLYRQLYHKLKDKIHTTPDTPEIRQVKKTQEAVSELIYKSDFFKMQGHMISMPYTPHVLHCRYVGDITSDIKYKEDLQLRGLGCFLYDTPDMRSRHLRKLWSNYLYTDNARKMRDKYKVVLDTPEYRKVQELKTHLSELVYRAAGKKQKSIFTSVPDTPDLLRAKRGQKLQSQYLYVELATKERPHHHAGNQTTALKHARDVKDMVSEKKYKVQYEKMKDKYTPVPDTPILIRAKKAYWNASDLRYKETFQKTKGKYHTVKDALDIVYHRKVTDHISKIKYKENYMSQLGIWRSIPDRPEHFHHRAVTDAVSDVKYKEDLTWLKGIGCYAYDTPDFTLAEKNKTLYSKYKYKEVFERTKSDFKYEADCPINRHFKFATQLMNEKKYRADYEQRKDKYQLVVDEPRHLLAKIAGDQISQIKYRKNYEKTKDKFTSVVDTPEHLRTTKVNKQISDILYKLEYNKAKPRGYTTIHDTPMLLHVRKVKDEVSDLKYKEVYQRTKSNCTIEPDAVHIKAAKDAYKVNTNLDYKKQYEANKAHWRWTPDRPDFIQAAKSSLQQSDFEYKLDREFLKGCKLSVTDDKDMVLALRNSVIESDLKYKEKHVKERGTCHAVPDTPQILLAKTVSNLVSENKYKRHVKKHLAQGSYTTLPETRDTVHVKEVTKHVSDTNYKKKFVKERGKSNYSIMLEPPEVKHAMEVAKKQSDVAYKKDAKENLHYTTVADRPDIKKATQAAKQASEVEYRAKHRKEGSHGLSMLGRPDIEMAKKAATLSSQVKYRENFKEKGKTPKYNPKESQLYKIMKDANNLASEVKYKADLKKLHKPVTDMKESLIMNHVLNTSHLASSYQYKKNYEKSKGHYHTIPDNLEQLHLKEATELQSIVKYKEKYEKERGKPMLDFETPTYITAKESQQMQSGKEYRKDYEESIKGRNLTGLEVTPALLHVKYATKIASEKEYRKDLEESIRGKGLSEMEDTPDMLRAKNATQILNEKEYKRDLELEVKGRGLNAMANETPDFMRARNATDIASQIKYKQLAEMEKANFTSVVDTPEIIHAQQVKNLSSQKKYKEDAEKCMSYYETVLDTPEMQRVRENQKNFSLLQYQCDLKNSKGKITVVQDTPEILRVKENQKNFSSVLYKEDVSPGTAIGKTPEMMRVKQTQDHISSVKYKETIGQGTPIPDLPEVKRVKETQKHISSVMYKENLGTGIPTPVTPEIERVKRNQENFSSVLYKENMGKGTPLPVTPEMERVKHNQENISSILYKENVGKGTPTPVTPEMQRVKRNQENISSVLYSDSFRKQIQGKAAYVLDTPEMQRVRETQRHISTVKYHEDFEKHKGCFTPVVTDPITERVKKNTQDFSDINYRGIQRKVVEMEQKRNDQDQETITGLRVWRTNPGSVFDYDPAEDNIQSRSLHMLNAQAQRRSREQSRSASALSISGGEEKSEHSEAARLSTYSDGGVFFSATSAAYKHAKTTELPQQRSSSVATQQTTVSSIPSHPSTAGKIFRAMYDYMAADADEVSFRDGDAIVNVQAIDEGWMYGTVQRTGRTGMLPANYVEAI

SEQ ID NO: 1897 - protein, 471 aa, Sus scrofa
MSQAYSSSQRVSSYRRTFGGAPSFPLGSPLSSPVFPRAGFGTKGSSSSVTSRVYQVSRTSGGAGGLGPLRASRLGATRVPSSSYGAGELLDFSLADAVNQEFLTTRTNEKVELQELNDRFANYIEKVRFLEQQNAALAAEVNRLKGREPTRVAEIYEEELRELRRQVEVLTNQRARVDVERDNLLDDLQRLKAKLQEEIQLKEEAENNLAAFRADVDAATLARIDLERRIESLNEEIAFLKKVHEEEIRELQAQLQEQQVQVEMDMSKPDLTAALRDIRAQYETIAAKNISEAEEWYKSKVSDLTQAANKNNDALRQAKQEMMEYRHQIQSYTCEIDALKGTNDSLMRQMRELEDRFASEASGYQDNIARLEEEIRHLKDEMARHLREYQDLLNVKMALDVEIATYRKLLEGEESRINLPIQTFSALNFRETSPEQRGSEVHTKKTVMIKTIETRDGEVVSEATQQQHEVL

SEQ ID NO: 1898 - protein, 562 aa, Sus scrofa
MVKIVTVKTKAYQDQKPGTSGLRKRVKVFQSSANYAENFIQSIISTVEPAHRQEATLVVGGDGRFYMKEAIQLIVRIAAANGIGRLVIGQNGILSTPAVSCIIRKIKAIGGIILTASHNPGGPNGDFGIKFNISNGGPAPEAITDKIFQISKTIEEYAICPDLKVDLGVLGKQQFDLENKFKPFTVEIVDSVEAYATMLRNIFDFNALKELLSGPNRLKIRIDAMHGVVGPYVKKILCEELGAPANSAVNCVPLEDFGGHHPDPNLTYAADLVETMKTGEHDFGAAFDGDGDRNMILGKHGFFVNPSDSVAVIAANIFSIPYFQQTGVRGFARSMPTSGALDRVANATKIALYETPTGWKFFGNLMDASKLSLCGEESFGTGSDHIREKDGLWAVLAWLSILATRKQSVEDILKDHWQKYGRNFFTRYDYEEVEAEGANKMMKELEALISDRSFVGKQFPVGDKVYTVEKIDNFEYSDPVDGSISRNQGLRVIFADGSRIIFRLSGTGSAGATIRLYIDSYEKDLAKIYQDPQVMLAPLISIALKMSQLQERTGRTAPTVIT

SEQ ID NO: 1899 - protein, 780 aa, Sus scrofa
MTHEEHHAAKSLGVGKAIAVLTSGGDAQGMNAAVRAVVRVGIYTGARVFFVHEGYQGLVDGGDNIREATWESVSMMLQLGGTVIGSARCKDFREREGRLRAAHNLVKRGITNLCVIGGDGSLTGADTFRSEWGDLLNDLQKAGKITAEEANKSSYLNIVGLVGSIDNDFCGTDMTIGTDSALHRIIEIVDAITTTAQSHQRTFVLEVMGRHCGYLALVTSLSCGADWVFIPECPPDDAWEEHLCRRLSETRTRGSRLNIIIVAEGAIDKNGQLITSENIKDLVVKRLGYDTRVTVLGHVQRGGTPSAFDRILGSRMGVEAVMALLEGTPDTPACVVSLSGNQAVRLPLMECVQVTKDVTKAMNEKRFDEAMKLRGRSFMNNWEVYKLLAHVRPPVTKSGSYTVAVMNVGAPTAGMNAAVRSTVRIGLIQGNRVLVVHDGFEGLAKGQIEEAGWSYVGGWTGQGGSKLGTKRTLPKKSFEQISANITKFNIQGLVIIGGFEAYTGGLELMEGRKQYDELCIPFVVIPATVSNNVPGSDFSVGADTALNTICMTCDRIKQSAAGTKRRVFIIETMGGYCGYLATMAGLAAGADAAYIFEEPFTIRDLQVNVEHLVQKMKTTVKRGLVLRNEKCNENYTTDFIFNLYSEEGKGIFDSRKNVLGHMQQGGSPTPLDRNFATKMGAKAMNWMSGKIKESYRNGRIFANTPDSGCVLGMRKRALVFQPVTELKEQTDFEHRIPKEQWWLKLRPILKILAKYEIDLDTSEHAHLEHITRKRSGEATI

SEQ ID NO: 1900 - protein, 1659 aa, Sus scrofa
MSLPFYQKLHQHYDRSYRNKDLRTTMSQYQQEKRSSAIYTHGSTAYSARSSAAHRQESEAFSQASTTSYQQQASRASELALSSSVSQKAASAYNYGYSRGRTDSSLMLEDYSSKLSPQIKRARKGLLSGEEKENLPSDYMVPIFSGRQVHVSGITDTEEERIKEAAAYIAKRKLLASEEGITAAKQSTVSKQSTSTLHQEEAFEKKSRKVAIREKAEHLELRKTLEETEAYHRKLNEDNLLHAPEFVIKPRSHTVWEKENVKLHCSVAGWPEPRVTWYKNQVPINVHANPGKYIIESRYGMHTLEINACDFEDTAQYRASAMNVKGELSAYASVVVKRYKGEFDETRFHAGVSTLPLSFAVTPYGYASKFEIHFDDKFDVSFGREGETMSLGCRVVITPDIKHFQPEVQWYRNGAPVSPSKWVQTHWSGDRATLTFSHLNKEDEGLYTIRVRMGDYYEQYSAYVFVRDADAEIEGAPASPLDVVCLDANKDYIIISWKQPAVDGGSPILGYFIDKCEVGTNNWSQCNDTPVKFARFPVTGLIEGRSYIFRVRAVNKNGIGLPSRVSEPVAALDPAEKARLRSRPSAPWTGQIIVTEEEPTEGIVPGPPTDLSVIEATQSYVVLSWKPPKQRGHEGILYFIEKCDAGAENWQRVNTELPVKSPRFALFDLAEGKSYQFRVRCSNSAGVGEPSEATEVTVVGDKLDIPKAPSNIIPSRNTDTSVVVTWEESKDAKELVGYYIESSVVGSGKWEPCNNNPVKGTRFTCHGLTTGQSYIFRVRAVNAAGLSEYSQDSEAIEVKAAIVVGGAVSPAVWPELSDTPGGLTDFRGGMHDTSQPTFKKDALLGSKLNKASLPSSSHNLGQTEVRKVSETVQEELSPPPQKAAVKGKSKSDPLKKKKDLATAAPSPPCDITCLESFRDSMVLGWKQPDKTGGAEITGYYVNYREVIDGVPGRWREANIKAISDEAYKISNLKENMVYQFQVAAMNIAGLGEPSAVSASFKCEEWTIAVPGPPHSLKYSEVRNTSLVLQWKPPIHSGRTPVTGYFVDMKEANAKEDHWRGLNEAALKNTYLKVQGLKEGVSYVFRVRAINQAGVGKPSDLAGPVVAETRPGTKEVVVSVDDDGIISLNFECDQMAPNSEFTWSKDYVPTEDSPRLEVESKGNKTKMTFKDLGVEDLGIYSCDVTETDGIAASYLIDEEELKRLLALSQEHKFPTVPIKSELAVEILEKGQVRFWMQAEKLSGNAKVNFIFNDKEIFEGPKYKMHIDRNTGMIEMFMEKLQDEDEGTYTFQVQDGRATGHSTLVLIGDVYKKLQKEAEFQRQEWIRKQGPHFAEYLSWEVTGECNVLLKCKVANIKKETHIVWYKDEREISVDEKHDFKDGICTLLITEFSKKDAGIYEVILKDDRGKDKSRLKLVDEAFKELMTEVCKTIALSATDLKIQSTAEGIRLYSFVTYYVDDLKVNWSHNGAAIKYTDRVKSGVTGEQIWLQINEPTPNDKGKYVMELFDGKTGHQKMVDLSGQAYEEAFAEFQRLKQAAIAEKNRARVVGGLPDVVTIQEGKALNLTCIVWGDPTPEVSWLKNEKLLASDEHCNLRFEAGKTAYFTISGVRTSDSGRYGLVVKNKYGSETSDFTVSVFIPEEEARQGVEEPPKGHKGNKKSP

SEQ ID NO: 1901 - protein, 298 aa, Sus scrofa
MPLSGTPAPNKKRKSSKLIMELTGGGQESSGLNLGKKISVPRDVMLEELSLLTNRGSKMFKLRQMRVEKFIYENHPDVFSDSSMDHFQKFLPTVGGQLGTAGQGFSYSKGSSGGQAGGSSSAGQYGSGQQHHHQGSGSGSGGAGGPGSQTGRGGDAGTTGVGETGTGDQAGGEGKHITVFKTYISPWEKAMGVDPHQKVELGIDLLAYGAKAELPQYKSFNRTAMPYGGYEKASKRMTFQMPKFDLGPLLSEPLVLYNQNLSNRPSFNRTPIPWLSSGEPVDYNVDIGIPLDGETEEL

SEQ ID NO: 1902 - protein, 271 aa, Sus scrofa
MSDEEVEHVEEEYEEEEEAQEEAPPPPAEVHEVHEEVHEVHEPEEVQEEEKPRPKLTAPKIPEGEKVDFDDIQKKRQNKDLMELQALIDSHFEARKKEEEELVALKERIEKRRAERAEQQRIRAEKERERQNRLAEEKARREEEEAKRRAEDDLKKKKALSSMGANYSSYLAKADQKRGKKQTAREMKKKVLAERRKPLNIDHLSEDKLRDKAKELWDALYQLEIDKFEYGEKLKRQKYDIINLRSRIDQAQKHSKKAGTTPKGKVGGRWK

SEQ ID NO: 1903 - protein, 360 aa, Sus scrofa
VSSVAHLARANPFIAPHLQLVQDGLAGPRSSPDGPPGPPRRTRNLAAAAVEEYSCEYGSMKFYALCGFGGVLSCGLTHTAVVPLDLVKCRMQVDPNKYKGIFNGFSITLKEDGVRGLAKGWAPTFIGYSLQGLCKFGFYEVFKVLYSNMLGEENAYLWRTSLYLAASASAEFFADIALAPMEAAKVRIQTQPGYANTLRDAAPKMYQEEGLKAFYKGVAPLWMRQIPYTMMKFACFERTVEALYKFVVPKPRSECSKPEQLVVTFVAGYIAGVFCAIVSHPADSVVSVLNKEKGSSASQVLRRLGFRGVWKGLFARIIMIGTLTALQWFIYDSVKVYFRLPRPPPPEMPESLKKKLGYTQ

SEQ ID NO: 1904 - protein, 421 aa, Sus scrofa
ARAAARHYADQRIKVAKPVVEMDGDEMTRIIWQFIKEKLILPHVDVQLKYFDLGLPNRDQTNDQVTIDSALATQKYSVAVKCATITPDEARVEEFKLKKMWKSPNGTIRNILGGTVFREPIICKNIPRLVPGWTKPITIGRHAHGDQYKATDFVVDRAGTFKIVFTPKDGSSAKQWEVYNFPAGGVGMGMYNTDESISGFAHSCFQYAIQKKWPLYMSTKNTILKAYDGRFKDIFQEIFEKHYKTDFDKYKIWYEHRLIDDMVAQVLKSSGGFVWACKNYDGDVQSDILAQGFGSLGLMTSVLVCPDGKTIEAEAAHGTVTRHYREHQKGRPTSTNPIASIFAWTRGLEHRGKLDGNQDLIRFAQTLEKVCVETVESGAMTKDLAGCIHGLSNVKLNEHFLNTSDFLDTIKSNLDRALGRQ

SEQ ID NO: 1905 - protein, 2720 aa, Sus scrofa
MMNNSGYSEAAGLGLGDEVDDMPSTEKDLAEDAPWKKIQQNTFTRWCNEHLKCVGKRLTDLQRDLSDGLRLIALLEVLSQKRMYRKFHPRPNFRQMKLENVSVALEFLEREHIKLVSIDSKAIVDGNLKLILGLIWTLILHYSISMPMWEDEDDEDARKQTPKQRLLGWIQNKVPQLPITNFNRDWQDGKALGALVDNCAPGLCPDWEAWDPNQPVENAREAMQQADDWLGVPQVIAPEEIVDPNVDEHSVMTYLSQFPKAKLKPGAPVRSKQLNPKKAIAYGPGIEPQGNTVLQPAHFTVQTVDAGVGEVLVYIEDPEGHTEEAKVVPNNDKDRTYAVSYVPKVAGLHKVTVLFAGQNIERSPFEVNVGMALGDANKVSARGPGLEPVGNVANKPTYFDIYTAGAGTGDVAVVIVDPQGRRDTVEVALEDKGDSTFRCTYRPVMEGPHTVHVAFAGAPITRSPFPVHVAEACNPNACRASGRGLQPKGVRVKEVADFKVFTKGAGSGELKVTVKGPKGTEEPVKVRDAGDGVFECEYYPVVPGKYVVTITWGGYAIPRSPFEVQVSPEAGMQKVRAWGPGLETGQVGKSADFVVEAIGTEVGTLGFSIEGPSQAKIECDDKGDGSCDVRYWPTEPGEYAVHVICDDEDIRDSPFIAHIQPAPPDCFPDKVKAFGPGLEPTGCIVDKPAEFTIDARAAGKGDLKLYAQDADGCPIDIKVIPNGDGTFRCSYVPTKPIKHTIIISWGGVNVPKSPFRVNVGEGSHPERVKVYGPGVEKTGLKANEPTYFTVDCSEAGQGDVSIGIKCAPGVVGPAEADIDFDIIKNDNDTFTVKYTPPGAGRYTIMVLFANQEIPASPFHIKVDPSHDASKVKAEGPGLNRTGVEVGKPTHFTVLTKGAGKAKLDVHFAGAAKGEAVRDFEIIDNHDYSYTVKYTAVQQGNMAVTVTYGGDPVPKSPFVVNVAPPLDLSKVKVQGLNSKVAVGQEQAFSVNTRGAGGQGQLDVRMTSPSRRPIPCKLEPGGGADAQAVRYMPPEEGPYKVDITYDGHPVPGSPFAVEGVLPPDPSKVCAYGPGLKGGLVGTPAPFSIDTKGAGTGGLGLTVEGPCEAKIECQDNGDGSCAVSYLPTEPGEYTINILFAEAHIPGSPFKATIRPVFDPSKVRASGPGLERGKAGEAATFTVDCSEAGEAELTIEILSDAGVKAEVLIHNNADGTYHITYSPAFPGTYTITIKYGGHPVPKFPTRVHVQPAVDTSGVKVSGPGVEPHGVLREVTTEFTVDARSLTATGGNHVTARVLNPSGAKTDTYVTDNGDGTYRVQYTAYEEGVHLVEVLYDDVAVPKSPFRVGVTEGCDPTRVRAFGPGLEGGLVNKANRFTVETRGAGTGGLGLAIEGPSEAKMSCKDNKDGSCTVEYIPFTPGDYDVNITFGGRPIPGSPFRVPVKDVVDPGKVKCSGPGLGAGVRARVPQTFTVDCSQAGRAPLQVAVLSPTGVAEPVEVRDNGDGTHTVHYTPATDGPYTVAVKYADQEVPRSPFKIKVLPAHDASKVRASGPGLNASGIPASLPVEFTIDARDAGEGLLTVQILDPEGKPKKANIRDNGDGTYTVSYLPDMSGRYTITIKYGGDEIPYSPFRIHALPTGDASKCLVTVSIGGHGLGACLGPRIQIGEETVITVDAKAAGKGKVTCTVSTPDGAELDVDVVENHDGTFDIYYTAPEPGKYVITIRFGGEHIPNSPFHVLACDPMPHVEEPSEVLQLHRPSAYPTHWATEEPVVPVESMESMLRPFNLVIPFTVQKGELTGEVRMPSGKTARPNITDNKDGTITVRYAPTEKGLHQMGIKYDGNHIPGSPLQFYVDAINSRHVSAYGPGLSHGMVNKPATFTIVTKDAGEGGLSLAVEGPSKAEITCKDNKDGTCTVSYLPTAPGDYSIIVRFDDKHIPGSPFTAKITGDDSMRTSQLNVGTSTDVSLKITESDLSQLTASIRAPSGNEEPCLLKRLPNRHIGISFTPKEVGEHVVSVRKSGKHVTNSPFKILVGPSEIGDASKVRVWGKGLSEGQTFQVAEFIVDTRNAGYGGLGLSIEGPSKVDINCEDMEDGTCKVTYCPTEPGTYIINIKFADKHVPGSPFTVKVTGEGRMKESITRRRQAPSIATIGSTCDLNLKIPGNWFQMVSAQERLTRTFTRSSHTYTRTERTEISKTRGGETKREVRVEESTQVGGDPFPAVFGDFLGRERLGSFGSITRQQEGEASSQDMTAQVTSPSGKTEAAEIVEGEDSAYSVRFVPQEMGPHTVTVKYRGQHVPGSPFQFTVGPLGEGGAHKVRAGGTGLERGVAGVPAEFSIWTREAGAGGLSIAVEGPSKAEIAFEDRKDGSCGVSYVVQEPGDYEVSIKFNDEHIPDSPFVVPVASLSDDARRLTVTSLQETGLKVNQPASFAVQLNGARGVIDARVHTPSGAVEECYVSELDSDKHTIRFIPHENGVHSIDVKFNGAHIPGSPFKIRVGEQSQAGDPGLVSAYGPGLEGGTTGVSSEFIVNTLNAGSGALSVTIDGPSKVQLDCRECPEGHVVTYTPMAPGNYLIAIKYGGPQHIVGSPFKAKVTGPRLSGGHSLHETSTVLVETVTKSSSSRGSSYSSIPKFSSDASKVVTRGPGLSQAFVGQKNSFTVDCSKAGTNMMMVGVHGPKTPCEEVYVKHVGNRVYNVTYTVKEKGDYILIVKWGDESVPGSPFKVNVP

SEQ ID NO: 1906 - protein, 419 aa, Sus scrofa
MASTFSKLLTGRNASLLFATLGTGALTTGYLMNQRSVCAEAREQHRLFPPSADYPDLRKHNNCMAECLTPAIYAKLRNKVTPNGYTLDQCIQTGVDNPGHPFIKTVGMVAGDEESYEVFADLFDPVIKLRHNGYDPRVMKHPTDLDASKITQGQFDERYVLSSRVRTGRSIRGLSLPPACTRAERREVENVAITALEGLKGDLAGRYYKLSEMTEQDQQRLIDDHFLFDKPVSPLLTCAGMARDWPDARGIWHNYDKTFLIWINEEDHTRVISMEKGGNMKRVFERFCRGLKEVERLIQERGWEFMWNERLGYILTCPSNLGTGLRAGVHVRIPKLSKDPRFSKILENLRLQKRGTGGVDTAAVADVYDISNIDRIGRSEVELVQIVIDGVNYLVDCEKKLERGQDIKVPPPLPQFSRK

SEQ ID NO: 1907 - protein, 558 aa, Sus scrofa
MAALTQNPQFKKLQTWYHEHRSDLNLRRLFEGDKDRFNHFSLNLNTNHGRILLDYSKNLVTEAVMQMLVDLAKSRGVEAARERMFNGEKINFTEDRAVLHVALRNRSNTPILVDGKDVMPEVNRVLEKMKSFCKRVRSGEWKGYSGKSITDVINIGIGGSDLGPLMVTEALKPYSAEGPRVWFVSNIDGTHIAKTLATLNPESSLFIIASKTFTTQETITNAETAKEWFLQSAKDPSAVAKHFVALSTNTTKVKEFGIDPQNMFEFWDWVGGRYSLWSAIGLSIALHVGFDNFEQLLSGAHWMDQHFRTTPLEKNAPVLLALLGIWYINFFGCETHAMLPYDQYLHRFAAYFQQGDMESNGKYITKSGTRVDHQTGPIVWGEPGTNGQHAFYQLIHQGTKMIPCDFLIPVQTQHPIRKGLHHKILLANFLAQTEALMKGKSTEEARKELQAAGKSPEDFEKLLPHKVFEGNRPTNSIVFTKLTPFILGALIAMYEHKIFVQGVIWDINSFDQWGVELGKQLAKKIEPELDGSSPVTSHDSSTNGLINFIKQEREARSQ

SEQ ID NO: 1908 - protein, 284 aa, Sus scrofa
MDAIKKKMQMLKLDKENAIDRAEQAEADKKQAEDRCKQLEEEQQALQKKLKGTEDEVEKYSESVKDAQEKLEQAEKKATDAEADVASLNRRIQLVEEELDRAQERLATALQKLEEAEKAADESERGMKVIENRAMKDEEKMELQEMQLKEAKHIAEDSDRKYEEVARKLVILEGELERSEERAEVAESRARQLEEELRTMDQALKSLMASEEEYSTKEDKYEEEIKLLEEKLKEAETRAEFAERSVAKLEKTIDDLEETLASAKEENVEIHQTLDQTLLELNNL

SEQ ID NO: 1909 - protein, 533 aa, Sus scrofa
VSKNALGSSFVAARNLHASNTRLQKTGTAEVSSILEERILGADTSVDLEETGRVLSIGDGIARVHGLRNVQAEEMVEFSSGLKGMSLNLEPDNVGVVVFGNDKLIKEGDIVKRTGAIVDVPVGEELLGRVVDALGNAIDGKGPIGSKTRRRVGLKAPGIIPRISVREPMQTGIKAVDSLVPIGRGQRELIIGDRQTGKTSIAIDTIINQKRFNDGTDEKKKLYCIYVAIGQKRSTVAQLVKRLTDADAMKYTIVVSATASDAAPLQYLAPYSGCSMGEYFRDNGKHALIIYDDLSKQAVAYRQMSLLLRRPPGREAYPGDVFYLHSRLLERAAKMNDAFGGGSLTALPVIETQAGDVSAYIPTNVISITDGQIFLETELFYKGIRPAINVGLSVSRVGSAAQTRAMKQVAGTMKLELAQYREVAAFAQFGSDLDAATQQLLSRGVRLTELLKQGQYAPMAIEEQVAVIYAGVRGYLDKLEPSKITKFENAFLSHVISQHQALLGKIRADGKISEETDAKLKEIVTNFLAGFEA

SEQ ID NO: 1910 - protein, 781 aa, Sus scrofa
MAPYSLLVTRLQKALGVRQYHVASVLCQRAKVAMSHFEPHEYIRYDLLEKNIDIVRKRLNRPLTLSEKIVYGHLDDPANQEIERGKTYLRLRPDRVAMQDATAQMAMLQFISSGLPKVAVPSTIHCDHLIEAQLGGEKDLRRAKDINQEVYNFLATAGAKYGVGFWRPGSGIIHQIILENYAYPGVLLIGTDSHTPNGGGLGGICIGVGGADAVDVMAGIPWELKCPKVIGVKLTGSLSGWTSPKDVILKVAGILTVKGGTGAIVEYHGPGVDSISCTGMATICNMGAEIGATTSVFPYNHRMKKYLSKTGRADIANLADEFKDHLVPDPGCHYDQVIEINLSELKPHINGPFTPDLAHPVAEVGSVAEKEGWPLDIRVGLIGSCTNSSYEDMGRSAAVAKQALAHGLKCKSQFTITPGSEQIRATIERDGYAQVLRDVGGIVLANACGPCIGQWDRKDIKKGEKNTIVTSYNRNFTGRNDANPETHAFVTSPEIVTALAIAGTLKFNPETDFLTGKDGKKFKLEAPDADELPRAEFDPGQDTYQHPPKDSSGQRVDVSPTSQRLQLLEPFDKWDGKDLEDLQILIKVKGKCTTDHISAAGPWLKFRGHLDNISNNLLIGAINIENRKANSVRNAVTQEFGPVPDTARYYKQHGIRWVVIGDENYGEGSSREHRALEPRHLGGRAIITKSFARIHETNLKKQGLLPLTFADPADYNKIHPVDKLTIQGLKDFAPGKPLKCIIKHPNGTQETILLNHTFNETQIEWFRAGSALNRMKELQQK

SEQ ID NO: 1911 - protein, 894 aa, Sus scrofa
EVQAKAGASTTLSCEVAQAQTEVTWYKDGKKLSASSKVHVEAKGCTRRLVVQQVGKADAGEYSCEAGGQKVSFHLDVTEPEPELAALERPRRREPLVVKEHEDIVLTATLATPSVAAVTWLKDGVEIRRSKRHEMASLGETHTLTVHGAQTLDSAVYSCRVGAEGQDFPVQTDVPSPPSEVAAKFCRPLESVSGELGGTVTLTCELSPAQAEAVWRCGNTQLRAGKRFQMAAAGLQRSLTVTGLRAEDAGEYVCQSRDDRTSATLTVRVPRMVKFTSPLSAVVAEEGCEANFQCVVTPSDVAVTWFRDGLQLQLSEKFLISQRGASHSLTISSLALEDSGQITAEAEGVKSTAALRVREAPVLFKKKLEPQTVEERSSVTMAVELTRQWPEVKWTRNAAALVPGENVEIHAEGESHRLVLHSVGFADRGFYGCETPDDKTQAKLTVEMRQVRLVRGLQAVEAQEQGVATMEVELSHADVEGSWTRDGLRLQPGPTCQLAVHGPTHSLTLSQLQRQDGGLVTFRAEGVHTSAQLVVTELPVKFSRPLQDVVATEKDKVILDCELSRPNVDVRWLKDGVELRLSKTVGMVAQGSCRSLIIYRCELGDQGVYMCDAHDAQTSASLKVQGRNVQIVRPLEDVEVMEKEGATFSCEVSHDEVPAHWFREGIKLRPTDNVRIRQEGRTYTLIYRRVLVGDAGEIKFVAENAESRAQLRVKELPVAILRPLRDKIAMEKHRGVLECQMSRASAQVRWFKGSVELQPGAKYEMISDGLYRKLVINAVQPEDEDTYTCDAGDVKTSAQFFVEEQSITIVRGLQDVTVMEPAPAWFECELSIPSVRPPKWLLGKTVLQAGADVGIEQEGTVHRLTLRRTFSTMTGPVHFTIGKSRSTASLVVSG

SEQ ID NO: 1912 - protein, 141 aa, Sus scrofa
VLSAADKANVKAAWGKVGGQAGAHGAEALERMFLGFPTTKTYFPHFNLSHGSDQVKAHGQKVADALTKAVGHLDDLPGALSALSDLHAHKLRVDPVNFKLLSHCLLVTLAAHHPDDFNPSVHASLDKFLANVSTVLTSKYR

SEQ ID NO: 1913 - protein, 147 aa, Sus scrofa
MVHLSAEEKEAVLGLWGKVNVDEVGGEALGRLLVVYPWTQRFFESFGDLSNADAVMGNPKVKAHGKKVLQSFSDGLKHLDNLKGTFAKLSELHCDQLHVDPENFRLLGNVIVVVLARRLGHDFNPNVQAAFQKVVAGVANALAHKYH

SEQ ID NO: 1914 - protein, 175 aa, Sus scrofa
MDIAIHHPWIRRPFFPFHSPSRLFDQFFGEHLLESDLFPASTSLSPFYFRPPSFLRAPSWIDTGLSEMRLEKDRFSVNLDVKHFSPEELKVKVLGDVIEVHGKHEERQDEHGFISREFHRKYRIPADVDPLTITSSLSSDGVLTVNGPRRQASGPERTIPITREEKPAVTAAPKK

SEQ ID NO: 1915 - protein, 227 aa, Sus scrofa
MGPSGPRGLPGPPGAPGPQGFQGPPGEPGEPGASGPMGPRGPPGPPGKNGDDGEAGKPGRPGERGPPGPQGARGLPGTAGLPGMKGHRGFSGLDGAKGDAGPAGPKGEPGSPGENGAPGQMGPRGLPGERGRPGPPGPAGARGNDGATGAAGPPGPTGPAGPPGFPGAVGAKGEAGPQGARGSEGPQGVRGEPGPPGPAGAAGPAGNPGADGQPGGKGANVSILKVS

SEQ ID NO: 1916 - protein, 187 aa, Sus scrofa
MPETQRKPKITASRKLLLKSLMLAKAKECWEQEHEEREAEKARYLAERIPTLQTRGLSLSALQDLCRELHAKVEVVDEERYDIEAKCLHNTREIKDLKLKVLDLRGKFKRPPLRRVRVSADAMLRALLGSKHKVSMDLRANLKSVKKEDTEKERPVEVGDWRKNVEAMSGMEGRKKMFDAAKSPTSQ

SEQ ID NO: 1917 - protein, 163 aa, Sus scrofa
MEIPVPVQPSWLRRASAPLPGLSAPGRLFDQRFGEGLLEAELAALCPATLAPYYLRAPSVALPTAQVPTDPGHFSVLLDVKHFSPEEIAVKVVGEHVEVHARHEERPDEHGYIAREFHRRYRLPPGVDPAAVTSALSPEGVLSIQAAPAPAQGPLPSPPAAAK

SEQ ID NO: 1918 - protein, 165 aa, Sus scrofa
SPKKAKKRADGANSNVFSMFEQTQIQEFKEAFTIMDQNRDGFIDKNDLRDTFAALGRVNVKNEEIDEMIKEAPGPINFTVFLTMFGEKLKGADPEETILNAFKVFDPEGKGVLRADYVKEMLTTQAERFSKEEIEQMFAAFPPDVTGNLDYKNLVHIITHGEEKD

SEQ ID NO: 1919 - protein, 338 aa, Sus scrofa
  MOD_RES (21)..(21): Any amino acid
MLSALARPAGAALRRSFSTSXQNNAKVAVLGASGGIGQPLSLLLKNSPLVSRLTLYDIAHTPGVAADLSHIETRATVKGYLGPEQLPDCLKGCDVVVIPAGVPRKPGMTRDDLFNTNATIVATLTAACAQHCPDAMICIISNPVNSTIPITAEVFKKHGVYNPNKIFGVTTLDIVRANAFVAELKGLDPARVSVPVIGGHAGKTIIPLISQCTPKVDFPQDQLSTLTGRIQEAGTEVVKAKAGAGSATLSMAYAGARFVFSLVDAMNGKEGVVECSFVKSQETDCPYFSTPLLLGKKGIEKNLGIGKISPFEEKMIAEAIPELKASIKKGEEFVKNMK

SEQ ID NO: 1920 - protein, 334 aa, Sus scrofa
MSEPIRVLVTGAAGQIAYSLLYSIGNGSVFGKDQPIILVLLDITPMMGVLDGVLMELQDCALPLLKDVIATDKEEIAFKDLDVAILVGSMPRRDGMERKDLLKANVKIFKCQGAALDKYAKKSVKVIVVGNPANTNCLTASKSAPSIPKENFSCLTRLDHNRAKAQIALKLGVTSDDVKNVIIWGNHSSTQYPDVNHAKVKLQAKEVGVYEAVKDDSWLKGEFITTVQQRGAAVIKARKLSSAMSAAKAICDHVRDIWFGTPEGEFVSMGIISDGNSYGVPDDLLYSFPVTIKDKTWKIVEGLPINDFSREKMDLTAKELAEEKETAFEFLSSA

SEQ ID NO: 1921 - protein, 364 aa, Sus scrofa
MPHSYPALSAEQKKELSDIALRIVAPGKGILAADESVGSMAKRLSQIGVENTEENRRLYRQVLFSADDRVKKCIGGVIFFHETLYQKDDNGVPFVRTIQDKGIVVGIKVDKGVVPLAGTDGETTTQGLDGLSERCAQYKKDGADFAKWRCVLKISERTPSALAILENANVLARYASICQQNGIVPIVEPEILPDGDHDLKRCQYVTEKVLAAVYKALNDHHVYLEGTLLKPNMVTPGHACPIKYSPEEIAMATVTALRRTVPPAVPGVTFLSGGQSEEEASLNLNAINRCPLPRPWALTFSYGRALQASALNAWRGQQDNAGAATEEFIKRAEVNGLAAQGKYEGGGEDGGAAAQSLYIANHAY

SEQ ID NO: 1922 - protein, 528 aa, Sus scrofa
MLGFVGRVASASASGALRGLSPSAPLPQAQLLLRAAPAALQPARDYATQPSPSPKAGAATGRIVAVIGAVVDVQFDEGLPPILNALEVQGRETRLVLEVAQHLGESTVRTIAMDGTEGLVRGQKVLDSGAPIKIPVGPETLGRIMNVIGEPIDERGPIKTKQFAAIHAEAPEFMEMSVEQEILVTGIKVVDLLAPYAKGGKIGLFGGAGVGKTVLIMELINNVAKAHGGYSVFAGVGERTREGNDLYHEMIESGVINLKDATSKVALVYGQMNEPPGARARVALTGLTVAEYFRDQEGQDVLLFIDNIFRFTQAGSEVSALLGRIPSAVGYQPTLATDMGTMQERITTTKKGSITSVQAIYVPADDLTDPAPATTFAHLDATTVLSRAIAELGIYPAVDPLDSTSRIMDPNIVGSEHYDVARGVQKILQDYKSLQDIIAILGMDELSEEDKLTVSRARKIQRFLSQPFQVAEVFTGHLGKLVPLKETIKGFQQILAGEYDHLPEQAFYMVGPIEEAVAKADKLAEEHS

SEQ ID NO: 1923 - protein, 879 aa, Sus scrofa
SNHLELQVSASGGTEDVGNLLENHFSAGDASIEEKERALQAEAAPRETNQLLHPPDGGEAGSSEKTAPGGPAAHGLGSDPEAGLSNASASEPAPPGEPAGPGEEDAGPPGAGALPPGGEEEPGEEGRPELSSGEGSGQEAEKQAGSGEVPEDALEDRPAEGAAAGTPEPEDAGASPSTEMESGGEGSPGPDQEPEVPDGPADADAEAGDRGKDPGEPSPSPASDVGADVGGAQEDGAPEGPPEEQPDAASSEEEGGEDRSGEEEGGVPSQEESEEDSGDGASSEEADSASEEEEEEEAAAAEEAQGAAGSASGEEEGAPPSPEEPHAGPEGEGTQGDRQGPAGRGEPQPPRAAYEPLTPAGGQGGKKQPKGTGRHWRSPKSMPPHHPKSFVQSAQVETAQILEARECEQPSLGASGGHGHLLLLFSEEAEDVSEEAPLRDRSHIEKTLMLNEDKPSDDFSVVLQRLRKIYHSSIKPLEQSYKYNELRQHEITDGEITSKPMVLFLGPWSVGKSTMINYLLGLENTRYQLYTGAEPTTSEFTVLMHGPKLKTIEGIVMAADSARSFSPLEKFGQNFLEKLIGIEVPHKLLERVTFVDTPGIIENRKQQERGYPFNDVCQWFIDRADLIFVVFDPTKLDVGLELEMLFRQLKGRESQIRIILNKADNLATQMLMRVYGALFWSLAPLINVTEPPRVYVSSFWPYDYKPDTHRDLFLREEISLLEDLNQVIENRLENKIAFIRQHAIRVRIHALLVDRYLQTYKDKMTFFSDGELVFKDIVEDPDKFYIFKTILAKTNVSKFDLPNREAYKDFFGINPISGFKLLSQQCSYMGGCFLEKIERAITQDLPGLLGSLGLGKNPGALNCDKTGCGEAPKNRYRRP

SEQ ID NO: 1924 - protein, 147 aa, Sus scrofa; identical to SEQ ID NO: 854

SEQ ID NO: 1925 - protein, 221 aa, Sus scrofa
MGFPGPKGAAGEPGKAGERGVPGPPGAVGPAGKDGEAGAQGPPGPAGPAGERGEQGPAGSPGFQGLPGPAGPPGEAGKPGEQGVPGDLGAPGPSGARGERGFPGERGVQGPPGPAGPRGANGAPGNDGAKGDAGPKGADGAPGKDGVRGLTGPIGPPGPAGAPGDKGETGPSGPAGPTGARGAPVSTEDPIKAPYSALLSLRTNPWLSFCPSSTLVPTGSC

SEQ ID NO: 1926 - protein, 230 aa, Sus scrofa
QGVDEGPDGLKLISEVIGERLGIPMSVLMGANIANEVADEKFCETTIGCKDLAQGQLLKELMQTPNFRVTVVQEVDTVEICGALKNIVAVGAGFCDGLGFGDNTKAAVIRLGLMEMIAFAKLFCHGPVSSATFLESCGIADLITTCYGGRNRKVAEAFARTGKSIEQLEKEMLNGQKLQGPQTAQELHSILQHKGLVDKFPLFMAVYKICYENHPVSEFICCLQNHPEHS

SEQ ID NO: 1927 - protein, 461 aa, Sus scrofa; identical to SEQ ID NO: 733

SEQ ID NO: 1928 - protein, 478 aa, Sus scrofa
MSAAPGLLHQELSCPLCLQLFDAPVTAECGHSFCRACLGRVAGEPAADGTVLCPSCQAPTRPQALSTNQQLARLVEGLAQVPQGHCEEHLDPLSIYCEQDRVLVCGVCASLGSHRGHRLLPAAEAHARLKTQLPQQKLQLQEACMRKEKSVGVLEQQLVEVEETVRQFRGAVGEQLGKMRLFLAALEGSLDREAERVRGEAGVALRRELGSLKSYLEQLRQMEKVLEEVADKPQTEFLMKYCLVTSRLQKILAESPPPARLDIQLPVISDDFKFQVWRKMFRALMPAMQELTFDPSTAHPSLVLSASGRRVECSEQKAPPAGEDPRQFDKAVAVVTHQLLSEGEHYWEVEVGDKPRWALGVIGAQAGRRGRLHAVPSQGLWLLGLREGKILEAHVEAKEPRALRTPERRPSRIGIYLSFADGVLSFYDASDADALELLFAFHERLPGPVYPFFDVCWHDKGKNAQPLLLVGPDSGGEA

SEQ ID NO: 1929 - protein, 725 aa, Sus scrofa
MALSSWSPELGFGGSEKALKAAATVSTGPSLELCTFPSTLGSSVAAAALEQLFVVEQSLQSDYFKCDEEAKTFLKDVAIAVKKLEEMRKTTIDLLEIESMELSRLYFLLETIPNSVSRELEECVRDARRLNLFEINQLHLKITRINNEIEFWKKKILDLKKMNTTLGEQQELLSRQHEKIVLSLNQAMKEKATTTVYINETYTQINSEKEELELQKLYLQEVEEQMEKEKAEYLKRKKQLSQEIEEYKELCEFKRKETYKKKKELDKLKLKVTKMRETVTTSTVVLSDHNLEIARLQESIKSWEKQVEDMKKSCKNLEDKMLFFRTNKEKLDDASNVEKSELLLKIKQVAEKLNNCRLENKDLQERLNTVTRQYKIVLNEENKVFMQKRKIHVENQKQLAFIAQKENFLSKRRVDIKNMEEGLITLNDLHRATKEVYQKQIRVLSDNRQREHERCIITQWKKACLLKKHTRWAIQIKAEIQEIIGEIQDAELRRSGLLQETSFREKEIHEFLAQIEQLTLQLKQEEEEFVVKEKKLIQELSMYEQRFVQEAQINKVKEDELVECLPQLHVAEEEYMDKNKKFEELTDVITAQKQDHNLLNDLISQLSRDFLQYLNNAKKVKQELKQLRDNESHRIKTHFEILKNLEYEIYVHDLKTDALLLENKRLKEYIEYMKKNIEKYKNEEDLRCTSSDLFCQLTALNTQYSDLWAEFKTTLKGQDSREVAE

SEQ ID NO: 1930 - protein, 1318 aa, Sus scrofa
MGHSKQIRILLLNEMEKLEKTLFRLEQGFELQFRLGPTLQGKPVTVYTNYPYPGEAFNREKFRSLEWENPTEREDDSDKYCKLNLQQAGSFQYYFLQGNEKSGGGYIVVDPILRVGADNHVLPLDCVTLQTFLAKCMGPFDEWESRLRVAKESGYNMIHLTPLQTLGLSRSCYSLADQLELNPDFSRPNKKYTWTDVGQLVEKLKKEWNMLCITDVVYNHTAANSRWLHEHPESAYNLVNSPHLKPAFVLDRALWHLSSDVAEGRYKERGVPALIENDHHMNCIRKIIWEDIFPKIQLWEFFQVDVNKAVEQFRGLLTQENRKTTKPDPKQHLKIIQDPEYRRLGCAVDMNIALATFIPHDNGPAAIDECCNWFRKRIEELNSEKHQLVNYHQEQAVNCLLGNVFYERLAGHGPKLGPVTRKHPLVTRYFTYPFEEVSLAAEESMIHVPNKACFLMAHNGWVMGDDPLRNFAEPGSDVYLRRELICWGDSVKLRYGKKPQDCPYLWEHMKKYTEITATYFQGVRLDNCHSTPLHVAEYMLDAARKLQPNLYVVAELFTGSEDLDNIFVTRLGISSLIREAMSAYNSHEEGRLVYRYGGEPVGSFVQPCLRPLMPAIAHALFMDITHDNECPIVHRSAYDALPSSTIVSMACCASGSTKGYDELVPHQISVVSEERFYTKWNPAASPSDTGEVNFQSGIIAARCAINKLHQELGAKGFIQVYVDQVDEDIVAVTRHSPSIHQSVVSVSRTAFRNPKTSFYSKEVPQMCIPGKIEEVVLEARTVERNTKPYRKDENSINGMPNITVEIREHIQLNESKIVKQAGVTTKGPNEYIQEIEFENLSPGSVIIFRVSLDPHAQVAVGILRNHLTQFSPHFKSGSLAVDNADPILKIPFASIASKLTLAELNQVLYRCESEEQEDGGGCYNIPNWSPLKYAGLQGLMSVMAEIRPRNDLGHPFCDNLRSGDWMIDYVSNRLISRSGTIAEVGKWLQAMFFYLKQIPRYLIPCYFDAILIGAYTTLLDTAWKQMSSFGQNGSNLFETPFTGSVQMCGSRKIPSLALLPSLYDVPYRLNEITREKEQCCVSLAAGLPHFSSGIFRCWGRDTFIALRGLLLITGRYLEARNIILAFAGTLRHGLIPNLLGEGTHARYNCRDAVWWWLQCIQDYCKTVPNGLDILQCPVSRMYPTDDSVPLSAGTLDQPLFEVIQEAMQRHMQGIQFRERNAGPQIDRNMKDEGFNITAGVDEETGFVYGGNRLNCGTWMDKMGESDRARNKGIPATPRDGSAVEIVGLSKSAVRWLLELSKKNIFPYHEVTVKRHGKL

SEQ ID NO: 1931 - protein, 363 aa, Salmo salar
MPHAFPFLTPDQKKELSDIALKIVAKGKGILAADESTGSVAKRFQSINTENTEENRRLYRQLLFTADDRAGPCIGGVIFFHETLYQKTDAGKTFPEHVKSRGWVVGIKVDKGVVPLAGTNGETTTQGLDGLYERCAQYKKDGCDFAKWRCVLKITSTTPSRLAIMENCNVLARYASICQMHGIVPIVEPEILPDGDHDLKRTQYVTEKVLAAMYKALSDHHVYLEGTLLKPNMVTAGHSCSHKYTHQEIAMATVTALRRTVPPAVPGVTFLSGGQSEEEASINLNVMNQCPLHRPWALTFSYGRALQASALKAWGGKPGNGKAAQEEFIKRALANSLACQGKYVASGDSAAAGDSLFVANHAY

SEQ ID NO: 1932 - protein, 334 aa, Salmo salar
MVKVGVNGFGRIGRLVTRAAFHSKKGVEIVAINDPFIDLDYVVYMFKYDSTHGRFHGEVKAEGGKLVIDGHKITVFHERDPANIKWGDAGATYVVESTGVFTTIEKASTHLKGGAKRVVISAPSADAPMFVMGVNHEKYDNSLKVVSNASCTTNCLAPLAKVIHDNYHIIEGLMSTVHAVTATQKTVDGPSGKLWRDGRGASQNIIPASTGAAKAVGKVIPELNGKITGMAFRVPTPNVSVVDLTVRLEKPASYDAIKKVVKAAADGPMKGILGYTEQQVVSSDFNGDTHSSIFDAGAGIALNDHFVKLVTWYDNEFGYSNRVIDLMAHMATKE

SEQ ID NO: 1933 - protein, 363 aa, Salmo salar
MPHAFPFLTPDQKKELSDIAHKIVAQGKGILAADESTGSVAKRFQSINTENTEENRRLYRQLLFTADERAGPCIGGVIFFHETLYQKTDAGKTFPQHVKSRGWLVGIKVDKGVVPLAGTNGETTTQGLDGLYERCAQYKKDGCDFAKWRCVLKITSTTPSRLAIMENCNVLARYASICQMHGIVPIVEPEILPDGDHDLKRTQYVTEKVLAAMYKALSDHHVYLEGTLLKPNMVTAGHSCSHKYTHQDIAMATITALRRTVPPAVPGITFLSGGQSEEEASINLNVMNQCPLHRPWAITFSYGRALQASALKAWGGKPKNGKAAQEEFIKRALANSLACQGKYVSSGDSAAAGDSLFVANHAY

SEQ ID NO: 1934 - protein, 434 aa, Salmo salar
MSIIKIHAREILDSRGNPTVEVDLYTAKGRFRAAVPSGASTGIHEALELRDGDKSRYLGKGTLKAVDHVNKDIAAKLIEKKFSVVDQEKIDKFMLELDGTENKSKFGANAILGVSLAVCKAGAAEKGVPLFRHIADLAGHKDVILPCPAFNVINGGSHAGNKLAMQEFMILPIGASNFHEAMRIGAEVYHNLKNVIKAKYGKDATNVGDEGGFAPNILENNEALELLKSAIEKAGYPDKIIIGMDVAASEFYKAGKYDLDFKSPDDPARYITGDQLGDLYKSFIKGYPVQSIEDPFDQDDWAAWSKFTAAVDIQVVGDDLTVTNPKRIQQAVEKKACNCLLLKVNQIGSVTESIKACKLAQSNGWGVMVSHRSGETEDTFIADLVVGLCTGQIKTGAPCRSERLAKYNQLMRIEEALGDKAKFAGKDYRHPKVN

SEQ ID NO: 1935 - protein, 434 aa, Salmo salar
MSITKIHAREILDSRGNPTVEVDLYTAKGRFRAAVPSGASTGVHEALELRDGDKSRYLGKGTVKAVDHVNKDIAAKLIEKKFSVVDQEKIDHFMLELDGTENKSKFGANAILGVSLAVCKAGAAEKGVPLYRHIADLAGHKDVILPCPAFNVINGGSHAGNKLAMQEFMILPIGASNFHEAMRIGAEVYHNLKNVIKAKYGKDATNVGDEGGFAPNILENNEALELLKTAIEKAGYPDKIIIGMDVAASEFYKAGKYDLDFKSPDDPARYITGDQLGDLYKSFIKGYPVQSIEDPFDQDDWAAWTKFTAAVDIQVVGDDLTVTNPKRIQQAVEKKACNCLLLKVNQIGSVTESIKACKLAQSNGWGVMVSHRSGETEDTFIADLVVGLCTGQIKTGAPCRSERLAKYNQLMRIEEELGAKAKFAGKDYRHPKIN

SEQ ID NO: 1936 - protein, 377 aa, Salmo salar
MCDDDETTALVCDNGSGLVKAGFAGDDAPRAVFPSIVGRPRHQGVMVGMGQKDSYVGDEAQSKRGILTLKYPIEHGIITNWDDMEKIWHHTFYNELRVAPEEHPTLLTEAPLNPKANREKMTQIMFETFNVPAMYVAIQAVLSLYASGRTTGIVLDSGDGVTHNVPIYEGYALPHAIMRLDLAGRDLTDYLMKILTERGYSFVTTAEREIVRDIKEKLCYVALDFENEMATAASSSSLEKSYELPDGQVITIGNERFRCPETLFQPSFIGMESAGIHETAYNSIMKCDIDIRKDLYANNVLSGGTTMYPGIADRMQKEITALAPSTMKIKIIAPPERKYSVWIGGSILASLSTFQAMWISKQEYDEAGPSIVHRKCF

SEQ ID NO: 1937 - protein, 381 aa, Salmo salar
MPFGNTHNNFKLNFKVEEEYPDLTKHNNHMAKVLTKDMYAKLRDKQTPSGFTLDDVIQTGVDNPGHPFIMTVGCVAGDEESYEIFKDLLDPIISDRHSGYKPTDKHKTDLNFENLKGGDDLDPNYVLSSRVRTGRSIKGYTLPPHNSRGERRAVEKLSVEALNTLDGEFKGKYYPLNKMTDAEQEQLIADHFLFDKPVSPLLLGAGMARDWPDARGIWHNDAKSFLVWVNEEDHLRVISMEKGGNMKEVFRRFCVGLKRIEETFKKHNHGFMWNEHLGYVLTCPSNLGTGLRGGVHVKLPKLSTHPKFEEILTRLRLQKRGTGGVDTASVGGVFDISNADRLGSSEVDQVQMVVDGVKLMVEMEKKLEKGEAIDGMIPAQK

SEQ ID NO: 1938 - protein, 247 aa, Salmo salar
MSRKFFVGGNWKMNGDKASLGELIKTLNSAKLDPNTEVVCGAPSIYLEFARSKLDPKIGVAAQNCYKVKGGAFTGEISPAMIKDVGVHWVILGHSERRWVFGETDELIGQKCAHALENGLGVIACIGEKLDEREAGITEKVINAQTKHFADNIKDWSKVVLAYEPVWAIGTGKTASPAQAQDVHDKLRQWVKANVSEAVANSVRIIYGGSVTGGTCKELGGMKDVDGFLVGGAALKPEFVDIINAKQ

SEQ ID NO: 1939 - protein, 380 aa, Salmo salar
MTKNCHNDYKMKFSDEEEFPDLSLHNNHMAKVLTKDMYKKLRSKSTPSGFTLDDCTQTGVDNPGHPFIMTVGCVAGDEECYEVFKDMFDPIISDRHGGYKPTDKHKTDLNFENLKGGDDLDPAYVLSSRVRTGRSIKGYTLPPHNSRGERRMVEKLSIEALATLDGEFKGKYYPLNGMTDAEQDQLIADHFLFDKPVSPLLLSAGMARDWPDARGIWHNDAKSFLVWVNEEDHLRVISMEKGGNMKEVFRRFCVGLQKIEAVFKKHNHGFMWNEHLGYVLTCPSNLGTGLRGGVHVKLPKLSTHAKFEEILTRLRLQKRGTGGVDTASVGGIFDISNADRLGSSEVQQVQMVVDGVKLMVEMEKKLEKGEAIDGMIPAQK

SEQ ID NO: 1940 - protein, 284 aa, Salmo salar
MDAIKKKMQMLKLDKENALDRAEGAEGDKKAAEDKSKQLEDDLVALQKKLKGTEDELDKYSESLKDAQEKLEVAEKTATDAEADVASLNRRIQLVEEELDRAQERLATALTKLEEAEKAADESERGMKVIENRASKDEEKMELQDIQLKEAKHIAEEADRKYEEVARKLVIIESDLERTEERAELSEGKCSELEEELKTVTNNLKSLEAQAEKYSQKEDKYEEEIKVLTDKLKEAETRAEFAERSVAKLEKTIDDLEDELYAQKLKYKAISEELDNALNDMTSI

SEQ ID NO: 1941 - protein, 530 aa, Salmo salar
MSKGKDMGSAFIQTQQLHAAMADTFLEHMCLLDIDSEPAVARNTGIICTIGPASRSVNMAKEMIKSGMNIARMNFSHGTHEYHAETIKNVREATESFGPGTIEYRPVAIALDTKGPEIRTGLIKGSGEAEVELKKGAHIKLTLDDKYKDNCDEKHLWLDYKNITKILKVGGHVYIDDGLMSLKVKEVGADFLDCEIENGGTLGSKKGVNLPGAAVDLPAVSEKDIQDLQFGVEQGVDMVFASFIRKAADVHAVRKVLGEKGKNIKIISKLENHEGVRRFDEILEASDGIMVARGDLGIEIPTEKVFIAQKMMTGRCNRIGKPITCATQMLESMIKKPRPTRAEGSDVANAVLDGNDCIMLSGETAKGDYPLEAVRTQHKIAREAEAAMYHRQMFEEIRRTSHLTRDPTESVAIGAVEASFKCCASAIIVLTKTGRSAHLLSRYRPRAPIIAVTRCGQTARQAHLYRGIYPVLYTKPANDVWAEDVDLRVNFALEMGKHRHFFKSGDVIIVVTGWRPGPGYTNTMRVVLVP

SEQ ID NO: 1942 - protein, 193 aa, Salmo salar
MAPKKDAKAPAKKAEPAKAAAPAPAPEPDVVAAPPPLDLSTVKVEFTPDQQEDYKEAFGLFDRVGDAKVAYNQVADIMRALGQNPTNKEVRKVLGNPSDEDMAAKRLEFEAFLPMLQHIVNDPNKGTFDDYVEGLRVFDKEGNGTVMGAELRIVLGTLGEKMSEAEIDALMQGQEDENGSINFEAFVKHIMSI

SEQ ID NO: 1943 - protein, 844 aa, Salmo salar
MSKPLSDHDRKKQISVRGLAGVENVAELKVAFNRHLHFTLVKDRNVASKRDYYFALANTVRDHLVGRWIRTQQYYYEKDPKRVYYISLEFYMGRTLQNTMVNLALENACDEAIYQLGLDMEELEDMEEDAGLGNGGLGRLAACFLDSMASLGLAAYGYGIRYEFGIFNQKIVNGWQVEEADDWLRYGNPWEKARPEYMRPVKFYGRTEHTPEGVKWVDTQVVLALPYDTPIPGYRNNIVNTMRLWSAKAPCDFNLKDFNVGGYIQAVLDRNLCENISRVLYPNDNFFEGKELRLKQEYFVVAATLQDIVRRFKASKFGSREIVRTDFAQLPNKVAIQLNDTHPAMAIPELMRVLVDEEKLEWDKAWDVCVRTCAYTNHTVLPEALERWPIDLFHHLLPRHLEIIYEINRRFLQYVASKFPGDNDRLRRMSLIEEGECKKVNMAHMCIVGSHAVNGVARIHSEILVATLFKDFYELDPHKFQNKTNGITPRRWLVMCNPGLAEVIAERIGEEFVRDLDQLKKLLKFIDDDAFIRDIAKVKQENKLKFAVHLEEHYKVKINPQSMFDFQVKRIHEYKRQLLNCLHMITYYNRIKKEPNKHWTPRTIMVGGKAAPGYHTAKMIIRLITAIGEVVNHDPVIGDRLKVIFLENYRVTLAEKAIPSADLSEQISTAGTEASGTGNMKFMLNGALTIGTMDGANVEMAEEAGEKNLFIFGMRVEEVDAMDAGKGYHASEYYNRIPELKQAMDQISGGFFSHKQPDLFKELVDLLMHHDRFKVFADYEAYIKSQDKVNELYKKPKEWTKMVIHNIAGCGKFSSDRTISQYAREIWGMEPSLEKIPAPDEQLK

SEQ ID NO: 1944 - protein, 417 aa, Salmo salar
MSLSNKLTLDKVDVKGKRVIMRVDFNVPMKDHNITNNQRIKAAVPTIKHCLDHGAKAVVLMSHLGRPDGNPMPDKFSLKPVAAELKSLLGKDVHFLKDCVGPEVEKACADPAAGSVILLENLRFHVAEEGKGKDASGNKTKATQEQIDSFRASLSKLGDVYVNDAFGTAHRAHSSMVGVNLSQKAAGFLMKKELDYFAMALEKPARPFLAILGGAKVKDKIQLINNMLDQVNEMIIGGGMAFTFLKVLNNMEIGNSLYDDEGAKIVKELMAKAEKNKVKINLPVDFITADKFDEHAQTGTATVAAGIPAGWMGLDCGPESNKHFAAAVGRAKQIVWNGPVGVFEFENFAKGTKSLMDKVVEVTKSGCVTIIGGGDTATCCAKWGTEDKVSHVSTGGGASLELLEGKVLPGVDALSSA

SEQ ID NO: 1945 - protein, 193 aa, Salmo salar
MAPKKDAKAPAKKAEPAKAAAPAPAPEPEVVAAPPPLDLSTVKVEFTPDQQEDYKEAFGLFDRVGDAKVAYNQVADIMRALGQNPTNKEVRKVLGNPSDEDMAGKRLEFEAFLPMLQHIVNDPNKGTFDDYVEGLRVFDKEGNGTVMGAELRIVLGTLGEKMSEAEIDALMQGQEDENGSINFEAFVKHIMSI

SEQ ID NO: 1946 - protein, 170 aa, Salmo salar
MAPKKAKRRGAAAEGGSSNVFSMFEQSQIQEYKEAFTIIDQNRDGIISKDDLRDVLASMGQLNVKNEELEAMVKEASGPINFTVFLTMFGEKLKGADPEDVIVSAFKVLDPEATGFIKKEFLQELLTTQCDRFSAEEMKNLWAAFPPDVAGNVDYKQICYVITHGEEKEE

SEQ ID NO: 1947 - protein, 255 aa, Salmo salar
MTTAHKLVIVRHGESEWNQYNKFCGWFDADLSEKGLEEAKRGAKAIKDAGMKFDICHTSVLKRAVKTLWTIMEGTDQMWLPVYRTWRLNERHYGGLTGLNKAETAEKHGEEQVKIWRRSFDTPPPPMEHDHAFHKIISESRRYKGLKPGELPTCESLKDTIARALPYWNDVIAPEIKAGKNVIIAAHGNSLRGIVKHLEGMSDAAIMELNLPTGIPIVYELDANLKPVKPMAFLGDAETVKKAMEAVAAQGKAKK

SEQ ID NO: 1948 - protein, 172 aa, Salmo salar
MSEKRMTSSRKHHLKSLMLQIAANLIEEEKKEMKQEKVNFMANIPALDLSGDQAMLMEMLKKLSQTIDKVDEERYDAEAKVKKTEKEIEDLKMKVIEVQGIKKPALKKVRMSADAMLAALLGTKHKASMDFRANLKEVKKEVKEEEEVGDWRKNVDEQAGMDGRKKKLSPHK

SEQ ID NO: 1949 - protein, 194 aa, Salmo salar
MADKIKDAKIIFVVGGPGSGKGTQCEKVVAKYGYTHLSSGDLLRAEVASGSERGKTLQAIMQKGELVPLDTVLDMIKDAMIAKADVSKGFLIDGYPREVKQGEEFEKKIGAPCLLLYIDAKGETMVKRLMKRGETSGRADDNEETIKKRLDLYYKATEPVIAFYSSRGIVRKIDSELPVDEVFGHVAKAIDDLK

SEQ ID NO: 1950 - protein, 506 aa, Salmo salar
MPAKPAPIKKAAPKEPAPKKEEAPAPAPAEAAPAEVAPPAEVEAPPAEAAPAEAAAPAEAAPTEEKAPAEPAPEQPKAPTPPPPDEPTSEPLEVTVDDKSDTSVTITWRPPKTIPANSGLDGYTVEITKEGTEDWKAANEDLTVSCRYVIKNQTTGDRLLIRVVAVNPGGRSPPATIADPVLVKEVGARPKVRLPRFLRQRYVKKVGEKINIVIPYSGKPKPVVSWLKDGQPLDSKRANIRTSDRDSILFIRQAERVDSGSYEMCVKVDDFEDKAAIIIQIIELPGPPASIKIVDVWGFNVALEWTVPKDNGNTEITGYTVQKADKKTGDWFNILEHYARLNATISDLIMGNTYTFRVFAENKCGLSEECAVTKGEATIVKEVIDYKPTPFVEHDFTEAPKFTTVLNDRSTTVGYSTKLLCSVRGCPKPKIMWMKNKMILNNMDNPKYRMISTGGICTLEIRKPGPYDGGEYVCRAENTLGKVDTGCKLEVRKPGQADADKDKKEQ

SEQ ID NO: 1951 - protein, 109 aa, Salmo salar
MACAHLCKEADIKTALEACKAADTFNFKTFFHTIGFASKSADDVKKAFKVIDQDASGFIEVEELKLFLQNFCPKARELTDAETKAFLKAGDADGDGMIGIDEFAVLVKQ

SEQ ID NO: 1952 - protein, 574 aa, Salmo salar
MLRLPTVMRQVRPVSRALAPHLTRAYAKDVKFGADARTMMLKGVDLLADAVAVTMGPKGRTVIIEQSWGSPKVTKDGVTVAKAIDLKCKYQNIGAKLVQDVANNTNEEAGDGTTTATVLARAIAKEGFDSISKGANPVEIRRGVMLAVETVINELKRMSKPVTTPEEIAQVATISANGDVEIGAIISNAMKKVGRKGVITVKDGKTLYDELEIIEGLKFDRGYISPYFINTAKGQKCEFQDAYVLLSEKKISSVQSIVPALELANQHRKPLVIVAEDVDGEALSTLVLNRLKVGLQVVAVKAPGFGDNRKAQLHDMAVATGGTVFGDEAVGIALEDIQAHDFGKVGEVSVTKDDTMLLKGKGDTAAIEKRQAEIVEQLENTTSDYEKEKLNERLAKLSDGVAVLKVGGTSDVEVNEKKDRVTDALNATRAAVEEGIVPGGGCALLRSIPALDALVPINTDQKIGIDIIRRALRVPAMTIAKNAGVEGSLVVEKILQAAGEIGYDAMEGEYVNMVEKGIIDPTKVVRTALMDAAGVASLLSTAECVVTELPKDEKEAGMPGGMGGMGGGMGGGMF

SEQ ID NO: 1953 - protein, 278 aa, Salmo salar
MSDTEEVEAIAEEVVEEVVEEEVVEEEVEVAPEAAPEPEAEPEPEPEPEAEPEPEPEPEPEAEAQKPQFKVPKIPDGDKVDFDDIQKKRQNKDLIELQALIDAHFEHRKKEEEELIALKERIEKRRAERAEQNRIRSEKEKERAARREEERLKREEADAKKKADEDAKKKSALSSMGSNYSSHLQKADSKRGGKKETEREKKKKILAGRRKALNIDHLNEEKLKEKAKELHEWMQTLESEKFDHIERLKRQKYEVTTLRKRVEELSKFSKKGKTVRRK

SEQ ID NO: 1954 - protein, 350 aa, Salmo salar
MALKKVCIIGSGNWGSAIAKIVGANAGKLDVFDTTVNMWVFEEMVNGRKLTEIINTDHENVKYLPGHKLPPNIVAVPEVTDAVKGADILIFVIPHQFINRICDTIKEHIKKDAVGMSLIKGVDEGPEGLKLISDVIREKLGVTMTVLMGANIANEVAEEKFCETTIGCKNKEWGPILKKLMQTTNFRVTVVEEADVVEICGALKNIVAVGAGFCDGLGFGDNTKAAVIRLGLMEMIAFARIFCTAGPVSPVTFLESCGVADLITTCYGGRNRKIAEAFAKTGKTIEELEKEMLNGQKLQGPATAAEVNHILKKKGLVDKFPLFSAVNQICFHGHPVKEFITCLQNHPEHM

SEQ ID NO: 1955 - protein, 462 aa, Salmo salar
MGKEKIHINIVVIGHVDSGKSTTTGHLIYKCGGIDKRTIEKFEKEAAEMGKGSFKYAWVLDKLKAERERGITIDISLWKFETAKYYVTIIDAPGHRDFIKNMITGTSQADCAVLIVAGGVGEFEAGISKNGQTREHALLAYTLGVKQLIVGVNKMDSTEPPYSQKRFEEIQKEVSTYIKKIGYNPATVAFVPISGWHGDNMLEASPNMGWFKGWKVERKEGGASGVTLLEALDSILAPSRPTDKPLRLPLQDVYKIGGIGTVPVGRVETGTLKAGMIVTFAPANVTTEVKSVEMHHETLEAALPGDNVGFNVKNVSVKDIRRGNVAGDSKNDPPMEAGNFTAQVIILNHPGQISQGYAPVLDCHTAHIACKFSELKEKIDRRSGKKLEDNPKALKSGDAAIIVMVPGKPMCVESFAAYPPLGRFAVRDMRQTVAVGVIKAVDKKAASTGKVTKSAIKATKAK

SEQ ID NO: 1956 - protein, 448 aa, Salmo salar
FESDLAAHQDRVEQIAAIAQELNELDYHDAVTINARCQGICDQWDNLGTLTQKRRDSLERVEKLWETIDQLYLEFAKRAAPFNNWMDGAMEDLQDMFIVHSIEEIQSLITAHDQFKATLPEADKERVATMGIQNEIVKIAQTYGIKLSGVNPYTNLSPQDITDKWDAVKHLVPLRDQMLQEEVARQQSNERLRRQFAAQANIIGPWIQTKMEEISHVSVDIAGSLEEQMSNLKQYEQNIINYKCNIDKLEGDHQLSQESLIFDNKHTNYTMEHVRVGWEQLLTTIARTINEVENQILTRDAKGISQEQLNEFRASFNHFDRKRNGMMDPDDFRACLISMGYDLGEVEFARIMTLVDSNNTGVVTFQAFIDFMTRETAETDTADQVMASFKILASDKTYITVEELRRELPPEQADYCISRMTSYIGSGAPPGALDYISFSSALYGESDL

SEQ ID NO: 1957 - protein, 298 aa, Salmo salar
MSDAVVSFIKDFLAGGIAAAISKTAVAPIERVKLLLQVQHASQQITKEMQYKGIMDCVRRIPKEQGFISFWRGNLANVIRYFPTQALNFAFKDKYKKIFLGGVDQKTQFWRWFAGNLASGGAAGATSLCFVYPLDFARTRLAADIGKSGAEREFSGLGSCLSKIYKADGIKGLYQGFNVSVQGIIIYRAAYFGVYDTAKGMLPDPKNTHIFVSWMIAQSVTAAAGIISYPFDTVRRRMMMQSGRKSADIMYTGTIDCWKKIAKNEGGKAFFKGAWSNVIRGMGGAFVLVLYDEIKKYT

SEQ ID NO: 1958 - protein, 451 aa, Salmo salar
MAGYLKVLSSLSRSAATFSKNPAVLAPATTCQSLQQRNYGDKRIKVSQPVVEMDGDEMTRIIWEFIKEKLILSNVDVELKYYDLGLPYRDQTDDQVTIDSAIATQKYHVAVKCATITPDEQRVEEFKLKKMWKSPNGTIRNILGGTVFREPIICKNIPRLVPGWTQPITIGRHAFGDQYRATDFVVSQPGTFKMVFSPTDGSKGQEWEVYKFPGGGCGMGMYNTDESISGFAHSCFQYAIGKKWPLYLSTKNTILKAYDGRFKDIFEEIYQANYKPEFDKLKIWYEHRLIDDMVAQVLKSDGAFVWACKNYDGDVQSDILAQGFGSLGLMTSVLVCPDGKTIEAEAAHGTVTRHYREHQKGNPTSTNPIASIFAWTRGLEHRGKLDGNPDLIKFALTLEKVCVETVESGVMTKDLAGCIHGLSKCKLNVHYVNTEDFLDAIKNNLDKALGK

SEQ ID NO: 1959 - protein, 417 aa, Salmo salar
MAFSFTRMMSCRNTATLLASLGAGTMATCYLMTDSNILSAEERRKLYPPSADFPDLRRHNNCMAHALTPAIYGKLRDQVTPNNWTLDQCIQTGVDNPGHPFIKTVGMVAGDEESYTVFADLFDPVIKDRHNGYDPKTMKHPTDLDASKITNGVFDEKYVLSSRVRTGRSIRGLSLPPCCSRSERREVERVTVQALAGLKGDLAGHYYSLGDMTEKEQQQLIDDHFLFDKPVSPLLTCAFMARDWPDGRGLWHNNEKTFLIWVNEEDHTRVISMEKGGNMKRVFERFCRGLQQVEKLIQERGWEFMWNEHLGYILTCPSNLGTGLRAGVHVRLAKLSKDPRFGKILDNMRLQKRGTGGVDTATTGDTFDISNNDRLGKSEVELVQLLVDGVNYLIDCEKRLERGQDIKVPAPIAQFRK

SEQ ID NO: 1960 - protein, 528 aa, Salmo salar
MLSVRVAAALARSLPRRAGFVSKNVAAACVGVNHLHTHKPCLAAKTGTAEVSSILEEKILGADTSADLEETGRVLSIGDGIARVYGLRNVQAEEMVEFSSGLKGMSLNLEPDNVGVVVFGNDKLIKEGDIVKRTGAIVDVPVGEELLGRVVDALGNAIDGKGPLGSSIRRRVGLKAPGIIPRISVKEPMQTGIKAVDSLVPIGRGQRELIIGDRQTGKTAIAIDTIINQKRFNEGKDEKKKLYCIYVAIGQKRSTVAQLVKRLTDADAMKYTIVVSATASDAAPLQYLAPYSGCSMGEFFRDNGKHGLIIYDDLSKQAVAYRQMSLLLRRPPGREAYPGDVFYLHSRLLERAAKMHDNFGGGSLTALPVIETQAGDVSAYIPTNVISITDGQIFLETELFYKGIRPAINVGLSVSRVGSAAQTKAMKQVAGTMKLELAQYREVAAFAQFGSDLDAATQQLLNRGVRLTELLKQGQYCPMAIEEQVTVIYAGVRGHLDKMDPSKITRFEKGLPCTHPQPAPGPAHHHQD

SEQ ID NO: 1961 - protein, 561 aa, Salmo salar
MTKITVVKTKAYPDQKPGTSGLRKRVTVFQTNAHYAENFIQSIISCIDPAERQPGLLVVGGDGRFFMKDAIQLIIQIAAANGIGHLVIGQDGIMSTPAVSCVIRKLKAVGGIILTASHNPGGPNGDFGIKYNIASGGPAPEGITDKIFQISKSITEYHICPDLKVDISKIGKQTFNVDTFKPMTVEIVDSVEAYAEMLRGIFDFHALKGLVSGSNHIKVRLDAMHGVVGPYVKKIVCEELGAAADGAFNCVPKEDFGGHHPDPNLTYASDLVNAMKGGEYDLGAAFDGDGDRNMVLGKHGFFVNPSDSVAVIAANITCIPYFQKTGVKGLARSMPTSGALDNVAKALKMNLYETPTGWKFFGNLMDAGKLSLCGEESFGTGSDHIREKDGLWAVLAWMSILAHRKQSVEEIMKDHWNKFGRNFFTRYDYEEVDSDKANTMIKELEAKMFDKSFVGQKFSSGDKSYEVPVSDNFAYTDPVDGSVSKNQGLRIVFSDGSRIIFRLSGTGSAGATVRLYIDSYEKDPAKIYGDAQVMLKPLVEIALKISGLHEKTGRTGPTVIT

SEQ ID NO: 1962 - protein, 914 aa, Arthrospira platensis C1
MSVKASGGSSVARPQLYKTVPVSTISQAEQQDRYLGKTELSDLATYFSSGAKRLEIAQVLTQNAELIVSRAANRIFTGGSPLAFLERPEEPEMAMAAAGSGDMEVAEGMKLGTISYVDNRGGGFFDGIKSLFKDSGSGPAVFLPPGFRPINVSRYGPGNMTKSLRDLSWFLRYTTYAIVAGDPNIIAVNVRGLREIIENACSSAATLVALQEMRRSALGYLQNDKEGQEIALQYFNVLISEFEGATPSNKVRQGQSVDQQGLELPQIYFNATIARQKFVMKPGLSSSEKQDVVKAAYRQVFERDITRAYSQGISDLESKFKNGEISTKEFIRRLGKSPLYRQQFYSRFVNSRVVELAARHFLGRGLSSPEEFSKYFAIVTKGGLAALVDAMVDSSEYADYFGEETVPYLRGLGTEAQECRNWGPQIDLFNYSAPFRTVPQFVTLFGDYKQPLRDQHVYGIGNDPLEIQFGAIFPKETRSPQNRPAPFGKDTRRILIRNGAGIDNQLSNPGARGNAPGSLGPKVFKLDQLPGGYVSSKFSNKGGSNGASVKFSESSTQKVIRAAYLQVFGRELYSGQRQTVAEIKLENGDITVREFIRILAKSDVFRNMYWTSLYVCKAIEYIHRRLLGRPTYGRQEMNSYFDLCSKKGFYALVDAIIDSVEYNEAFGEDTIPYERYLTPGGLSLRSMRVGTLAEKMTMVKDEPTPRFVELGTPTDQMKGELEIDNRINQGVNKRREQSKVFKLTNVTDKVALQTTIGAIYRQIFERDIDPYVTKKEFTALESKLGNGEITVKEFVEALGASALYIREFYTPYPNTKVIELGTKHFLGRAPLNQAEIRKYNQILASQGLKAFIGAMVNSMEYAQVFGEDTVPYRRFPTLPAANFPNTELLYNQLTKQNDELVVPSFEPVLANDRS

SEQ ID NO: 1963 - protein, 914 aa, Arthrospira platensis
  str. Paraca
MSVKASGGSSVARPQLYKTVPVSTISQAEQQDRYLGKTELSDLATYFSSGAKRLEIAQVLTQNAELIVSRAANRIFTGGSPLAFLERPEEPEMAMAAAGSGDMEVAEGMKLGTISYVDNRGGGFFDGIKSLFQDSGTGPAVFLPPGFRPINVSRYGPGNMTKSLRDLSWFLRYTTYAIVAGDPNIIAVNVRGLREIIENACSSAATLVALQEMRRSALGYLQNDKEGQEIALQYFNVLISEFEGATPSNKVRQGQSVDQQGLELPQIYFNAAEARQKFVMKSGMSSSEKLDVVKAAYRQVFERDITRAYSQGISDLESKFKNGEISTKEFIRRLGKSPLYRQQFYSRFVNSRVVELAARHFLGRGLSSPEEFSKYFAIVTKGGLAALVDAMVDSTEYADYFGEETVPYLRGLGTEAQECRNWGPQIDLFNYSAPFRKVPQFVTLFGDYKQPLRDQHVYGIGNDPLEIQFGAIFPKETRSPQNRPAPFGKDTRRILIHNGAGIDNQLSNPGARGNAPGSLGPKVFKLDQLPGGYISSKFSNKGGNSGASVKFSESSTQKVIRAAYLQVFGRELYSGQRQTVAEIKLENGDITVREFIRILAKSDVFRNMYWTSLYVCKAIEYIHRRLLGRPTYGRQEMNSYFDLCSKKGFYALVDAIIDSVEYNEAFGEDTIPYERYLTPGGLSLRSMRVGTLAEKMTMVKDEPTPRFVELGTPTDQMKGELEIDNQIKQGVNKRREQSKVFKLTNVTDKVALQTTIGAIYRQIFERDIDPYVTKKEFTALESKLGNGEITVKEFVEALGASALYIREFYTPYPNTKVIELGTKHFLGRAPLNQAEIRKYNQILASQGLKAFIGAMVNSMEYAQVFGEDTVPYRRFPTLPAANFPNTELLYNQLTKQNDELVVPSFEPVLANDRS

SEQ ID NO: 1964 - protein, 545 aa, Arthrospira platensis NIES-39
MAKRIIYNENARRALERGMDILAESVAVTLGPKGRNVVLEKKFGAPQIVNDGVTIAKEIELEDNIENTGVALIRQAASKTNDAAGDGTTTATVLAHAMVKEGLRNVAAGANPIELKRGIDKATAFLVDRIAEHARPVEDSKAIAQVGTISAGNDEEVGQMIAEAMDKVGKEGVISLEEGKSMTTELEITEGMRFDKGYISPYFATDTERMEAILDEPYILLTDKKITLVQDLVPVLEQVARSSRPLLIIAEDIEKEALATLVVNRLRGVLNVAAVKAPGFGDRRKAMLEDIAVLTGGQVITEDAGLKLESTKIDMLGKARRITITKDNTTIVAEGNEAGVKARCEQLRRQMEETESSYDKEKLQERLAKLAGGVAVIKVGAATETEMKDRKLRLEDAINATKAAVEEGIVPGGGTTLAHLAPQLEEWATSNQLTGEALTGAMIVARALLSPLKRIAENAGENGAVVAERVKEKSFDVGYNAANGEYVNMFEAGIVDPAKVTRSALQNAASIAGMVLTTECIVADKPEPKDNAAPAGAGMGGDFDY

SEQ ID NO: 1965 - protein, 1040 aa, Arthrospira platensis NIES-39
MNNVKVRIYELSRELNLENKDILAVCERLNISVKSHSSTITESDAERIEKYVASHPISTWSDENPDAAHQSHSGGGGGADKKKQQILEIRRPNLIRPENQPSPADSPQPEPSAESVATPPKPPNLSESSVSSQTNISELPKPNNSPQPPRKPPVEVTSSGATTAQDDVSGTIKPEKTTPQVSKSTTEEESPTLVAPPARPVPTATKSPQLSRKPVLKQNKPTPKPSQGGSAPVDKSADKADKADKPVASKQKKRPVPSDNQEVRDVKRRVSTVKPAKSMPELQPPPSRQSTVAIKTDSTDIIEDDSDIGAMPEDDGILESKRPKRGLTLKRPQPMTSPKRASAVDDEDDDDEKGGKAAKAKVKRPRIKPLIDDEDDEDFDSLTANSSESEALSMSLARPPKAKTGSGAGKLAVVSNQGRRKSAPSRNSGGSGGNSTAASRRSPTPALPEKVERLVVQGPMTVQELAHALLIAETEIIKRLFSRGIAVNITETLDFKTISMVCEELEVTVVTEEQKSEAQKPDNMLNAEDLDNLQRRPPVVTIMGHVDHGKTTLLDSIRKTKVAQGEAGGITQHIGAYHVDVTNESGETQQVVFLDTPGHEAFTAMRARGARVTDIAILVVAADDGVRPQTVEAISHAKAAGVPMVIAINKMDKESAQPDRVKQELTEYGLVPEEWGGDTIIVPVSAINGGNLDTLLEMLLLVAEVEDLYANPNRMAKGTVIEANLDKARGPVATLLVQNGTLRVGDVILAGSALGKVRAMIDDHGERVDNASPSFAVEVLGLRDVPAAGDEFEVFESEKEAAALASERANTARQSRLLQGRVSLSALSARVQEGELKDLNIILKADVQGSVEAIVNALKKLPQKEVQLRLLLAAAGEVTETDIDLAAASDAVLIGFNTTVASGARGAADRAGVDIREYNIIYNLLDDIEAAMEGMLEPELVEEPLGQAEVRAIFPVGRSRVAGCYVQSGKLIRNCKIRVHRGGQIVYDGFLDSLKRIKDDVKEVNAGYECGIAAENFNDWNESDSIEAYRMVTKRRTLSR

SEQ ID NO: 1966 - protein, 811 aa, Arthrospira platensis C1
MEKSADKADKADKPVASKHKKRPVTSDNQEVREVKKRVSTVKPARSMPELQPPPSRQPSVAIKTEPTEIIEDDSDIGAIPEDDGLLDSKRPKRGLTLKRPQPMTSPKRASSVDDDDDDIDEKGGKAGKAKVKRPRIKPLIDDEDDDDFDSLTTDSSESEALSISLARPPKAKTASGSGKLAAVSNQGRKKSAPSRHSGGSGGSGSGAAASRRAPTPALPEKVERLVVQGPMTVQELAHALSIAETEIIKRLFSRGIAVNITETLDFKTISMVCEELEVTVVTEEQKSAAQKPDNILNAEDLDNLQRRPPVVTIMGHVDHGKTTLLDSIRKTKVAQGEAGGITQHIGAYHVDVQNESGETQQVVFLDTPGHEAFTAMRARGARVTDIAILVVAADDGVRPQTVEAISHAKAAGVPMVIAINKMDKESAQPDRVKQELTEYGLVPEEWGGDTIMVPVSAINGGNLDTLLEMLLLVAEVEDLYANPNRMAKGTVIEANLDKARGPVATLLVQNGTLRVGDVILAGSALGKVRAMIDDHGQRVENASPSFAVEILGLRDVPAAGDEFEVFESEKEAAALASERANTARQSRLLQGRVSLSALSARVQEGELKDLNIILKADVQGSVEAIVNALKKLPQKEVQLRLLLAAPGEVTETDIDLAAASDAVLIGFNTTTASGARQAADRAGVDIREYNIIYNLLDDIEAAMEGMLEPELVEEPLGQAEVRAIFPVGRSRVAGCYVQSGKLIRNCKIRVHRGGQTVHDGFLDSLKRIKDDVKEVNAGYECGIAAENFNDWNEGDSIEAYRMVTKRRTLSR

SEQ ID NO: 1967 - protein, 836 aa, Arthrospira platensis C1
MVENKEKAFVLWFEEVGIVDVPLVGGKNASLGEMIQQLGSQGVSVPTGFATTAYAYRYFIEKAGLEVKLRELFSDLDVEDMPNLRQRGKQARALILDTPFPPELEEAIVSYYRKLCERYGTSAEFCEKFDSDYKEECKRYASDIDVAVRSSATAEDLPDASFAGQQETYLNVYGEDTVLKSCHKCFASIFTDRAISYRTIKGFDHFDVALSVGVQKMVRSDLASSGVMFSIDTETGFKNAALVTAAYGLGENVVQGAVNPDEYFVFKPTLKQGFRPILEKRLGTKELKMVYDIGGTKLTKNVSVPVSEREKFCITDDEILKLAEWAVIIENHYSTVRGCYTPMDIEWAKDGVTGELFIVQARPETVQSQKSGSVLRSYKLNGTSNVLSRGRAVGEMIGQGKARVIMDVHRIDDFQPGEVLVTNKTDPDWEPIMKRSSAIVTNAGGRTCHAAIIAREMGIPAIVGCGDATEVVKTGQDITVSCSEGEEGRVYEGLVPFDVNETVLDNLPKTRTQILMNVGNPEEAFGLASIPCDGVGLARLEFIIANHIKAHPLALLKYDQLEDESVKREIGELTKLYDHKPDFFVDKLAHGIGTIAAAFYPNPVIVRMSDFKSNEYANLLGGRQFEPKEENPMIGWRGASRYYDPNYREAYGLECVALKRVRDEMGLTNVVPMIPFCRTPDEGRKVLAEMEKYGLKRGENGLQVYVMCELPSNVIFADEFAQVFDGFSIGSNDLTQLTLGLDRDSALVAHIFDERNEAVRRMVTIAIKAAKKYGRKIGICGQAPSDYPEFARFLVELGIDSMSLNPDSVIKTILDIGKMEESGVLVDDIMEVAQAK

SEQ ID NO: 1968 - protein, 836 aa, Arthrospira platensis NIES-39
MVENKEKAFVLWFEEVGIADVPLVGGKNASLGEMIQQLNSKGVSVPTGFATTAYAYRYFVEKAGLEVKLRELFSDLDVEDMPNLRQRGKQARALILDTPFPPELEEEIVKYYRKLCERYATSAEFCEKFDSDYKEECKRYASDVDVAVRSSATAEDLPDASFAGQQETYLNVYGEDTVLKSCHKCFASIFTDRAISYRTIKGFDHFDVALSVGVQRMVRSDLASSGVMFSIDTETGFKNAALVTAAYGLGENVVQGAVNPDEYFVFKPTLKQGFRPILEKRLGTKELKMVYDIGGTKLTKNVSVPVSEREKFCITDDEILKLAEWAVIIENHYSTVRGCYTPMDIEWAKDGITGELFIVQARPETVQSQKSGSILRSYKLNGTSNVLSRGRAVGEMIGQGKARVIMDVHRIDDFQPGEVLVTNKTDPDWEPIMKRSSAIVTNAGGRTCHAAIIAREMGIPAIVGCGDATQAVKTGQEITVSCSEGEEGRVYEGLVPFDVNETVLDNLPKTRTKILMNVGNPEEAFGLASIPCDGVGLARLEFIIANHIKAHPLALLKYDQLEDESVKREIGELTKLYDHKPDFFVDKLAHGIGTIAAAFYPNPVIVRMSDFKSNEYANLLGGRQFEPKEENPMIGWRGASRYYDPNYREAYGLECVALKRVRDEMGLTNVVPMIPFCRTPDEGRKVLAEMEKYGLKRGENGLQVYVMCELPSNVIFADEFAQVFDGFSIGSNDLTQLTLGLDRDSALVAHIFDERNEAVRRMVTIAIKAAKKYNRKIGICGQAPSDYPEFARFLVELGIDSMSLNPDSVIKTILDIGKMEESGVLVDDIMEVAQAK

SEQ ID NO: 1969 - protein, 345 aa, Arthrospira platensis C1
MDNAIGLEIIEVVEQAAIASARWMGKGEKNTADHVAVEAMRQRMNQIHMRGRIVIGEGERDEAPMLYIGEEVGICTQENSATFCNPEELVEIDIAVDPCEGTNLVAYGQNGSMAVLAISEKGGLFAAPDFYMKKLAAPPVARGHVDLNKSATENLQIISDCMGRAVEELVVVVMDRPRHKELIKEIREAGARVRLISDGDVSAAISCAFSGTNIHALMGIGAAPEGVISAAAMRCLGGHFQGQLIYDPEVVKTGLIGESKESNIARLKDMGIENPDKVYNAEELANGRTVLFAACGITSGTLMEGVRFFGGGARTQSLVISSQSKTARFVDTIHMFEKPKNIQLR

SEQ ID NO: 1970 - protein, 359 aa, Arthrospira platensis C1
MAIVPMRLLLDHAAENDYGIPAYNVNNMEQIQSIMQAAHETNSPVILQASRGARSYAGENFLRHLILAAVETYPHIPVAMHQDHGNSPATCYSAMRHGFTSVMMDGSLEADAKTPSDFEYNVRVTAEVVNVAHSIGVSVEGELGCLGSLETGMGDKEDGHGAEGVLTRDQLLTDPDQAVEFVERTQVDALAVAIGTSHGAYKFSRKPTGEILAISRIEEIHRRLPNTHLVMHGSSSVPEDLIALINQYGGQIPETYGVPVEEIQKGIKSGVRKVNIDTDNRLAITAAIREAAAKDPSNFDPRHFMKPSIKYMQKVCADRYQQFGTAGNADKIKVQTLDEFAAKYASGALSATSKKAVAV

SEQ ID NO: 1971 - protein, 284 aa, Arthrospira platensis C1; identical to SEQ ID NO: 607

SEQ ID NO: 1972 - protein, 1597 aa, Arthrospira platensis C1
MQAKEILQKSVQFLQQQAEAYLQQGQVDDARKACEQLLKIQPTSAVGLKILGDVSLRGGDLEGAKQNYTKALELQPNWAEVYANLGSLYARSQQWEQAQAAYQKAISIKPEFAGAYRNLAKVWTQLNRPLDAIRTQYKAYTLEPHTVSAQEHLALGDGLMQQGMATEAQACYQNAINLNPNLAAAYQNLGEALKQQGKLQEAATYFRKAIELNNQTPAVSNPVDTLAAAVSTPQDTLAAATAARQVPQPDVLVVGQSAQAPIEKGMGVPISRPVNPETVLQEAKAFCAIKKWEQAVSACQKALRLDPNLAEAYKIQGNALQVLGEMEAAVRSYHKALEVKPQFPEVHANLGSLYAQEDRLEKAVTFYQQAIAQNPNFAGVYRNLAKVLERLGREGEASICLEKAYTLEPNKATPEDHVRLGNTRLAQGKLDQAYESYQRALELNKQLAPAYYGIGKVKAYGQAWSEAEAAYRQAIELDPKSGVFYQGLAECLAGKQDFDGAIALYGQLLQLNPNWAAGYYQIGELRNQQWNLSEAEAAYRKALELDKNLAAAYYGLGRVLLRQERWADVVPVLRQAMALDASGADFELCKGFADALVQTGQLDEAIAFYQKATDLAADNAEVWQKLGDIWRDKQAFDQAIEAYQKANQLDANLFWSHNGLADVLFKLERWSEAVEAYQKAIAIKSDYSWSYNSLAEALVKLERWSEAATAYREAARLNPEFPWSSYNLGEVSVRLQNWEEAVKGYRAAMAVQSDLPGIQQKLADALRERAKGDLDEALGCYLQVMEQEPDNVDTYHKAIEIKPDDSELYVKLADTLARQTQLDGAIVFYQMAQDLDPDNRAIASRLQQVIEKKNEGVDLFIPQETFGETPILPTQKKSHPSEQPILPTQKKSRPSEQRFPIDQESYEQWLRENLPRPADLRQMSQAVNYLGYKPLISVIMPVYNTPEKFLKKAIESVINQVYPYWELCIADDNSSEPWIKPLLEEYARKDNRIKVAFRTENGHICAASNSALELAIGEYIALLDHDDVITPEALYEVALVLNENPDADMIYSDEDKLDQYGQRVFPYFKPDWCPDSFLARMYTCHLGVYRRELVNQVGNFRIGYEGSQDYDLVLRVTEKTNKIFHIPKILYSWRQHSGSTAYDPNSKLYAYIAAEKALNESFARCREKAQIVSDHENFPGQYTVRYHIEEHKLVSIIIPTRNLGTTLNHCLQSIFEKSTYPNYEVVVIDNGSDEQETFDIINAWKQKEPQRFSCYEFDVPFNYPQINNYGVTKARGDYLLFLNNDTEVLTPDWIEAMVEQAQRSSIGAVGALLLYPDDTIQHAGVVLGIGGVAGHSHKGYQAHHLGYYNQLVTVNNYSAVTGACLMCRRETFEEVGGLDEELEVAFNDVDFCLKLVSRGYRNIYLPHVVLYHYESKSRGYEDTPEKEERFKRESKIMKQRWRDVLKNDPCYNPNLSRIRQDYGIRLSNDENQVVAISMSEDKEALLGCAIDSPKLHHPFNEENMLIQGWVIGKHSPAKLIKFICGDRVLGESKMNQERGDVAKVFPDVPHAIDSGFVKTLDVSETPSEVEILILATMEDGNEIPLSTLHLRHGSSDD

SEQ ID NO: 1973 - protein, 546 aa, Arthrospira platensis AGB-AP02
MAVKGHAAPPTPWSKNLAEPKIDPTAYVHSFSNIIGDVRIGAHVLVAPGTSIRADEGFPFYIGDESNIQDGVVIHGLDEGKVKGDDGQSYSVWIGKNSSITHLSLIHGPAYVGDNCFIGFRSTVFNARVGNGCIVMMHALIQDVEIPPGKYVPSGAIITNQQQADRLPSVTDTDIKFSTHVVGVNQALAAGYQCSENLACISPLRNETKGSSSNGGRARSGGHSNLGAGPIPPETVQTISQLLAQGYKIGTEHADARRFRTGSWRSCAPIDSRNTSEVVSALAACLQDHQGEYVRLLGIDSKAKRRVLEEIIQRPDGPVASKSSNGQVSNAAASTASPSRTTATGSSDLAQKVSQILNQGYKIGTEYADARRFRTGSWRSGPQIDSSSASAVLSQLDAFMNEHTGEYVRLIGIDQKAKRRAVEEIIQRPDGRVSATPSPSAASPAPSSRSAQSSYSSANSSLTSETIEQVKNLLAQGYKIGTEHADKRRFRTGSWRSCTPIDSNNQREVMAALEGCMQEHSGEYVRLIGIDAQAKRRVLEEIIQRP

SEQ ID NO: 1974 - protein, 338 aa, Arthrospira platensis C1
MMKVAINGFGRIGRNFLRCWLTRGENTNLEVTAINDTSDPRINAHLLKYDSMLGTLHDADIKADENSLIVNGKTIKCVSDRNPLNLPWSEWGIDLIIEATGVFVTEEGASKHLSAGAKRVLITAPGKGSNIGTYVVGVNDHNYDPNAHVIVSNASCTTNCLAPVVKVLQDNFGIIKGTMTTTHSYTGDQRLLDASHRDVRRARAAALNIVPTSTGAAQAVALVIPELKGKLNGIAMRVPTPNVSVVDFVAQVEKTTFTEEVNKALQEAAEGPMKGILAYSDLPLVSSDYRGNNASSIVDASLTMVMGGDLVKVVAWYDNEWGYSQRVVDLAEIVAKHS

SEQ ID NO: 1975 - protein, 337 aa, Arthrospira platensis NIES-39
MKVAINGFGRIGRNFLRCWLTRGENTNLEVTAINDTSDPKINAHLLKYDSMLGTLHDADIKADENSLIVNGKTIKCVSDRNPLNLPWSEWGIDLIIEATGVFVTEEGASKHLSAGAKRVLITAPGKGSNIGTYVVGVNDHNYDPNAHVIVSNASCTTNCLAPVVKVLQDNFGIIKGTMTTTHSYTGDQRLLDASHRDVRRARAAALNIVPTSTGAAQAVALVIPELKGKLNGIAMRVPTPNVSVVDFVAQVEKTTFTEEVNKALQEAAEGRMKGVLAYSDLPLVSSDYRGNNASSIVDASLTMVMGGDLVKVVAWYDNEWGYSQRVVDLAEIVAKHW

SEQ ID NO: 1976 - protein, 254 aa, Arthrospira platensis C1
MVPLPLLSYTTTSFNTRVAGYEVPGDEQPQIYTAENMPSGSEWDALIWAAYRQIFSEHQMLKSNRQTFLESQLKFGQITVRDFIGGLATSAPFLERNYQTNSNYRFAEMCVQRILGRDVYNEREKIAWSIVIANKGPKGFIEELLNSDEYLDNFGYDTVPYQRRRILPQRNMGETPFNLKTPRYNEYHRTQLGFPQVIWQTSVRRFVPQEKQPKAGDPANFLAMAKQVSRPANTVTRVALGSINFDTMVPYRQR

SEQ ID NO: 1977 - protein, 751 aa, Arthrospira platensis C1
MTISPPEREVKAKVTVDKDPTPTSFERWGKPGHFRRDLAKGPSTTTWIWNLHADAHDFDSHTSDLEDISRKIFSAHFGHLAVIFIWLSGAYFHGAKFSNYEAWLTNPTGIKPSAQVVWPIFGQEILNADVGGGFQGIQITSGLFQLWRASGITNEFQLYCTAIGALVMAGLMLFAGWFHYHKRAPKLEWFQNVESMMNHHLAGLLGLGCLGWAGHQIHVSLPINKLLDAGVAPKDIPLPHEFILNSSLMAELYPSFKQGLTPFFTLNWGVYADFLTFKGGLNPQTGGLWLSDTAHHHLALAVLFIIAGHMYRTNWGIGHSMKELLEAHKGPFTGEGHKGLYEILTTSWHAQLAINLAMLGSLSIIVAHHMYAMPPYPYIATDYPTQLSLFTHHMWIGAFCIVGAGAHAAIFMVRDYDPAKNVNNLLDRVIRHRDAIISHLNWVCIFLGFHSFGLYVHNDTMRAFGRPQDMFSDTGIQLQPIFAQWVQNLHTLAPGNTAPNALASVSPAFGGDVIAVGGKVAMMPIALGTADFMVHHIHAFTIHVTVLILLKGVLYSRSSRLIPDKSELGFRFPCDGPGRGGTCQVSGWDHVFLGLFWMYNSLSIVIFHFSWKMQSDVWGTVASDGTISHITNGNFAQSAITINGWLRDFLWAQASQVINSYGSALSAYGLMFLAAHFVWAFSLMFLFSGRGYWQELIESIVWAHNKLKVAPAIQPRALSIIQGRAVGVAHYLLGGIVTTWAFFLARIISVG

SEQ ID NO: 1978 - protein, 823 aa, Arthrospira platensis C1
MFERFTEKAIKVIMLAQEEARRLGHNFVGTEQILLGLIGEGTGVAAKVLKSMGVNLKDARIEVEKIIGRGSGFVAVEIPFTPRAKRVLELSLEEARQLGHNYIGTEHLLLGLIREGEGVAARVLENLGVDLSKVRTQVIRMLGETAEVTAGGSSGRTKTPTLDEFGSNLTQMAAEGKLDPVVGRQKEIERVIQILGRRTKNNPVLIGEPGVGKTAIAEGLAQRIAQNDIPDILEDKRVVTLDIGLLVAGTKYRGEFEERLKKIMDEIRSCGNVILVIDEVHTLIGAGAAEGAIDAANILKPALARGELQCIGATTLDEYRKHIERDAALERRFQPVMVGEPSVPETIEILYGLRERYEQHHKLKIIDEALEAAAKLSDRYISDRYLPDKAIDLIDEAGSRVRLINSQLPPAAKELDKELRQVLKEKDDAVRSQDFDRAGELRDREMEIKSQIRAIAQNKKSETRTDDDDSPMVTEEDIAQIVASWTGIPVNKLTESESEKLLHMEDTLHQRLIGQEEAVKAVSRAIRRARVGLKNPNRPIASFIFSGPTGVGKTELTKSLAAYFFGSEEAMIRLDMSEFMERHTVSKLIGSPPGYVGYNEGGQLTEAVRRRPYTVVLFDEIEKAHPDVFNMLLQILEDGRLTDAKGRTVDFKNTLIIMTSNIGSKVIEKGGGGLGFEFEENQADAQYNRIRNLVNEELKQYFRPEFLNRLDEIIVFRQLNKDEVKEIAVIMLNEVFGRLTEKGIRLEITDRFKERLVEEGYNPSYGARPLRRAIMRLLEDSLAEEILSGRVKEGDTAIVDVNEDGQVQVLQGEKRELLPQAAD

SEQ ID NO: 1979 - protein, 811 aa, Arthrospira platensis C1
MATVYVNPSTGNDQGDGSQSSPYKTLTAACAKVESGTFIQLETGTYNSATGEQFPIMIPSGVTVVGNESGTGSGILIEGSGRHSSPSTGGQEVTIVMATNAELRGVTVTNNQVRGTGVWVESTSPNIVHCTFTRCRREGIYATGNGYPNILSNAFVENEGYGLSLEGNVQGEVRNNSFQNTGYGISVKGEVQTRISDNTLFENRSGLLIAGNSRPILRRNLIERNTGDGVVITNNAAPDLGSASESGGNMIRNNGGFDINHAGSVAIASFGNLLSAGRVQGNINVVAQSAPTSSPTTIHVNGSTGNDSAAGTASAPFKTITRGLQQATAGTVVQVAPGTYTAATGETFPLYVISGVTLIGNESSQGNGTQITGSGRFASPSAAGQNVTIVMENNSTLRGVSVTNEEIRGTAVWIESVYCVVANCRFFNSKREGVFVTGTAIPQILTSHFEKNAGNGIALAGNAKGEIRGNKLQDTGFAIAVQASAAPLISDNHIYNNRTGLVLSGSSKPVLRKNLIENNLQDGLTVIADAFPDLGSPQDAGGNIFRNNGKYDVQNAGKFTLVSVGNQINPTNTKGNIDFSANVTPSPSPSPSPSPSPSPSPSPSPSPSPSPTPTPTPPPGSDRFSDITGHWAREFIVRLTDMNIISGFPDGTFRPNENLTRAQHAALLAKAFDMAPIQQATAFRDVAIDFWGKMAIEQANRAGFLAGFPDRTFRPNENLNRAQAVVSLINGLKLTGGNPNSLNGYTDRGQIPSYATDAIATATERRIIVNYPTRTTLAPQRDITRAEISAILYQTLVATGRAEAINSPYIV

SEQ ID NO: 1980 - protein, 1143 aa, Arthrospira platensis C1
MPRGGDISILNGGDDVVGVTLISPNPNIPADLEHPSRPVQTMTNTTQYESAFELPDLIEIQRSSFRWFLETGLIEELESFSPISDYTGKLELHFLARDYKLKQPKYDVDDAKRRDSTYSVQMYVPTRLINKETGEIKEQEVFIGDLPLMTERGTFIINGAERVIVNQIVRSPGVYYKSEIDKNQRRTYSASLIPNRGAWLKFETDKNDLVWVRIDKTRKLSAQILLKALGLTNNEIFDALRHPDYFQKTIEKEGEFSEEDALMELYRKLRPGEPPTITGGEQLLQNRFFDPKRYDLGRVGRHKLNRKLRLSVPDSTRVLTPTDILSAIDYLINLEYDIGETDDIDHLGNRRVRSVGELLQNQIRVGLNRLERIIRERMTVGDAETLTPASLVNPKPLVAAIKEFFGSSQLSQFMDQTNPLAELTHKRRLSALGPGGLTRERAGFAVRDIHPSHYGRICPIETPEGPNAGLIGSLATHARVNPYGFIETPYYPVENGRVRRDLSPVYMTADEEDDLRVAPGDISYDSEGYILGDLVPVRYRQDFTKTSPDQVDYVAVSPVQIVSVATSLIPFLEHDDANRALMGSNMQRQAVPLLRPERPFVGTGLEAQAARDSGMVIVSRTDGEVSYVDGAKIRVIDPEGWEIEYELQKYQRSNQDTCLNQRPLVYEGDQVVAGQVLADGSSTEGAELALGHNVLVAYMPWEGYNYEDAILISERLVYDDVYTSIHIEKFEIEARQTKLGPEEITREIPNVGEDSLRQLDASGIIRIGAWVESGDILVGKVTPKGESDQPPEEKLLRAIFGEKARDVRDNSLRVPNGEKGRVVDVRVFTREQGDELPPGANMVVRVYVAQKRKIQVGDKMAGRHGNKGIVSRILPIEDMPYLPDGRPMDIVLNPLGVPSRMNVGQIFECLMGWAGENLKRRFKVIPFDEMFGQEMSRETVHSKLKEAREKLKKDWLFSEEYPGKTIVYDGRTGEAFDQPVTVGIAYILKLVHLVDDKIHARSTGPYSLVTQQPLGGKAQQGGQRFGEMEVWALEAFGAAYTLQELLTVKSDDMAGRNEALNAIVKGKAIPRPGTPESFKVLMRELQSLCLDIAAHKVETNKKDGASKDLEVDLMADEPHRVRTPSKPTYDLSVIDDDDQGNRL

SEQ ID NO: 1981 - protein, 409 aa, Arthrospira platensis C1
MARAKFERNKPHVNIGTIGHVDHGKTTLTAAITMTLAASGGAKARKYDDIDAAPEEKQRGITINTAHVEYETEQRHYAHVDCPGHADYVKNMITGAAQMDGAILVVSAADGPMPQTREHILLAKQVGVPSIVVFLNKADMVDDEELLELVELEVRELLSSYDFPGDDIPIVSGSALKALDFLTENPKTTRGENDWVDKIHALMDEVDAYIPTPERDIDKPFLMAVEDVFSITGRGTVSTGRIERGKVKVGDTVELIGIKDTRTTTVTGAEMFQKTLEEGMAGDNVGLLLRGIQKNDVQRGMVIAKPKSITPHTKFEAEVYILKKEEGGRHTPFFKGYRPQFYVRTTDVTGTIDEFTADDGSTPEMVIPGDRINMTVQLICPIAIEQGMRFAIREGGRTVGAGVVAKILA

SEQ ID NO: 1982 - protein, 401 aa, Arthrospira platensis NIES-39
MYSPTGTGVAMRTGAAGRIFVFEVEGMRQGQNTDNFNYPIRRSGTVYLTVPYERMNQEMRRLSKMGAKIVNIYPAGETPPVRTQAAPENGQQSQSSGTQTPTMTQAKAKTDIPVNIYKPKNPYIGKCLSNEELVREGGTGTVRHLIFDISGGDLRYLEGQSIGIIPPGTDNNGKPHKLRLYSIASTRHGDHVDDKTVSLCVRQLEYKHPETGETVYGVCSTYLCNLEAGADVAITGPVGKEMLLPEDEDATIIMMATGTGIAPFRAFLWRIFKEQHEDYKFKGLAWLFFGIPYSPNILYQQELEELQQQFPENFRLTLAISREQQNPEGGKMYIQDRIKENADQLWELIQKPNTHTYICGLKGMEGGIDEGMSAAAGKFDVDWSDYQKQLKKKHRWHVETY

SEQ ID NO: 1983 - protein, 409 aa, Arthrospira platensis NIES-39
MARAKFERNKPHVNIGTIGHVDHGKTTLTAAITMTLAASGGAKARKYDDIDAAPEEKQRGITINTAHVEYETAQRHYAHVDCPGHADYVKNMITGAAQMDGAILVVSAADGPMPQTREHILLAKQVGVPSIVVFLNKADMVDDEELLELVELEVRELLSSYDFPGDDIPIVSGSALKALDFLTENPKTARGENDWVDKIHALMDEVDAYIPTPERAIDKPFLMAVEDVFSITGRGTVSTGRIERGKVKVGETVELIGIKDTRTTTVTGAEMFQKTLEEGMAGDNVGLLLRGIQKNDVQRGMVIAKPGSITPHTKFEAEVYILKKEEGGRHTPFFKGYRPQFYVRTTDVTGTIDEFTADDGSTPEMIIPGDRINMTVQLICPIAIEQGMRFAIREGGRTVGAGVVAKILA

SEQ ID NO: 1984 - protein, 669 aa, Arthrospira platensis C1
MAVATQSLEQLCINSIRFLAIDAVEKANSGHPGLPMGAAPMAFVLWDRFMRYNPKNPKWFNRDRFVLSAGHGCMLHYALLHLTGYDSVGIDDIKQFRQWGSKTPGHPENHVTEGVEVTTGPLGQGIANAVGLALAEAHLAARFNKPDCTVVDHYTYVILGDGCNMEGISGEACSLAGHWGLGKLIAFYDDNHISIDGSTDISFTEDVAKRFEAYGWHVQHVADGNTDLEAIATAIEKAKAVTDQPSLIKVTTTIGFGSPNKANSHDVHGAALGKAEVQATRDHLGWSYPEFVIPDDAIKHFRKAVERGANYEDEWKAALETYKSKYPEEAATLERLLSGKLPEGWEKSLPTYTPETKADATRNQSGVTLNAIAGVLPELVGGSADLAPSNKTLLKGLGDFQKGQYQNRNLRFGVREHAMGAICNGIALHRSGLIPYGATFLVFTDYMRNSIRLSALSEAPVLWVMTHDSIALGEDGPTHQPVEHIASLRLIPDLTVIRPADGNETSGAYKVAIENRHYPTLMAFSRQNLPNLEGSSIDNVAKGAYVLSDNSDGTPDIILIGTGGETYLCVDAAVKLREEGKKVRVVSMPSWELFEKQDAAYKESVFPASVKKRLAVEAGVSFGWCRYVTDEGATISIDTFGASAPGGVVLEKFGFTVDNVVAKAKELLG

SEQ ID NO: 1985 - protein, 138 aa, Arthrospira platensis C1
MPKTTAEKLPEEPMTGKTLLHKVKSLGPNYSRRETAKQCGYYTRTKDNQTRANMTEFYDALLAAKGIALDPGRSKDGRGREASYRACVHKNGSLVIGANYTQEMGLKPGDQFEIRLGSKHIHLIQVEPKGMVDEDDEE

SEQ ID NO: 1986 - protein, 558 aa, Arthrospira platensis C1
MAKIVAFDEESRRAIERGVNALADAVRVTLGPRGRNVLIEKKFGVPDIVSDGITVAKAIELGDPLENTGARLIQEVAAKTNDVAGDGTTTAAVLAQAMIQEGLKNVAAGANPVALRRGIDKTVQYLVKEIESLAKPVEGSAIEQVATVSAGNDKEVGEMIALAMDKVTKDGVITVEESKSLTTELEVVEGMQIDRGYISPYFITDSERMTVELDNARVLITDKKISAIQDIVSVLEKVARSGQPLLIIAEDIDGEALATLVVNKARGVLNVAAIKAPGFGERRKAMLQDIAILTGGQLISEEIGLNLETATVEMLGTATKVTINKDSTTIVSGSGHQGEIQQRVEQLRKQLAETDSEYDQEKLQERIAKLAGGVAVIKVGAATETELKSRKLRIEDALNATKAAVDEGIVPGGGTTLIHLVKKVEQLAATFSIEEEKLGAKIVARALEAPLRQIANNSGVEGSVIVEQVRNSDSNIGYNALTGNFEDLIVAGILDPAKVVRSSLQNAGSIAGMVITTEVLVVEKPEPKPAMPDMDGMGGMGGMGGMGGMGGMGGMGMM

SEQ ID NO: 1987 - protein, 2340 aa, Arthrospira platensis C1
MYLTKDKLQHISTITHEGKVVVFGTDTEGKVFYTVKQDGFEDSYLNTPADQRTGWETWQPLEFPNEVDDQSVIEQEKAELTYQNDPSRYLLRSRYSTQGMTAVAPVQAIAALDHIYVFRQSTNNTLLVDRFVLDGMANKLNRKLEVRFKRSRQKHIPTKTMAMGNNGLSNVDTLDFRDANGNFFYEPTTELCLVSNLHKGWFSVVVVPTIENDVHRWHIFAYNSQTKKVELTTLRASQEGLFDLKDYTIYEEAEGSLVPKKIPGIIQRTLDIDGVSITNGLSATKYDLQQEQETQAGDTQLLRSATKLMVAIPTDKGVAALSFAIAGDGTLSEIDETPERTIARSRQREILLPLNTLDEVKALADQTPPPLGVIRGLALGTDADDAEDLVMVSTEGEAGQLANGDLVKISGTPDLRGLYGAQKIDDRTFEITLPTPADNLGYWEKEDLEEAGLIFDGMIAAYEKTADGKLRVTCDYHGLEDGDEVQIIGTDSYDNTYPVQTVDDNHFVIERRWAKGEAVNIKVVSRKRRGIVLDGVNDYIEIADPFGKNKNFTLSVWIKPTQINTGATQAVMGNDLWKPSLWIAPDNGGLHYMAFGDPSQESVLSGTFDNFFDQAETWVHVAWVKDGNRFRFYKNGVEFAVVEDVPEKLYSDPSSNYQFGKVGQDFFSGHLAEVRIWSLPQSADTIKNNMYLQLRGKEVGLEGYWRLGGLAEGKVSDFSIHGNEGTVYGDPYVSAATLSRKLASGADAVKYSNSDLFAVSQRATYEESFEFKVNAAKPVTLADLNNADGRGQGTKIFTFSHWGKTSRSANDTIAVSAVQDEFEDLGNGWYRASCTLTIPDEISLLRSFEIAKVQGNWNALEIRKHRIRLLSDAITTAKYTDDVALATLANDQATLTTNLQNLKRKEIQEARLKNEKQELEEKLAGLKNLELIRRQVNELTIEVQSLELQEQDCKLNYDHEVNNPFNYLCHIQTTYNGWFWHYHGGSVPRVGMYSSSSGNSTWKFTKVGQECYTIQNTYNGWFCHYHGGSVPMVGMYSSSSGNSTWKFTKVGQECYTIQNTYDDWFCHYHGGSVPMVGMYSSSSGNSTWKLIRTEEQVNNEIEKARQTWEEIVQLLKQKRALLHTSRKLLSAGDREKEAWEKRLAEVISLLTKLQTEINTLNADFLKSIEDSQVKPQTMPDITKDSNDLVTQGALLGFVQPASRLHTLETCEGNVQLSYFDNQGRMRQTNYDATADSRNAAFEQWIPDAHRACLNFNVSNSVLTLKAALPLPMDWSMEAWFVYPLPETQEWNTLTCANPKGYHILVRHGKQLGIYLGDMISGQYFFDCGFNLDTLSPGWHHLTAVGKGATTLFYIDGKKVGDTKAKALADAEEDLRKTPNDAAAKQKLEAIKAAMLKVSEPVYTIGNFLEGGQLFGKLSEVRIWSGVLSEEEIAINSKTLLSGNEPGLLAYYPMSEATGVEVRDHSGNGNNGTVSGTSWWASTVPIGNPGHTVMQFDGVNDHITLPEMNINYSKGFSVEVWVCHKSFTHWSGIIDFGNGSGADNILLANSHGTNNLVLAVYTNYYHEIQVENALTLGEWTHLAATIDASGNAKVYKDGQLLRSGICHLPNSINRTRNYIGRSNWDQDGYLDAQVSDLRIWNVARTQDEIQAGMNTRLGGKEPNLVAYYPLNEIKMEGNTRKVQDLAGNRHGTVHEALTTADNTLPIGGDALVSAEYSTVTLDPTTKRKAAIMRRFLGAPTINGATLLPDKRIETLELKWIGNAQFAPTLLGYIEGPPPVPSENLTIEEDYNGATSVELTMSEDVDFSWNRAQDSGLGAAAEIFAGAETEAAAGLGFTTRVATMRAGFKGNFDFSYQFLNESNITSSSSLSLTDRLELRGTPEVKPHFPHLGTRFIPKNIGYALVVSAISDVFVTRLARSGKMVGYQVRPVEGLPPDVNTITFLMNPAYTMNGSLDGMTGSSATSDRFFKHVPEMRSQYGSLYPASYYRLKEAYDLKEQIEAEDKRRESYFSNFNARLLDEASLDRNIDSGPAPSTIGVHREEDQPSTEMTEEEKKAADAAKLQNLQANANANVDKQSQATQAKQAEIQSKITDQEKQVQATESFAGWQKRMEDLQIRAAKRNIVNTYVWDADGGLRSEQQSFANTVEHTIGGSFTMNAALGAEAKFGAMATAELTAQATVNLTQTMTKTEARSKGFELSVDLSGLEYKGITDYNDRPILPGEKVDRYRFMSFYLEGSTDHFQDFFNYVVDPEWLRSNDEEARALRQTQAGKPNKAWWVLHRVTYVERPALMGFGRDVRKLRVAAEVSENQALLDKIAKLEDKNQKLEEKLDTILGLLKEQK

SEQ ID NO: 1988 - protein, 697 aa, Spirulina platensis
MARTIPLERVRNIGIAAHIDAGKTTTTERILFYSGVVHKMGEVHEGTAVTDWMAQERERGITITAAAISTSWLDHRINIIDTPGHVDFTIEVERSMRVLDGVIAVFCSVGGVQPQSETVWRQAERYQVPRIAFINKMDRTGADFFKVYGQIRDRLRANAVPIQVPVGRESDFHGLVDLVAMKTYLYTNDLGTDIQVSDEIPEEVQDLVAEYREKLLEAVAETDEALMEKYLEQLEGGEALTEEEIRHSLRQGTIKGLIVPVICGSSFKNRGVQRLLDAVVDYLPAPTEVPPIKGVLPDGEEGVRYADDDAPLSALAFKVMADPYGRLTFVRVYSGVLQKGSYIYNATKNKKERISRLIVLKSDERIEVEELRAGDLGAALGLKDTLTGDTICDEANSIILESLYIPEPVISVAVEPKTKQDMEKLSKALQSLSEEDPTFRVSIDSETNQTVIAGMGELHLEILVDRMLREFKVEANIGAPQVAYRETIRKSIRTEGKFIRQSGGKGQYGHVVIELEPGEPGSGFEFVSKIVGGSVPKEYINPAEQGMKEACESGVIAGYPLIDVKATLVDGSYHEVDSSEMAFKIAGSMAIKNGVTKASPVLLEPMMKVEVEVPEDFIGNVIGDLNSRRGQIEGQETDQSQSIAKVVAKVPLATMFGYATDIRSKTQGRGVFSMEFSHYEEVPRSVAETIIAKSKGN

SEQ ID NO: 1989 - protein, 1361 aa, Arthrospira platensis C1
MSDNKKIFRNRVIDKGQLKKLMTWAFMNHGSAVTAQVADELKDLGFKYATRAGVSISVDDLQIPQSKKDLLEEAEEEIRRTERRYTKGEITEVERFQKVIDTWNGTSEALKDEVVRNFRSTNPLNSVYMMAFSGARGNISQVRQLVGMRGLMADPQGEIIDQPIKTNFREGLTVTEYIISSYGARKGLVDTALRTADSGYLTRRLVDVSQDVILREIDCGTERGITLGDMTDGDRILIPLKDRLMGRVLGEDVKNPETGEIISFGEIRAVRNQVVCDDLASAICNAGVKKVFVRSPLTCEANRSVCRHCYGWSLAHAEMVDLGEAIGIIAAQSIGEPGTQLTMRTFHTGGVFTAEAAGFLRAPFDGTVKFPKTLRLRAFRTRHGDDSFLAESNGYLTVEGKDGNKRINISQGSTVVVHDGQAVNADQVLVEIMAGGRTARKTTEKATKDVATDLAGEVKFADVVPEEKLDRQGNMTRIAQRGGLLWVLAGEVYNLPPGAEPVVKNGDRVEPGSVLAQTKLQTEHGGIVRITDDNDIDPATVATETLADGMITTSSGEENALPREIEIITASVLLDQALVRLQSELGREQYVIETNSNHRFSLKVTPGSKVENHEVIAELMDDSYRTTTGGIIKYAGVEVAKRSKGKQGYEVTSGGTLLWIPEECHEVNKDISLLIVEDGQYVEAGTEVVKDIFCQSKGVIEVTQKNDILREIVVKPGELHLVDDPEMVMAIDGQIKNAGEEVIPGVTATELNYVEYVESPEGPALLLRPVVEFHVPETPPVPSQESLNQSISLQAVQRLSYKDGERVRSVEGVELLRTQLVINIGTEAPQLAADIELIPDEDNPEIMRLQLVILESLVIRRDIIADSTQGSTRTRLLVHDGQEIEPGAVVTRTEILGKDGGVVGGIRSGAEILRRCLIVRDTDMMTIQLPDGVTPTVKVGQLVVEDSEIAPGVKLSQSGQVVAINQDDSETSIVLRIGRPYRVSSGAVLHLSDGDLVQRGDNLVLLVFERPKTGDIIQGLPRIEELLEARKPKEACILAKQPGTAQLEVFDDLVQLRVIESGGAATEYPLTPGQTVIVSDGQTVDVGQPLTDGPANPHEILEVFFNYYLEQDGMVYEAALKSFQKCQIFLVNEVQSVYQSQGIDISDKHIEVIVRQMTSKVRIDDGGDTTTLPGELTELRQVEQVNEAMFITGGAPARYTPVLLGITKASLNTDSFISAASFQETTRVLTEAAIEGKSDWLRGLKENVIIGRLIPAGSGFNAYEDPVLAEESVMDEEPYSYLEDDVNNDDLREDVILDDHSARAYSDQAMFSDDLVDNEDDEDNEFAINDDSDNFPLIDDDDEEPFSSAIITDDILDDDDF

SEQ ID NO: 1990 - protein, 174 aa, Arthrospira platensis NIES-39
MVIEKVPDVVFKTRVRDESVGGPNPFRWQDRTTQEIFGGKRVVVFSLPGAFTPTCSSTHLPRYEELYDEIKAQGIDEIVCVSVNDAFVMFQWGKQQGADKVFLLPDGNGEFTRKMGMLVDKSNLGFGMRSWRYSMVVNDGKIEKIFVEPDFGDNCPTDPFEVSDADTMLAYLKG

SEQ ID NO: 1991 - protein, 271 aa, Arthrospira platensis Sp-1
MVGLAEASRLGIRAFEESERVELRPNFTEGDVQAVIWAAYRQVMGNEHLMQRERLTSAESLLRQGEITVRDFVRALAVSELYRKKFFYGNSQVRFIELNYKHLLGRAPYDESEIAFHVDLYNEEGYEAEINSYLDSPEYLESFGENVVPYYRGFATQRGQWTVGFNRMFQLYRGYANSDRAQNQTQGRLTWEVARNTSSPISPAGSGQALVGANGGSRGQLYRVVVVQKPTQLTPRMRKATAEYTVAYEQLSGQLQRINRMGGRVISVTPA

SEQ ID NO: 1992 - protein, 319 aa, Arthrospira platensis C1
MPFTIDSARSIFPETLAADVVPATIARFKQLSAEDQLALIWFAYLEMGKTITIAAPGAANMQFAEKTLEEIRQMTPLQQTQAMCDLANRTDTPICRTYASWSPNIKLGFWYELGRFMDQGLVAPIPEGYKLSANANAILVTIQGIDPGQQITVLRNCVVDMGFDTSKLGSYQRVAEPVVPPQEMSQRTKVQIEGVTNSTVLQYMDNLNANDFDNLISLFAEDGALQPPFQKPIVGRDNVLRFFREECQNLKLIPERGVSEPTEDGYTQIKVTGKVQTPWFGGNVGMNIAWRFLLNPENKVFFVAIDLLASPKELLNLVR

SEQ ID NO: 1993 - protein, 468 aa, Arthrospira platensis C1
MAVFDPSDPVLNPMWRQGMFVMPFMARLGVTQSWGGWSVTGEVADNPGLWSFEGVAATHIILSGLLFLAAVWHWVYWDLELFTDPRTGEPALDLPKMFGIHLFLSGLLCFGFGAFHLTGLFGPGMWVSDPYGLTGSIQPVAPSWGPEGFNPFNAGGIAAHHIAAGIVGIIAGLFHLSVRPPQRLYKALRMGNIETVLSSSIAAVFFAAFVVAGTMWYGSAATPIELFGPTRYQWDQGYFQQEIQRRVQASIAQGDSPSEAWSKIPEKLAFYDYVGNSPAKGGLFRVGPMNKGDGIAQGWFGHPVFTDAEGRELTVRRLPNFFETFPVILTDADGVIRADIPFRRAESRYSFEQTGVTVSFYGGELNGKTFTDPASVKKYARFAQQGEPFAFDRETLGSDGVFRTSTRGWFTFGHACFALLFFFGHIWHGSRTIFRDVFAGVEADLEEQVEWGNFQKVGDQTTRVQKTV

SEQ ID NO: 1994 - protein, 505 aa, Arthrospira platensis C1
MVSIRPDEIANIIRDQIEQYGQDVKVSNVGTVLQVGDGIARIYGLDKAMAGELLEFTDGTVGIALNLEEDNVGAVLMGEGLEIQEGSAVTATGRIAQVPVGEAMLGRVIDSLGRPIDGKGDIQASDTRLLESPAPGIIERRSVCEPMQTGITAIDSMIPIGRGQRELIIGDRQTGKTAIAIDTIINQKEEDVICVYVAIGQKASTVAQVVSTLEEKGALPYTIVVAANASDPATLQYLAPYTGAAMAEYFMYQGKATLVIYDDLSKQAQAYRQMSLLLRRPPGREAYPGDVFYLHSRLLERAAKLNDELGGGSMTALPIIETQAGDVSAYIPTNVISITDGQIFLSADLFNSGLRPAVNAGISVSRVGSAAQTKAMKKVAGKVKLELAQFAELAAFSQFASDLDQATRNQLERGKRLQELLKQPQNSPLQLFEQVAVIYSGINGYLDDVPEDKVVAFTTGLRDYLKNSKPKYGEIVQSQKVLTEEAEAMLKEAISEFKQTFLVSA

SEQ ID NO: 1995 - protein, 558 aa, Arthrospira platensis NIES-39
MAKIVAFDEESRRAIERGVNALVDAVRVTLGPRGRNVLIEKKFGVPDIISDGITVAKAIELGDPLENTGARLIQEVAAKTNDVAGDGTTTAAVLAQAMIQEGLKNVAAGANPVALRRGIDKTIQYLVKEIESLAKPVEGSAIEQVATVSAGNDKEVGEMIALAMDKVTKDGVITVEESKSLTTELEVVEGMQIDRGYISPYFITDNERMIVELDNTRVLITDKKISAIQDIVSVLEKVARSGQPLLIIAEDIDGEALATLVVNKARGVLNVAGIKAPGFGERRKAMLQDIAILTGGQLISEEIGLNLETATIEMLGTATKVTINKDSTTIVSGSGHKGEIQQRVEQLRKQLAETDSEYDKEKLQERIAKLAGGVAVIKVGAATETELKSRKLRIEDALNATKAAVEEGIVPGGGTTLIHLVKKVEQLASTFTIEEEKLGAKIVARALEAPLRQIANNAGVEGSVIVEQVRNSDSNIGYNALTGKFEDLIVAGILDPAKVVRSSLQNAGSIAGMVITTEVLVVEKPEPKPAMPDMDGMGGMGGMGGMGGMGGMGGMGMM

SEQ ID NO: 1996 - protein, 637 aa, Arthrospira platensis C1
MTVAQAVFPIDLGAYQYLKLDPANSTLTDEQRKALKANIELVRDAIVFFTATGAARGVGGHTGGPYDTAPEVMILDALFRGSPDKFVPIFFDEAGHRVATQYLMSVLEGSMPAEQLLSYRAAHSKLPGHPELGLTPGVKFSSGRLGHMWPYVNGVAMANPNKTLFCLGSDGSQQEGNDAEAARLAVSQQLNVKLIIDDNDVTIAGHPSDYIPGYTVAQTLIGHGLKVLEGDGEDIDSLYGLICQAINTDGPVAVINRRKMCVGIEGLEGSPHGHDVISVKGAIAYLEAKGRTEAVKYLQGIQAPKQNYTFIGSSDDLGSNRNVFGDAVVSVLATMTDSDRQEKVLCVDSDLEGSCGLQKIRTAYPEIFIKGGIMERGNFSAAAGFGMEKGKQGIFGTFSAFLEMCISEITMARLNYSNVLCHFSHSGIDDMADNTCHFGINNMFADNGLDDGYETRLYFPADANQMKACVEAVFFDPGLRFIFSTRSKVPYILNSDGNHFFGHGYKFIPGKDEVIREGTAGYIVSFGDSLYRSLDAVDRLKQEGIDVGLINKSTLNVVDEDMLAKIGNAPFVMVVEAFNRRTGLGSRFGSWLLERGYTPKYAYLATHKEGCGGLWEQFPHQGIDPNGIMTKVKELVR

SEQ ID NO: 1997 - protein, 2343 aa, Arthrospira platensis
  str. Paraca
MYLKQDKLQHISTITHEGKVVVFGTDSSGKIFYTVKQDGFEDSYLNTPADQRTGWETWQTLEFPNEADDQSVIEQEKAELTYQNDPSRYLLRSRYSTQGMTAVAPVQVIAALDHLYVFRQSTSNTLLVDRFVLDGMTNKLNRKLEVRFKRSRQKHTPTKTMTMGSNGLSNVDTLDFRDANGNLFYEPTTELCLVNNLHKGWFSVVVVPTIENDVHRWHIFAYNSQSEKVELTTLRASKEGLFDLKDYTIYEEVEETLVPKKIPGVIQRTLDIDGVSITNGLSATKYDLQQEQETQSGDTQLLRSATKLMVAIPTDKGAAALSFAIAGDGTLSEIDETPERTIARSRQREILLPLNTLDEVKALADSTPPPQGVIRGLALGTDADDAEDLVKVSTEGDAGELTNGDLVKIMGTQDLGGLYGAQKIDDHTFEIELPNAADNLGYWEKEDLEEAGLIFDGMIAAYEKTADGKLRVTCDYHGLENGDEVQIIGTENYDNTYPVQPVDDNHFVIERRWAKAEAVNIKVISRKRRGIVLDGVNDYIEIANPFAKNKNFTISAWIKPMQINTGATQAVMGNDLWQPSLWITPDNGGLHYMAFAAPNQESVLSGTFNNFFDQAETWVHIAWVKDDNRFKFYKNGVEFAVVENVPEKLYSDPSSNYQFGKVGQDFFSGHLAEVRIWSLPQSAETIKNNMYLQLRGKEVGLEGYWRLGGIAEGKVSDFAIHGNEGTVYGDPYVSAATLSRKLASGANAVKYSNSDLFAVSQRATYEESFEFKVNASKPVTLADLNNADGRGQDTKLFTFSHWGKTSRSANDTIAVSAVQDEFEDLGNGWYRASCTLTIPDEISLLRSFEIAKVQGNWNSLEIRKHHIRLLSDSITSAKYVDDMALKMLADDQADSMANLKDLKRKEMQEITLKNEKQELEEKLAGLKDLELIRRRVNELIVEIQDLEIQEKNCKSNYDYEVNNPFNYVCHIQTTYNGWFCHYDYSGSFPTIRMYPSSSGAGGKWKFNKISQEYYTIQTTYNGWFCHYDYSGSFPTVRMYSSSSGAGGKWQLNKVDQKYHTIQTTYNGWFWNYDYSGSFPTTRMKPSSSNPWQLVKTEEQVNDEIEKSRQAWQKITELLKQKRDLLYVSRQILSAGDQEKEAWEKRLDQVISLLTQLQIEINTLNTDFLKFISNSHVKPQVMPEVAKDDNDLVTQGALLGFLQPASRLHALETCEGNVQLSYFDTQGRMRQTNYDATADSRNAAFEQWVPDAYRACLNFNLSKSVLTLNTALPLPMDWSMEAWFVYPLPEKLEWNTLSRSDSEHHVLVKDGKQLGIYLRDGIQEQRFFDCGFNLDQLSPGWHHLTAVAKGDTTLFYIDGQKVGDTKAKALADAQESLTKTPNDSAAQQKVEAIKKAILKVVGVIRTIGNAPGGQPFGKLSEVRIWGDALSEEEININSKTLLSGNEPGLLAYYPMSEATGVEVRDHSGNSNNGTISSASWWASTVPIGNLGNTVMQFDGVNDHITLPEMNINYSEGFSLEVWVCHKSLKSWSRIIDFGNGSGADNILLANSAKTNTLVFAVNRGSSVQERIEVADILIPGEWTHLAATIDASGNAKVYKDGQLLRSGTCHLPNSINRKNNYIGRSNWSVDEYLDAQVSDLRIWNVARTQKDIQADMNTRLGGKEPNLVAYYPLNEVKLEGNTRKVQDLAGNRHGTVHEALTTQDNTLPIGGDALVSAEYSTVTLEPATKRKVAIMRRFLGAPTTNGATLLPDKRIETLELKWIGNAQFAPTLLGYIEGPPPVPSENLTIEEDYNGATSVELTMSEDVDFSWNRAQDSGLGAAAEIFAGAETEASAGLFVSARIATMRAGFKGNFDFSYQFLNESNITSSSSLSLTDKLELRGTPEVTPHFPHLGTRFIPKNIGYALVVSAISDVFVTRLARSGKMVGYQVRPVEGLPPDVNTITFLMNPAYTMNGSLDGMTGSSATSDRFFKHVPEMRSQYGSLYPASYYRLKEAYDLKEQIEAEDKRRESYFSNFNVRLLDETSLNRNIDSGPAPSTIGVNREEDKPATEMTEEEKKAADAAKQQNLQANANANVDKQSQATQAKQAEIQSKITDQEKRVQATESFAGWQRRMEDLQIRAAKRNIVNTYVWDADGGLRSEQQSFANTVEHTIGGSFTMNAALGAEAKFGAMATAELTAQATVNLTQTMTKTEARSKGFELTVDLGGLEYKGITDYNDQPILPGEKVDRYRFMSFYLEGSTDHFQDFFNYVVDPEWLRSNDEEARALRQTQAGKPNKAWRVLHRVTYVERPALMGFGRDVRKLRVAAEVSENQALLDKIAKLEDKNQKLEEKLDTILGLLKEQK

SEQ ID NO: 1998 - protein, 509 aa, Arthrospira platensis NIES-39
MGLPWYRVHTVVLNDPGRLISVHLMHTALVAGWAGSMALYELAVFDPSDPVLNPMWRQGMFVMPFMARLGVTQSWGGWSLTGEVADNPGIWSFEGVAATHIILSGLLFLAAVWHWVYWDLELFTDPRTGEPALDLPKMFGIHLFLSGLLCFGFGAFHLTGLFGPGMWVSDPYGLTGSIQPVAPSWGPEGFNPFNAGGIAAHHIAAGIVGIIAGLFHLSVRPPQRLYKALRMGNIETVLSSSIAAVFFAAFVVAGTMWYGSAATPIELFGPTRYQWDQGYFQQEIQRRVQSSIAQGDSPSEAWSKIPEKLAFYDYVGNSPAKGGLFRVGPMNKGDGIAQGWLGHPVFTDAEGRELTVRRLPNFFETFPVILTDADGVIRADIPFRRAESRYSFEQTGVTVSLYGGELNGKTFTDPASVKKYARFAQQGEPFAFDRETLGSDGVFRTSTRGWFTFGHACFALLFFFGHIWHGSRTIFRDVFAGVEADLEEQVEWGNFQKVGDQTTRVQKTV

SEQ ID NO: 1999 - protein, 138 aa, Arthrospira platensis NIES-39
MAKTTAEKLPEEPMTGKTLLQKVKSLGPSYSRRETAKQCGYYTRTKDNQTRANMTEFYDALLAAKGIALDPGRSKDGRGREASYRACVHKNGSLVIGANYTQEMGLKPGDQFEIRLGSKHIHLIQVEPKGMVDEDDEE

SEQ ID NO: 2000 - protein, 142 aa, Arthrospira platensis NIES-39
MVETLTGKAPKFGGSTGGLLTKAQVEEKYAITWTSTKEQVFEMPTGGAAIMNEGENLLYLARKEQCLALGTQLRTKFKPKIEDFKIYRIFPNGEMEYLHPKDGVFPEKVNEGREFNGKIDRKIGDNPNPASVKFSGKATYES

SEQ ID NO: 2001 - protein, 161 aa, Arthrospira platensis
MSIVTKSIVNADAEARYLSPGELDRIKSFVTSGERRVRIAETMTGARERIIKEAGNQLFQKRPDVVSPGGNAYGEEMTATCLRDLDYYLRLITYGIVAGDVTPIEEIGVVGVREMYKSLGTPIEAVAEGVRAMKSVATSLLSGEDAAEAGAYFDYLIGAMS

SEQ ID NO: 2002 - protein, 288 aa, Arthrospira platensis Sp-1
MAITTQASRLGTTAFQESSLVELRPNWSRDNAQEVIRAVYRQLLGNDYLMSSERLTSAESLLCDGSITVRELVRCVAKSELYKKKFFYPNFQTRVIELNYKHLLGRAPYDESEVVFHLDLYQNEGYDADIDSYIDSPEYLESFGENIVPYYRGFETQRGQKTVGFTRMFRLYRGYANSDSAQGEGTMSRLAQELGANRASVVVAPSGDSDGWSYRPSGQSVAPSTGFSQGGVLQAGRTYRVEVSGIRERRYPRVRRCSKAFIVPYDQLSAQLREIQRQGGTIASITPI

SEQ ID NO: 2003 - protein, 485 aa, Arthrospira platensis NIES-39
MVSTAEKTKIGYITQVIGPVVDIKFPDGKLPEIYNALKISGKNEAGQEISVVCEVQQLLGDNQVRSVAMSGTDGLVRGMEATDTGRAIQVPVGSGTLGRIFNVVGEPIDNLGPVPNDETSSIHRPAPAFVDLETSPSVFETGIKVVDLLAPYRRGGKIGLFGGAGVGKTVIIMELINNIAKAHGGVSVFGGVGERTREGNDLYNEMIESGVINKEDLPQSKVALVYGQMNEPPGARMRVALSALTMAEYFRDVSKQDVLLFIDNIFRFVQAGSEVSALLGRMPSAVGYQPTLGTEMGELQERITSTKEGSITSIQAVYVPADDLTDPAPATTFAHLDATTVLSRALASKGIYPAVDPLDSSSTMLQPSVVGEEHYQTARAVQSTLQRYKELQDIIAILGLDELSEEDRLVVARARKIERFLSQPFFVAEVFTGSPGQYVPLEKTIKGFQMILNGELDHLPEQAFYLVGDIDMAIAKGEKMKAENK

SEQ ID NO: 2004 - protein, 637 aa, Arthrospira platensis C1
MGKVVGIDLGTTNSCVAVMEGGKPTVIANAEGLRTTPSVVAYAKNGDQLVGQIAKRQAVMNPDNTFYSVKRFIGRKQEEVSNESTEVSYKVLRDSSGNVKLDCPARDRQFAPEEISAQVLRKLVEDASTYLGETVTEAVITVPAYFNDSQRQATKDAGKIAGVEVKRIINEPTAASLAYGMDKKSNETILVFDLGGGTFDVSILEVGDGVFEVLATSGDTHLGGDDFDKKIVDYLAGEFMKAEGVDLRKDKQALQRLTEASEKAKQELSSVTQAEINLPFITATSDGPKHLDMTLTRAKFEEICSDLIDRCRIPVENAIRDAKLDKSAINEVVMVGGSTRIPAVKELVKRVLGKEPNQTVNPDEVVAVGAAIQAGVLAGEVKDILLLDVTPLSLGVETLGGVMTKIIPRNTTIPTKKSEVFSTAVDGQTNVEIHVLQGEREMSNDNKSLGTFRLDGIPPAPRGVPQIEVTFDIDANGILNVTAKDKGTGKEQSISITGASTLPDTEVERMVKEAEKNAATDRERRERIDRKNQADTLAYQAEKQISELGDKVPADDKSKIEAMIKDLRDAIAQENDDQIKTLTTDLQQALYTLSSNLYQQAGGAAPGAEGPGPGAGPTDGDGGGSDDVIDADFTEAK

SEQ ID NO: 2005 - protein, 637 aa, Arthrospira platensis NIES-39
MTVAQAVFPIDLGAYQYLKLDPAHSTLTDEQRKALKANIELVRDAIVFFTATGAARGVGGHTGGPYDTAPEVMILDALFRGSPDKFVPIFFDEAGHRVATQYLMSVLEGSMPAEQLLSYRAAHSQLPGHPELGLTPGVKFSSGRLGHMWPYVNGVAMANPNKTVFCLGSDGSQQEGNDAEAARLAVSQQLNVKLIIDDNDVTIAGHPSDYIPGYTVAQTLIGHGLKVLEGDGEDIDSLYGLICQAINTDGPVALINHRKMCVGIEGLEGSPHGHDVISVKAAIAYLEAKGRTEAVKYLQGIQAPKQNYTFIGSSDDLGSNRNVFGDAVVSVLATMTDSDRQEKVVCVDSDLEGSCGLQKIRTAYPEIFIKGGIMERGNFSAAAGFGMEKGKQGIFGTFSAFLEMCISEITMARLNYSNVLCHFSHSGIDDMADNTCHFGINNMFADNGLDDGYETRLYFPADANQMKACVEAVFFDPGLRFIFSTRSKVPYILNSDGNNFFGDSYKFIPGKDEVIREGTAGYIVSFGDSLYRSLDAVERLKQEGIDVGLINKSTLNVVDEDMLAKIGKAPFVMVVEAFNRRTGLGSRFGSWLLERGYTPKYAYLATHKEGCGGLWEQFPHQGIDPNGIMAKVKELVG

SEQ ID NO: 2006 - protein, 741 aa, Arthrospira platensis NIES-39
MATKFPKFSQDLAQDPTTRRIWYGIATAHDFETHDGMTEENLYQKIFASHFGHIAIIFLWTSGSLFHVAWQGNFEQWIKDPLNVRPIAHAIWDPQFGQPAVDAFTQAGASNPVDIAYSGVYHWWYTIGMRTNGDLYQGSIFLLLLAAVFLFAGWLHLQPKYRPSLSWFKNAESRLNHHLAGLFGVSSLAWTGHLVHVAIPESRGQHVGWDNFLSTLPHPAGLAPFFTGNWGVYAQNPDTVRHVFGTSEGSGTAILTFLGGFHPQTESLWLTDMAHHHLAIAVIFIIAGHMYRTNFGIGHSIKEMCDAKDFFGRRLEGPFNMPHQGIYETYNNSLHFQLGWHLACLGVITSLVAQHMYSIPPYAFIAKDYTTMAALYTHHQYIAGFLMVGAFAHGAIFLVRDYDPEQNKGNVLARVLDHKEAIISHLSWVSLFLGFHTLGIYVHNDVVVAFGTPEKQILIEPVFAQFIQAAHGKAVYAMDVLLSNPESIATTAWPNYGNVWLPGWLDAINSGTNSLFLTIGPGDFLVHHAIALGLHTTTLILVKGALDARGSKLMPDKKDFGYAFPCDGPGRGGTCDISAWDSFYLAMFWMLNTLGWLTFYWHWKHLGIWQGNVAQFNESSTYLMGWFRDYLWLNSSQLINGYNPFGTNNLSVWAWMFLFGHLVWATGFMFLISWRGYWQELIETIVWAHERTPLANLVRWKDKPVALSIVQARVVGLAHFTVGYILTYAAFLIASTAGKFG

SEQ ID NO: 2007 - protein, 813 aa, Arthrospira platensis NIES-39
MKLNLSQIFLDHKVKPRGIIYVGAGEGRSLKRFAKFTNAQILLIEANPVTCERLKMAVGDRPNIQTVHMAIADQNSEATLHVTNIESNSSILPLTQYKKLYPNLSETQQIPVDTRTIDTILAELNLLPEDFNILYLDIQGAELLALTGASEILQHLDAIYTTTSQHQLFERGATLEQVNAFLNEHYFTPIAQATPYHPSRYEVVYIHNNLINTSILTPEIAANIRLHPPAEPKPTELKITLSRLQELESEQELLKYQLQQHQKDLGKSQSDYQQKHKELENSQSQLQQTRKDLEKSQSDFQQKQKELENSQSQLQQTRVECKNLHSQLEQSQEELEESKGIRDQILADLEKSYSQFKQSQTQLEQSQSQLERTQTELQQSQYQRDQILAELEQYHTRLQQTRKDLEKSQSDFQQKQKELENSQSQLQQTRKDLEKSQSDFQQKQKELENSQSQLQQTQKDLEKSQSDFQQKQKELENSQSQLQQTQKDLEKSQSDFQQKQKELESSQSQLQQTQKDLEKSQSDFQQKQKELENSQSQLQQTQKDLEKSQSDFQQKQKELENSQSQLQQTQKDLEKSQSDFQQKQKELENSQSQLQQTQKDLEKSQSDFQQKQKELENSQSQLQQTRKDLEKSQSDFQQKQKELENSQSEGKKLETKVKEVQDQLKNAQNKQTETQQELDKSRSELHDTREELEMANFQLDEVQVELEQATFELHKTKEELEGSQSQLQQQQKELEESQSQLQQQQKELEESKSEVQKLREQIQQIQQIQQYQNMSPPGQPVQQYQPAVAQSGNTYNAALVKMFAKIIAETMPD

SEQ ID NO: 2008 - protein, 161 aa, Arthrospira platensis; identical to SEQ ID NO: 521

SEQ ID NO: 2009 - protein, 460 aa, Arthrospira platensis C1
MVTLSSNSYLGGRDQESTGFAWWSGNARLINLSGKLLGAHVAHAGLIVFWAGAMALFEVSHFVPEKPMYEQGLILLPHLATQGWGVGPGGEVINTFPYFVVGVLHLISSAVLGLGGIYHAVRGPEVLEEYSSFFGYDWKDKNQMTNIIGYHLILLGCGALLLVFKAMFFGGVYDTWAPGGGDVRIINNPTLNPLVIFGYLLKAPFGGEGWIIGVDNMEDIIGGHIWIGLICIAGGVWHILTKPFGWARRAFIWSGEAYLSYSLGALSLMAFIASAFVWFNNTAYPSEFYGPTNAEASQAQSFVFLVRDQKLGANIGSAQGPTGLGKYLMRSPTGEIIFGGETMRFWDFKGPWLEPLRGPNGLDLNKLKNDIQPWQVRRAAEYMTHAPNGSINSVGGIITEAQGFNYVNPRAWLAASHFILAFFFLVGHLWHAGRARAAVAGFEKGIDRETEPVLAMPDLD

SEQ ID NO: 2010 - protein, 854 aa, Arthrospira platensis C1
MYQTGKGEFMTQPLIPIDQCPIQIEDDRTGTNVETLKRAFADNLFYLQGKYESLATQDDFYMALAYTLRDRLLSRWLKTMKTYMEKDVKVVYYLSAEFLMGRHMGNSLINLHLYDRVRQAVEESGLDLDEILEHEPDPGLGNGGLGRLAACFVDSLATLEIPAVGYGIRYEFGIFTQAIRDGWQAEVPDKWLRFGNPWEIAHPDQAVEVKLGGHTEMYHNEKGEYKVRWIPANRVVGIPYDTPVPGYDTNTVNPLRLWRAEASDDFNFDAFNAGNYDGAVAEKMRSETISKVLYPNDNTPQGKQLRLEQQFFFVSCSLQDIIRTHLLRHPSLHNLHDTAAIQLNDTHPAVAIAEMMRLLMDEHEMDWNTAWRVTQKTFSYTNHTLLPEALEKWSVGLFEYLLPRHLEIIYEINRRFLEDVKRWYPGDDNLISRLSLIDESGEKYVRMANLACVGSHAVNGVAALHTQLLKQDTLRDFYRLWPGKFINKTNGVTPRRWILMCNPKLAELYNSKIGEGWLKDLSQLKQLEKYVDDPDFCQQWREIKLHNKRQLAQYIWEHNGIEVDPHSMFDIQVKRIHEYKRQHLNLLHIIALYNQIKQNPDQHIVPCTFIFGGKAAPGYFMAKLIIKLTNSVADVINHDPDVRGRLKIVFLNNFNVSLGQRIYPAADLSEQVSTAGKEASGTGNMKFAMNGAMTIGTLDGANIEIREEAGEENFFLFGLTAQEVADTKAKGYNPRDYYSSNPSLKAVIDRIAAGYFSHGDKELFKPLVDSLMYHDQYMLFADYQAYVDCHKQVSKTYSDQDKWTRMSILNALRMAKFSSDRTIREYCNEIWNVQPVPIEMEEYSQENAGLNLGK

SEQ ID NO: 2011 - protein, 1567 aa, Arthrospira platensis C1
MDRKETNFNPHQPPTLKVRRLSNQGNSLGTPYAGPRWLVEERDACGVGFIADLNGKANHSIIEKALKALGCLEHRGGCSADYDSGDGAGVMTTIPWKILQAEGYGVSPEGDYGVGMVFLPQAGSSENSDPNHQVSDGEGKQQLARDTIAKVLESENLNLIGWRVVPVRPEVLGPMAAANQPCIEQLIVSSKKGLVGDDLERQLYLARRQCGVALEKEGLVWGQDIYICSWSCRTIVYKGMVRSAVLGEFYRDLQNPDYESQFAVYHRRFSTNTMPRWPLAQPMRLLGHNGEINTLLGNINWMRAREGILSHPVWGDRLWDLKPFVDANNSDSANLDNVMELLVRTGREPSESLMIMVPEAYQNQPLLKDYPEITDFYEFHSGVQEPWDGPALLVFSDGKQVGACLDRNGLRPARYCITKGGLIIVGSEAGVVQVEESEILEKGRLGPGQTIAVNLEESEILKNWDIKRKVAAKCNYGEWLRKYRYDLEPQPFVGTENPLLPDLAIQKAFGYGSEDVEMVIADMASLGKEPTFCMGDDIPLAVISEQPHLLYDYFKQRFAQVTNPAIDPLRERIVMSLQMRLGERGNLLDPKPEDARMLKISSPVLNEAELQKLADSGLKAVTLSTLYPVATGPDGLRLAVEALCEKAIAAVAQGAKILILSDRNSESQSPLNGENTYIPPLLAVGAVHHHLIESGDRLKCSLVVNTAQCWSTHHFACLIGYGASAVCPYLALATVRQWWSEPKTQMAMEKGKMPPLSMVQAQENYRAAVEGGLLKILSKMGISLLSSYQGAQIFEAIGIGEDLLNLGFKGTTSRIGGLTVAELAMEVSQFHAKAFPEMQGKKLENYGFVNYFKRGEYHGNSPELAKLLHQAVRGEGADHYTTYQAYLKDSPVAALRDLLDFQSDRSPISIDEVEPITDIVKRFCTGGMSLGALSPEAHETLAIAMNRLGGKSNSGEGGEDPARFKPLSDVGDDGISPSRPYLRGLKNGDSCSSAIKQVASGRFGVTPEYLMNAQSIEIKVAQGAKPGEGGQLPGKKVSPYIAMLRRSKPGVTLISPPPHHDIYSIEDLAQLIFDLHQINPNAQVSVKLVAEIGIGTIAAGVAKANADYIQISGHDGGTGASPLSSIKHAGTPWELGLTEVHRVLMENQLRDRVRLRVDGGLKSGWDVVMGALMGAEEFGFGTIAMISEGCIMARICHTNGCPVGVTTQREELRKRFPGTPDHVVNFFHFVASEVRELLAMLGYRSLTDLMGRSDLLKMRDLPLAKTKGLDLGVLMQPPVAPGNDWLNHEPVHSNGPVLDDSILADQEISDAISHQYKVAKTLDIVNTDRTVGARIAGKIASMYGNSGFSGEIALTFNGSAGQSFGAFNLPGMILTLNGEANDYVGKGMHGGELIVKPSDDSTLDSGENVIIGNTCLYGATGGTLFARGQAGERFAVRNSMGQAVIEGAGDHCCEYMTGGVVVVLGKVGRNVGAGMTGGIAYFLDLDGSFPDCVNGEIVRIQRVATSQGEAQLRGLIQDHSDRTGSKVAASILANWSEFLPKFWQVVPPSEENTPEVSSAASNQKVAV

SEQ ID NO: 2012 - protein, 435 aa, Arthrospira platensis C1
MVSMKLNLHQIFQDHKVTPRGIIYVGAGEGRSLKRFAKFTNAQILLIEANPVTCERLKMAVGDRPNIQTVHVAIADQNSTATLHVTNIESNSSILSLTEYKKLYPNLTETQQIPVETRTIDSILTELNLLPEDYNILCLDIQGAELLALTGASEILQHLDAIYSTTSQNKLFEGGATFEQLNAFLNEHYFTPVAQATPYHPSRYEVVYIHNNLINTSVIPSEIAQNLRLQPPTEPKPTELKITQSRLQELESEQELLKYQLQQHQKDLEKSQSDFQQKQKELENSQSQLQQTRKDLEKSQSDFQEKQKELENSQSQLQQTRKDLDKSQSDFQQKQKELENSQSQLQQTRKDLDKSQSDFQQKQKELENSQSQLQQTRKDLDKSQSDYQQKQKELENSQSQLQQTRKDLEKSQSDFQQKKQKAVGKLSVSTTADSA

SEQ ID NO: 2013 - protein, 394 aa, Arthrospira platensis C1
MTTVLRAVPKGFVNTPAIERITVRALRYLQSGFSVHLRGPAGTGKTTLALHLADLLNRPIMLIFGDDELKSSDMIGNQTGYTRKKVVDNFIHSVVKLEDSLKQNWIDSRLTLACREGFTLVYDEFNRSRPEVNNVLLSALEEKLLVLPPNNSRSEYIRVNPHFRAIFTSNPEEYCGVYSTQDALLDRLITMNMPEPDEATQQEILIQKVAVTPEEAQTIVTLVQQFREATHAIAPSKIQTVARQQTNADKASGLRPSLMLARICQEHNIPIVPIDPDFQEVCRDILLSRAIGDIAELESRLHQIFDHLSGLENDQIIALPPREELTTSSVPNNLSDTEQKIYTYIKDSDGARVSEIEIALGLNRVQTTDALRSLLRKSYLTQQDNRLFVVYEGD

SEQ ID NO: 2014 - protein, 619 aa, Arthrospira platensis C1
MAKPTQEQLQQELEQTKSELRDVWEELERVQSQFEQVSGELQQAQTQIPQQETASDTDCQQELEAVRSQLNQVLAELEQAKTQIHQQEAEKAQLESLQQELQTTQDSLNTTRTQLDQVQTQIQQGETDKAELESVQQQLQETQAKLTSTTEELEKAKTQIQEAQGSKAQLESVQQHLQETQAKLTSTTEELEKVNCQFDEVLGELEETHFKLHQIQQETASDTESKQELERVNSQLNQVLGELEQAKTQIQEAQGSKAQLESVQQQLQETQAKLTSTTEELEKAKTQIQEAQGSKAQLESLQKELQTIQGQLTSTTEQLDLAQCQFDEVLGELEQAHIQAQQAQQEKAQLGSVQQELQETKEKFTSIQQELQQGQLKFDEVLEELEQAHIQAQQAQQEKAQLGSVQQELQETKDKLNNKTEELKQAQFMQKEAAEEVDKTKAELQEARQNLQTLRSQNEETEGLLRKCHAQLQETMEVLESSHSQHKQTQGELEQLRSQKEETEGLLEKCHAQLQETMQVLESSHSKQQQTQEELEQLRSQKEETEGLLRKCHAQLQETMEVLESSHSQHKQTQGELEQLRSQLQEKPQELTNHAVQVSPVPASPPAPVAVAAIDWETF

SEQ ID NO: 2015 - protein, 768 aa, Arthrospira platensis NIES-39
MTIALDQIDKIVWNHHHDPFEVLGPHQIEKDGKSLWAVRAYLPTADAAWVVLPEERKEYPMYSVHNPHFFECVIDIPELKNYKLRFKEGEHERVTHDPYAFRSPKLTDFDIHLFTEGNHHRIYEKLGAHPMNLNGVDGVYFAVWAPNARNVSILGNFNHWDGRKHQMRKFGNGVWELFIPEIGAGEAYKYEIKNFEGHIYEKSDPYGFQQEVRPKTASIVAELNNYKWNDDEWMEKRRNTDPLDHPVSVYECHLGSWNRAPFSEPHTLPDGTVEPPVQAVELDPGSRFFTYREMADQMIPYVKELGFTHIEILPVAEHPFDGSWGYQVTGYYAPTSRFGTPEDFMYFVDKCHQNGIGIIVDWVPGHFPKDGHGLAFFDGTHLYEHGDPRKGEHKGWGTLVFNYSRNEVRNFLVANALFWFEKYHIDGIRVDAVASMLYLNYCREDGEWVANDYGGCENIEAADFIRQTNHVIFSYFPGILSIAEESTSWPMVSWPTYVGGLGFNLKWNMGWMHDMLDYFHMDPWFRQFHQNNITFSMWYHHSENFMLALSHDEVVHGKSNILGKMPGDDWQKFANVRALFTYMFAHPGKKTIFMGMEFAQWKEWNAWGTLEWEMLQFDAHKGIQRFFKDINTLYRSEPALYDQDFAEAGFQWVDCTDNRHSVVSFIRRSKDTDEFVVVVCNFTPQPHSHYRVGVPEVGFYTELFNSDSGEYGGSNMGNLGGKWTDEWWFHNYPQSLDLCLPPLGVLILKLDKEKTAKAFQQSETDDGE

SEQ ID NO: 2016 - protein, 89 aa, Arthrospira platensis; identical to SEQ ID NO: 553
  str. Paraca

SEQ ID NO: 2017 - protein, 172 aa, Spirulina platensis
MFDAFTKVVSQADTRGEMLSTAQIDALSQMVAESNKRLDAVNRITSNASTIVSNAARSLFAEQPQLIAPGGNAYTSRRMAACLRDMEIILRYVTYAVFAGDASVLEDRCLNGLRETYLALGTPGSSVAVGVGKMKEAALAIVNDPAGITPGDCSALASEIASYFDRACAAVS

SEQ ID NO: 2018 - protein, 204 aa, Arthrospira platensis NIES-39
MLKAKDIMTTNVVTIRGSATVAEAVKQMNDLCLRALIVQRRHEQDAYGIVTETDVIYKVTAYGKDPKKMRVYEIMTKPCISINPDLGVEYVARLFAQTGIRRAPVIQEELLGIVSVTDILSKGDFVEKPKSIVLADRIEQAIEEARATCAAKGATSRECAAAWDIVEELQAEAAHQRSERIEKTAFEVYCEENPEAAEARVYDN

SEQ ID NO: 2019 - protein, 359 aa, Arthrospira platensis C1
MTTTIQQRESANAWERFCSWVTSTNNRLYVGWFGVLMIPTLLTATICYIIAFIAAPPVDIDGIREPVAGSLLYGNNIISGAVVPSSNAIGLHFYPIWEAASLDEWLYNGGPYQLVIFHFLIGVFCYMGREWELSYRLGMRPWICVAYSAPVAAASAVFLIYPIGQGSFSDGMPLGISGTFNFMLVFQAEHNILMHPFHMLGVAGVFGGALFSAMHGSLVTSSLVRETTEIESQNYGYKFGQEEETYNIVAAHGYFGRLIFQYASFNNSRSLHFFLGAWPVIGIWFTALGVSTMAFNLNGFNFNQSVMDSSGRVVNTWADVINRANLGMEVMHERNAHNFPLDLASAESEPVALVAPQIG

SEQ ID NO: 2020 - protein, 613 aa, Arthrospira platensis C1
MIGFFLWQGAFAASPTDIAQNNTASTRMTYGRFLDYLDAGRVTSVDLYEGGRTAIVEAIDPQLDNGVQRLRVDLPNNAPELISRLRAANISFDSHPPRNDGAIWGLLGNLVFPILLIVGLFFLFRRSNNVPGGPGQAMNFGKSKARFSMEAKTGVLFDDVAGVEEAKEELQEVVTFLKKPERFTAVGARIPKGVLLVGPPGTGKTLLAKAIAGEAGVPFFSISGSEFVEMFVGVGASRVRDLFKKAKETAPCIVFIDEIDAVGRQRGAGIGGGNDEREQTLNQLLTEMDGFEGNTGIIIIAATNRPDVLDSALLRPGRFDRQVIVDAPDIKGRLSVLEVHARNKKLADQVSLEAIARRTPGFTGADLANLLNEAAILTARRRKEAITMAEIDDAVDRVVAGMEGTPLLDGKTKRLIAYHEIGHAIVGTLIKDHDPVQKVTLVPRGQARGLTWFMPDEDQGLISRSQILARITGALGGRAAEDVIFGDAEVTTGAGGDLQQVAGMARQMVTRYGMSDLGPLSLESSQGEVFLGRDFATRTEYSNQIASRIDSQIKAIAEHCYQDACQIIRDHREVIDRLVDLLIEKETIDGDEFRQIVAEYTEVPEKERFAPVL

SEQ ID NO: 2021 - protein, 220 aa, Arthrospira platensis C1
MAAISAKLVKELRDKTGAGMMDCKKALKENDGDMTKAAEWLRQKGIASADKKSGRAATEGIVGSYIHTGGRVGVLVEVNCETDFVARREEFQELVRNIAMQIAACPNVEYVSVDDIPAAMVAKEKEIEMKRDDLGNKPDNIKEKIVQGRIDKRLKELSLVDQPYIRDQNISVEELIKQTISTLGENIKVRRFARFVLGEGLEKEETNFADEVAAQTGGKA

SEQ ID NO: 2022 - protein, 316 aa, Arthrospira platensis NIES-39
MSNLKAIRDRIQSVKNTKKITEAMRLVASAKVRRAQEQVLATRPFADRLAGVLYGLQGRLQFEDVECPLLQQREVKKVGLVVLAGNRGLCGAYNSNIIKRAEARAAELKAEGLEYSYLLVGRKAIQHFTRRDAPISQCRDNPEKTPDLQKVSSAADEILTWFESGAVDRVELIYTKFVSLISSRPVTQTLLPLDLQGLEAQDDEVFRLTSKGGKFDVTREKVSVEPEALAQDMIFEQDPVDILNALLPLFLTNQLLRAWQESTASELAARMTAMSNASDNASDLVKTLTLSYNKARQASITQQILEVVGGAVALEN

SEQ ID NO: 2023 - protein, 426 aa, Arthrospira platensis NIES-39
MSSTTVQAKYEIKDPTLASKGKQRIEWAGREMPVLRQIEERFAQEKPFEGIRLVACCHVTTETAHLAIALKAGGADAILIASNPLSTQDDVAASLVVDYGIPVFAMKGEDTATYLRHVEIALDHRPNIIIDDGSDVTATLVKNRQHQIPEIIGTTEETTTGIVRLRAMFNDGKLTFPAMNVNDADTKHFFDNRYGTGQSTLDGIIRATNVLLAGKNVVVVGYGWCGKGSALRARGLGANVIVTEVDPVRAIEAVMDGFRVMPMEQAAAVGDLFITVTGNKHVIRGEHFDVMKDGAMVCNSGHFDIEIDLKALAERSTEIKEVRNFTQQYKLKTGKSVVVLGEGRLINLAAAEGHPSAVMDMSFANQAMACEYLVKNKGKLEPGLHSIPQDVDQEIARLKLKAMGIAIDTLTPEQIEYSNSWTMGTD

SEQ ID NO: 2024 - protein, 805 aa, Arthrospira platensis NIES-39
MVAAADQSLETTYPLSDDEIRKTHAYWRACNYLCVGMIYLRDNPLLKEPLKPEHIKYRLLGHWGSSPGLSFIYIHLNRLIKKYDLNMIYIAGPGHGAPGVLGPVYLEGTYSEVYPDKSQDAEGMRKFFKQFSFPGGIGSHCTPETPGSIHEGGELGYSLSHAYGTVFDHPELITAAVVGDGEAETGPLATAWHSNKFINPIRDGAVLPILHLNGYKIANPTILSRIPNEELKNLFRGYGYTPYLVECSQLEDYASAHQKMATTLEHCINEIRDIQQQARSSGNATRPQWPMIILRSPKGWTGPKEVDGRKVEGFWRAHQVPMSNVIGNPHQMKILEDWMRSYQPEELFDENGTLIPELQELAPTGIRRMSANPFANGGILRRDLNMPDFRHYAVEVPKPGQSEAENTRPLGNFLRDVMAKNMTNFRMFGPDETASNRLNAVYEVSKKTWMGEFLEEDLDGSELATDGRVMEMLSEHTLQGWLEGYLLTGCHGFFHTYEAFAHVVDSMFNQHAKWLEVCKKEVPWRSPIASLNILLSSTVWRQDHNGFSHQDPGYVDLVTNKSPDVVRVYFPPDANCLLSCANHCLQSKDYVNVIVADKQKHLQFLNMDDAIKHCTKGIGIWEWASNDDCGKDPDIPDVVMASCGDVATRESLAATAILRSEFPELKIRFINVVDLFKLQPNTEHPHGLSDWDFDSLFTTDKPIIFNFHGYPWLIHKLAYRRTNHPNLHVRGYKEKGNINTPLELAIENQVDRFNLVIDVIDRVPQLRSAAAYVRERMRNAIIENVAYAYEHGQDQEEISNWKWPF

SEQ ID NO: 2025 - protein, 871 aa, Arthrospira platensis C1
MYSYFDSDTNDSKSFELPGARPHYNPDRPGQVEHIFLDLVLDIPAQSFQGTCTITLNPIRSGINTLTLDAVDLEINQVKIGKHEVDFDHDGQQLYVHLNQPTEVNQTLKIAIDYTVDHPQRGLYFIGPNSDYPDKPIQVWTQGEDEDSRFWFPCFDYPGQLATSEIKVRVPQDFLAIANGELIATKTKGDQQIYHWLQKQVHPSYLIALAVGKFAEIKEEYNQIPVVYYVEKNRQEDALRSMGKTPAMIEFLSQTFGYDYPYPKYAQVCVDDFIFGGMENTSTTLLTDRCLLDERATLDNRNTESLVVHELAHQWFGDLVVIAHWSHAWIKEGMATYSEVLWTEHEYGADEAAYYRLNEARSYFSEDSSRYSRPIVTHVYREAIELYDRHLYEKGACVYHMIRAELGDELFAKAIHTFVQDNAHKTVETVDLLRAIEKATGRNLLFLFDQYVYRGGHPKYKVSYSWDNDSKIAKVTIKQTQAKDSDKLSEANLFNLKIPIGFGYTKKSKGKSKKKSTPVELKTVTVQVSDREQSFYFPLEEKPNFISFDVGNNLLKTVTLDYPVAELKAQLQFDPDPISRIYAAQALAKKGNLASAKALGEAMVSEPFWGVRVEVAKQLVKVKLDQSFDGLVAGLKDENPRVRRAVVNALAEIHTAASYQAIKPLVENGDPSYYVEASAIQAIAKIAAGNTEDEPTEAEAIALLEMVLQERAGWNEVVRSGAILGLSQMKTSEMALNLILKYTANGVPQALRLNAISSLGRISTGQNNINLERIMQRIQELAKEDFFLTQISVVMALSQMETPKAIAVLNDLAEQTMDGRVRRRAEEAVQKVQKNLGSDKAIKQLREELDKIKKENQELRSRLENLEAKTK

SEQ ID NO: 2026 - protein, 220 aa, Arthrospira platensis
  str. Paraca
MAKISAKQVKELRDKTGAGMMDCKKALKENDGDMTKAAEWLRQKGIASADKKSGRSATEGIVGSYIHTGGRVGVLVEVNCETDFVARRDEFQELVRNIAMQIAACPNVEYVSVDDIPADIVAKEKEIEMKRDDLGNKPDNIKEKIVQGRIDKRLKELSLVDQPYIRDQNISLEELIKQTISTLGENIKVRRFARFVLGEGLEKEETNFADEVAAQTGGKV

SEQ ID NO: 2027 - protein, 287 aa, Arthrospira platensis C1
MAIRSYRPYTPSTRQHTVSEFTEITRSEPEKSLTVSKHRLKGRNNRGVITCRHRGGGHKKLYRIIDFRRDKHNVPAKVAEIEYDPNRNARIALLNYVDGEKRYILHPVGLAVGTVVISGPDAPIEVGNALPLSHIPLGTSIHNVEMIPGKGGQMVRAAGASAQIMAKEGDYVTLKLPSGEQRKIPARCYATIGQVGNVDARNISIGKAGRNRWLGKRPTVRGSVMNPVDHPHGGGEGRAPIGRSGPVTPWGKPALGAKTRNKKKRSTALIVRRRRKSSKRGKGGRQS

SEQ ID NO: 2028 - protein, 335 aa, Arthrospira platensis C1
MLLRLNAMADSSKSKPQDDKTPIQDKTSATKADTTPATSSTPTNQEPVAAKTPEPKPEPKPEPKPEPVAAKTPEPKPEPKPEPVAAKTPEPKPEPKPEPKPEPVAAKTPEPKPEPKPEPKPEPVAAKTPEPKPEPKPEPKPEPVAAKPPEPKPEPKPEPKPEPVAAKPPEPKPEPKAEPKPEPVAAKPPEPKPEPKPEPKPEPKPEPVAAAQPAAITTEPTLEGGVDMPEVDVTAIKEKVLDFFSNLPENFSKFFSEYYRPLTTVILIIVLFVTLRVLVGVIDIINQIPLVKPSLEMVGIGFSGWFVYRYLLRSETREELVNKWREFKKDVFGEN

SEQ ID NO: 2029 - protein, 340 aa, Arthrospira platensis NIES-39
MAIKVGINGFGRIGRLVMRYGSQHPDIQFVGINDLVPADALAYLLKYDSTHGRFNGKVESEDEAIVVDGQTIRCTSIKDPTQLPWKELGVDYVVESTGLFTNYDGAYKHIEAGAKRVVISAPTKDPEKVKTLVVGVNHQDFDPASHPIVSNASCTTNCLAPISKVIQDNFGLAEGLMTTVHSLTATQPTVDGPSRKDWRGGRGATQNIIPASTGAAKAVTLVLPELKGRLTGMAFRVPTPNVSAVDLTFRTEKATTYDEICAAMKSASEGAMKGILGYTDEDVVSSDFITDGHSSIFDAGAGIELNSNFFKIVSWYDNEWGYSCRVIDLMLSMAKADGLL

SEQ ID NO: 2030 - protein, 432 aa, Arthrospira platensis C1
MRLQDFVGTNTQYDIKAIYDNEALSRQIQTRLIDLGLLAPPVDGIFGPNSTAAFRSFQELMNCSEPSGILGTDTAKKLIETKSVNRQGNMRLQNFLGTDIRYDVKEINADAGLSRQIQIRLIDLGLLDPPADGIFGPKSTAALHRFQQLMECSEPGFIGSDTAKKLIEAKVSDLPVTTPMLKVIRDTVLKVRPIASSQLNNSEKFSISAGREFSVLAYDPIRAHLRIALRNESFGGYSVLYIWGGHAEVYEGGTQTYPRTLPTSHRLNVPFKSQLDNFYNPTGACNVTSLAMCLEYFNIPRRDTRYRQFEDELYRYAINKGYSRHSPYDLARIVRDYGARDYFTENAVIEDVQDWIAAGYPAVIHGYFTSFGHIIVVVGYDQNGFIVHDPYGEWFSSGYRTDLSGAYLHYSYQLIRRVCIPDGSFWVHFISK

SEQ ID NO: 2031 - protein, 575 aa, Arthrospira platensis NIES-39
MARLDYFAPGVYIEEVDRGSRPLQGVPTAVAGFVGFTEDIRGGAEPFKPMLVTSWKQYLEYFGRTNSDGFTEFGAYLPFSVYGWFLNGGGRCWITSMGTGLPGSPKPEVRETGTEIVNRANRPSLRFSIRENAEDSGSEGSLTDSSQNRFLAVSDRSIRVQITEGYPKPPSEETEASEAIVTANTGEFFTVVIRQGGEELERFPHLSMNPDIETAVADYVVSALEASEYIIATDLAISGSPLARRPSNGVYEVSPGAIIAETENLARHVEGVREERTGIRGLFEIDEVTIICCPDLMKVYEQGLIDLDQLHGLMDLMVSMCEGAADGDIPNAPNRMIILDPPPDRVKPQEISRWLSIEFNRRSQFAALYYPWILVPNPRNAGRPIAIPPSGHMAGVWARVDETRGVYKAPANEVPRGVIGLTHPCNFREQELLNPIGINCIRPFENRGIRIWGARTLVEPDKTEWRYINVRRLMSYIEKSIENGTQWVVFEPNDEDLWQRVKRTISSFLTELWRSGALIGGSPSEAFYVKCDAELNSPQSMMLGRLFVEVGVCPVRPAEFVIFRISQWTADGEGE

SEQ ID NO: 2032 - protein, 281 aa, Arthrospira platensis C1
MKSAQPQQGLPAIVLGIIVALAILIGLNSFVIINPGQAAVLSILGKAQDGALLEGLHFKPPIISAVDIYDVTVQKFEVPAQSSTKDLQQLSASFAINFRLDPVNVVQVRREQGTLQNVVSKIVAPQTQESFKIAAAKRTIEEAITQREELKADFDEALVSRLDKYGIIVLDTSVVDLTFSPEFARAVEEKQIAEQRARRAVYVAKEAEQQAQADINRAKGRAEAQRLLAETLKAQGGELVLQKEAIEAWRQGGSQMPKVLILGDSKSKVPFLFNVGDLTKS

SEQ ID NO: 2033 - protein, 372 aa, Arthrospira platensis NIES-39
MQSNKQPGQSQSQSPLAKATTTKPTTTTVVGRSTILSVDLGRTATKSCISRNPADVVFIPSNVAQLSVEKARGGGFESKNTDPLLDLWLEYQGNGFAVGQLAADFGASLFGVDPAANPSKVNDALIKIFACVGYFNLKGDLDVVLGLPFYSQEQFEREKEQIMSLLSGPNTLVFRGEQVVVDIQSVRVMPEGYGSLIWCEAQGSKDMPNFADLSVAIVDVGHQTTDFLTVDRFRFARGVSQSEVFAMSKFYEEVAAKIEGADAQSLFLLEAVHKPQGQRFYRPRGATKPANLDEIVPELRKIFARDLCDRVVKWLPERVTDVVITGGGGEFFWQDLQPLLKEAQLRAHLTQPARKANSLGQYVYGEAQLAKR

SEQ ID NO: 2034 - protein, 629 aa, Arthrospira platensis NIES-39
MPKLEQRFDYVKIGLASPERIRQWGERTLPNGQVVGEVTKPETINYRTLKPEMDGLFCERIFGPAKDWECHCGKYKRVRHRGIVCERCGVEVTESRVRRHRMGFIKLAAPVTHVWYLKGIPSYMAILLDMPLRDVEQVVYFNAYVVLNPGNADNLSYKQLLLEEQWLEIEEQIYAEEGELVGVEVGIGAEAIARLLEDIPLEEEAERLRTDIANAKGQKRAKLIKRLRIIDNFIATSSKTEWMVLNVIPVIPPDLRPMVQLDGGRFATSDLNDLYRRVINRNNRLARLQEILAPEIIIRNEKRMLQEAVDALIDNGRRGRTVVGANNRPLKSLSDIIEGKQGRFRQNLLGKRVDYSGRSVIVVGPNLKMHQCGLPREMAIELFQPFVIHRLIRQNLVNNIKAAKKLIQRGDPSVWDVLEEVISGHPVMLNRAPTLHRLGIQAFEPILVEGRAIKLHPLVCPAFNADFDGDQMAVHVPLSIEAQAEARLLMLASNNILSPATGRPIVTPSQDMVLGCYYLTAQNPKAVRGKDRYFSNLEDAIVAYNHGLLDLHAEIWVRFDGEVDLDEPEQLDREEKSADGSQTKLYVGHKSGNLTRRVREDKEGKMISQYVRTTAGRIIFNKTVLDALV

SEQ ID NO: 2035 - protein, 101 aa, Arthrospira sp. PCC 7345
MKTPLTEAVSIADSQGRFLSSTEIQVAFGRFRQAKAGLEAAKALTSKADSLISGAAQAVYNKFPYTTQMQGPNYAADQRGKDKCARDIGYYLRMVTYCLIA

SEQ ID NO: 2036 - protein, 145 aa, Arthrospira platensis C1
MLAIGKLFGRGQKSDYFLEFDEAKGTTAEPSPTVAPKAEAPKVEAPKAEAPKAEAPKADKPEKTKKSVAKKSPEAAKADVPATPAPAAVAKVAPSSAPLNGGMNKTPEGMTFATDYLLPKSTATRRRPGPNMNMFRDMARQMSSK

SEQ ID NO: 2037 - protein, 189 aa, Arthrospira platensis C1
MGRTLAQKENIVVDIQKQLSSAQLTLVIDYTGLSVSQITDLRNRLRETGSVCKVTKNTLMQKAVEGDDNWKPMEKFLSGSSAFIFIQDDFGAAIKAYQAFQKESKKTELRGGVMEGRALSPDEIKAITELPTKEELMARIAGAINSIPTKVAVGVNAVPTKLAVGIKEVPASLVRAIKAVSEKDDSQAA

SEQ ID NO: 2038 - protein, 210 aa, Arthrospira platensis C1
MVDCVIRNWEGEEVGQTTLELKVAKEENASHIVHRALVRQQAAARQGTASTKTRSEVRGGGRKPWRQKGTGRARAGSIRSPLWRGGGVIFGPKPRDYSVKMNRKERRLALRTAFQSRAEDIVVVEEFVTQLPRPKTKDLTDALARWGVSPEAKVLLVLPEKQENVYLSGRNVAKIRICLADSLNVYDVLAADKIVTTANALAKIQEVYGD

SEQ ID NO: 2039 - protein, 255 aa, Arthrospira platensis C1; identical to SEQ ID NO: 613

SEQ ID NO: 2040 - protein, 278 aa, Arthrospira platensis NIES-39
MKYRALVATFLAFCLSVLTACSESPSAKDPSLLTYDDIRNTGLAVNCPSLPETARGSIPLDQNASYEITGLCLQPTSYFVKEEPANKRQEAEFVPGRLLTRFTYSLDQVRGLLKFQPDGSLKFTEKDGIDFQPITVLLPGGEQVPFLFTIKGLVATSQPGLTSINTSTDFSGDFNVPSYRGSTFLDPKARGLASGYDNAVALPATADEEDYVNANVKLADTKFKAGHISLQVAKVDGETGEIAGIFESEQPSDNDLGAKEAVEVKIRGAFYARIEPKA

SEQ ID NO: 2041 - protein, 265 aa, Arthrospira platensis NIES-39
MPVISLADMLESGVHFGHQTRRWNPRMAPYIFTERNGVHIIDLVQTAQLMDDAYDYVRSASEEGKKFLFVGTKRQAAGIIAQEAARCGGYYVNQRWLGGMLTNWVTIKTRVDRLKDLEARENSGQLDYLPKKEAAVLRREMGKLQKYLGGLKGMRRVPDAVIMVDQRREYNAVMECRKLGIPIIALLDTNCDPDLADIHIPANDDAIRAIKLIIGKLADGIYEGRHGVSAVGADDDYDDADTDYDDEEFGDDYESDDDSDDSSDD

SEQ ID NO: 2042 - protein, 365 aa, Arthrospira platensis AV
VGYGWSEVESSFDWQKLTQAVDTEVKRLSQLHISFLEKAGVELIDGYAKFIDAHTLEVGDRKITADKILVSVGAKAVRPEIPGIEHSIVSDDMFLLPEQPKRFAVWGGGYIAVEFAGILNGLGSQVTEIIRRDLILRGFDQDLRSHIQEGMTKHGVNFRTNTTIEKIEKVEEGLKLTLTGDDTEPLIVDALLCATGRQPKLDGLNLENAGVETIKGAIAVTQDSRTTQSNIFAVGDCTDRVNLTPVAIAEGRAFADTEFGHLPRSISHDNIATAVFSQPEAATVGMTEAQAQEKFGDSIKCYRAVFRPMFHSLTGADEKVLMKLIVETNTDRVLGAHMVGKDSAELIQGIAIAVNMGATKKDSTT

SEQ ID NO: 2043 - protein, 134 aa, Arthrospira platensis NIES-39; identical to SEQ ID NO: 624

SEQ ID NO: 2044 - protein, 150 aa, Arthrospira platensis NIES-39
MLAIGKLFGRSKKSDYFLEFDEAKGTTAEPSPTVAPKAEAPKAEAPKAEAPKAEAPKAEAPKAEKPEKTKKSVAKKSPEAAKANVAATPAPAAVAKVASSSAPLNGGMSKTPEGMTFATDYLLPKSTANRRRPGPNMNMFRDMARQMSSK

SEQ ID NO: 2045 - protein, 182 aa, Arthrospira platensis C1; identical to SEQ ID NO: 498

SEQ ID NO: 2046 - protein, 398 aa, Arthrospira platensis NIES-39
MINQTLTSRDVGFTHEDFAALLDKYDYHFSPGDVVPGTVFSLEPRGALIDIGAKTAAYIPLQEMSINRVESPEEVLQSNETREFFILTDENEDGQLTLSIRRIEYMRAWERVRQLQAEDATVRSQVFATNRGGALVRIEGLRGFIPGSHISTRKPKEELVAEELPLKFLEVDEDRNRLVLSHRRALVERKMNRLEVGEVVIGTVRGIKPYGAFIDIGGVSGLLHISEISHDHIDTPHSVFNVNDEVKVMIIDLDADRGRISLSTKQLEPEPGAMVKNPEMVYEKAEEMAAKFREKMQAEQQGIPVVETAPETASETASETASETASETAETEESTAEIPSATDVDTEAELSVPTEEQPISESESESESEAIAQPVAETEAVEDSVEDSVEEIPIATES

SEQ ID NO: 2047 - protein, 457 aa, Arthrospira platensis NIES-39
MRVCVIGTGYVGLVTGVCLAHTGHDVICVDNNEEKVKLMKSGQSPIYEPGLSELMKSCAESGKLSFTSDLKAGVEHGDILFIAVGTPPLPTGESDTRYVEAVARGIGANLTRGSGYKVVVNKSTVPIGSGDWVRMIVLDGFTEQQKEQGTSGSAGELQFDVVSNPEFLREGSAIFDTFNPDRIVLGSNSQKALGLMQELYQPIVDRKYADDPDLPPVPVVMTDLSSAEMVKYAANSFLATKISFINEIANICDRVGADVKQVATGIGLDSRIGNKFLQAGIGWGGSCFPKDVSALIHTADDYNYDAKLLKSAVEVNDQQRVIAIEKLQQVLKILKGKTVGLLGLTFKPDTDDMRDAPALNLIEQLSRLGARVKAYDPIISQSGMRHGLSNVMVETDPELMADGCDALVLVTDWEQFQNLNYAKMVKSMHTPVIIDGRNFLDRKKLQELGFQYVGIGH

SEQ ID NO: 2048 - protein, 466 aa, Arthrospira platensis C1
MKVTQEKLPASQVGLDIEISPEISKKAYEKVINQYARSANIPGFRKGKVPRHILVQRLGPSRIKAAALDDLMQEYFPKIVEEEKIPAIGSFEVIGNIEELIEQYEPGQPITIKAAVDVEPEVKLNKYQDFQVQAEEVKFDPQQVDEILERERVKMATLVPVENRPAQKGDTAYVDFKGYFTPTGATEPQEIEGGQGDNYQVELTEGQFIPGFTEGIEGMSPGETKELNIEFPADYGKPELAGCPATFNITLLELKEKELPELDDDFAAEVSEFETLAELRESLEKRFQEEKAEQTTANKHKALAEALVAEMEVELPETLIREEVDRLLTQQAMQLSNMGIDLKQLFNSETVPRMREHLRPDAIAQLKETLAIKEVAKQQSITITEEEIQAKSEEMMEQLQGQDVNLDRLRMVVTDDLISQKTYQWLEEHSTIELVPEGTLTPEEEEPEDSEDSEEVVVAEAEVVTD

SEQ ID NO: 2049 - protein, 575 aa, Arthrospira platensis C1
MARLDYFAPGVYIEEVDRGSRPLQGVPTAVAGFVGFTEDIRGGAEPFKPMLVTSWKQYLEYFGRTNSDGFTDFGAYLPFSVYGWFLNGGGRCWITSMGTGLPGSPKPEVTETGTEIVNRANRPSLRFSIRESSQDGASESSLADSSQNGFLAVSDRSIRVQITEGYPKPPSEETEASEAIVTANTGEFFTIVIRQGSEELERFPHLSMNPDIETAVADYVVSALEESQYILATDLAISGSPLARRPSNGIYEVSPPAIIAETDNLARHVEGVREDRTGIRGLFEIDEITIVCCPDLMKVYEQGLIDQDQLHGLMDLMVSMCEGAADGDIPNAPNRMIILDPPPDRVKPQDISRWLSQEFNRRSQFAALYYPWILVPNPRNAGRPIAIPPSGHMAGVWARVDETRGVYKAPANEVPRGVIGLTHPCNFREQELLNPIGINCIRPFDNRGIRIWGARTLVEPDKTEWRYINVRRLMSYIEKSIENGTQWVVFEPNDEDLWQRVKRTISSFLTELWRSGALTGGSPSEAFYVKCDAELNSPQSMMLGRLFVEVGVCPVRPAEFVVFRISQWTAEGDGE

SEQ ID NO: 2050 - protein, 2386 aa, Arthrospira platensis C1
MDFGLNEAREFSDFFSASFYAEANPDLAAITQETLVSKFAHFLGFGQFENRRFSRVFDANTYLQLNPDVSQLLQESANLGIQISAFSHFITRGRSENRQFSNIFDVSEYLQLNPDLVPFVESGQINAIDHWVRFGISERREFSLSFSVSQVLRTLSLSSLTEINISELFAQIESNLALILESDDDVDDDVDDDVDDDVDDDVDDDVDDDIDDDVDDDVDDDIDATAPEIPQIPPLPVIPPIAEQPEPEPEPEPEPEPEPEPEPEPEPEPEPEPEPEPEPEPEPEPEPEPEPEEPELPLDVVLDVDYILTTYEAELRIAFGVQDVTTISTRELLDWLDENALEAGINPSPFVDIQFYVRTFGQQLTEFYSVSSVEELSYLQIVNFIEGEGLERGFSPSPNINFAHFQATYSSQIEAFFRTSIENITNAQLFSYIVEVGLEQGQSPSVLIDLNFILSNQQSVTAIESHFGTEIANLTNAQIVRFISSDEGLERVTPSTLVSLNYFRAVHRQRLEAFFGVEIAEITNSQVFTFVNTIGLQEGLNTSAQLGFSYLQSIYGERITAALGEGATQQEVLAFIQREGLPENVNPSVFVHLDFVQQSQSQEVQEFFNVESATQLSEQQVINSIQANVKVDVNYVVTQYAEQLAEFYEIEVEQVNSLSSEQVISFTLGAGANLGVNPTPINLAEIRRLFGTELQAFFGVSDVRFLSDSQVNSFVINQSRVSGRVNELVNVVNVNYYQTIFSEALTATFGEDFTEENVVQFVFGDAAPAINIRFAKIKYRAALEQQAQSLGRTLETLTDDEVRLYLFTEGFDVENTLTPFNLEVVRTEYAAQLRAFYGVRNVAVLSEQQIYRFVVGQALEQGLSLAEVVDEEALEILREEYSSLLIEFYGVENVETLSTNVVLDFIYGGLSQIVDYDYFRFTFTGDVEATFGVESISEVTKLQIVEYLYEQEVSVSSLHWFNVEAYLEEHGSAAETAIAQFFRVSSINELSVTQIRDFALNIGVQQFSIEGALNIDYIRETFNAAIVSSDLAVNAWLESFSFLNVDTAYVQNQLEGLLLDETLTLEQVNEILGTEIEGLDELSDRHLITLVFDADFQEIIGDVEIQLFQETLNIDYVRTVFASAIAHTLEVDIAAVTGEEVLTVSDEQLDEFLLAQSEEIASELEIDADDVTLELAQEWFITNSVTTVEGLSVEVDIAYVKYQLQRSLDDEQFSLEDINSILDEPVEEFDDLTDEQIVDLGLNAEFQAEFSLEISLVQTELSIGFVVSRFSSELAEFFDLSPEEFAAKEFTQEEIIEFFSSTQAEAIAEFLGETVVGGEDDDDLDDEDDEDDDSDDDEDDEDDDSDDDEDDEDDDSDDDDDDEDDEDDDSDDDEDDEDDDSDDDEDDEDDDSDDDDDDEDDDEDDDDDEDDEDDEDDDEDDEDDDDDDQDDDSDDGPVFAAEDVLAYIEQLMVDVETVTQTEEIDIEFVTYQLEELFQASVFSLEDVNTILETEYESVDELTTEDIVTLAFSVEFQEVLGEDVEIELVQSEVNYSYLRASQAQAIADLFSTEENPITVEDVLRGEIEPLTDAEILAAFEENFLTADVGFIRYQVEQLLTETTITIEQVNESLSLEESIEAIVELNDAQIINLVYNREFQALLMEAEQTIELSAINYEAFIEANAETLIQQFGVDDVTELTLEQVHGFMFSGQVSIQGFVNFDYLRETFMSAIASQELPDSTILDWFNTDFSLINVNFLNAQFNQFTAAVQTQLLDSLGIELNEGESLSHQQLIEIFYSSEFQTITGIETLQTLAFDWQGYAEANAEALADFYQAFLVPAIPEGQAPNSVVVELSNFTGAEAQVTVTLEEVEGGIQFTVDGVEPIADINGVFFNIEDSSLLDSLSVSGDDVTNSNFSGDVKRVRNTSISPLKFDAGVQIGTPGIGRDDIQSTVFVITADGEELSLDQFVGQEFGVRLTSVESEGSRSASSKLRGTAEAVFTADGDDVGVIDVSSLSAEQVFNFAFQQGWQLGINPLEFVEVDFLRQQFAVDIARAYNIDVSAVASLESSLVLDYVYGGLSTQIDFEFYRTKYAASLQSTFGISAESLTRAQILEHAYTVGLEQGFNFVAIDYDAIATQYPQVFADFFGIPVEEIFNLDLSILQSFDLGIASELGIDISPFVDIEFFRQQASEQILQNYRIENVFRINSQQLFEFSLQGNFSTAPTIDLNWALTQYADFLAENLADFDQDDDGEIDNSELFDALTGQLLEQGNETSDIYSFEQYFESEDVQEEVAEFFGVESFEDVTFTQRLEYMFGAGLLAGIDPYSEEFLEANPQMAMDIYLEENSAALIEFAGVRSINQVTFLDVYNFQAINEINAFSGISTIDDIDDIDDIIDDIIDEVDAFSV

SEQ ID NO: 2051 - protein, 120 aa, Arthrospira platensis NIES-39
MKLTRNDSRQRRHRRVRRKVLGTSERPRLAVFRSHKHIYVQVIDDSQQHTLVAASTLDPEITADLKTGATCDASVKVGQLIAQRSLSKGIERVVFDRGGYIYHGRVKALADAAREAGLEF

SEQ ID NO: 2052 - protein, 161 aa, Arthrospira platensis NIES-39
MTVVSQVILKADDELRYPTTGELKNISDFLKTGEQRLRIVDTLTENEKKIVDRASAQLWKKRPDFIAPGGNAAGQRERSLCLRDYGWYLRVITYGILSGDKDPIESIGLIGVKEMYNSLGVPMPGMVEAIRCLKEASLALLDDEDAKEAAPYFDFIIQAMS

SEQ ID NO: 2053 - protein, 174 aa, Arthrospira platensis C1
MSVRLYVGNLPKELDRKELQAVFAEEGDTISAKVITDRKTGKCRGFGFVTVQSDDLADQIVEKYNGFMFGENALKIERAQPRKKNKPESEEGRSSDGGEATATATPGVVAANQSPTSSPSSAPTKSGGGKKKKSNRNQQGSANANSSSTPDSIQPDPRWANELEKLKQMLSAQA

SEQ ID NO: 2054 - protein, 173 aa, Arthrospira platensis AV
MAFELPSLPFDQDALESSKMSANTLSYHHGKHHAAYVKNLNAAIEGTDMANMSLEEIIKATYNDPSKSGIFNNAAQVWNHSFFWKCLKPNGGGQPTGALADKIQADFGSFDAFIQEFKNAAATQFGSGWAWLVLDNGTLKVTKTANAVNPMVEGKTPLLTLDVWEHPLLSELP

SEQ ID NO: 2055 - protein, 321 aa, Arthrospira platensis NIES-39
MVQDQKSTVIVTGASSGVGLYAAKALADRGAHVIMACRNLEKAEAAAQELGIPEDSRTMLHIDLGSLESVRRFINSFRATGRTLEGLVCNAAIYMPLIKEPLRSPEGYELTMTTNHLGHFLLCNVMMEDMKRSLAEDKRMVILGTVTHNPDELGGKIPPRPDLGDLEGFAKGFREPVSMIDGKKFEPVKAYKDSKVCNVLTMRELHRRYHEETGITFTSLYPGCVADTPLFRNHYPLFQKIFPIFQKYITKGYVSQELAGERVAAVVLDEEYRQSGAYWSWGNRQKKGRQSFVQRVSPQARDEERAEKMWNLSLKLVELAY

SEQ ID NO: 2056 - protein, 352 aa, Arthrospira platensis NIES-39
MTIAVERPQVTRGWFDVLDDWLKRDRFVFVGWSGILLFPCAYLSIGGWLTGTTFVTSWYTHGLASSYLEGCNFLTAAVSTPANSLGHSLLFLWGPEAQWDFTRWCQLGGLWAFVALHGAFALIGFCLRQLEIARLVGIRPYNAIAFTGPIAVFVSVFLMYPLGQSGWFFAPSFGVAGIFRFILFFQGFHNWTLNPFHMMGVAGILGGALLCAIHGATVENTLFEDGEGSNTFRAFEPTQAEETYSMVTANRFWSQIFGIAFSNKRWLHFFMLFVPVTGLWMCSIGVVGLALNLRAYDFVSQELRAAEDPEFETFYTKNILLNEGIRAWMAPADQPHQNFVFPEEVLPRGNAL

SEQ ID NO: 2057 - protein, 394 aa, Arthrospira platensis NIES-39
MSRIETRTEPMVINMGPHHPSMHGVLRLIVTLDGEDVVDCEPVIGYLHRGMEKIAENRTNIMYVPYVSRWDYAAGMFNEAVTVNAPEMLANIEVPKRAQYIRVIMLELNRIANHLLWLGPFLADLGAQTPFFYIFREREMIYDLWEAATGYRMVNNNYFRIGGVAADLPYGWVDKCHDFCDYFLPKVDEYEKLITNNPIFRRRIEGLGVITREQAINWGLSGPMLRASGVNWDLRKVDHYECYDDLDWDVHWETDGDCLARYVVRIREMRESVKILRQALDGLPGGPYENLEAQRMMGGPKSEWNNFDYQFIGKKIAPTFKIPSGEHYVRVESGKGELGIYIIGDDNVFPWRFKIRAADFNNLQIFPDLVKGEKVADIVAILGSVDIIMGSVDR

SEQ ID NO: 2058 - protein, 442 aa, Arthrospira platensis C1
MTINPKISPAFAPFLSNTDPQGKQDAIVIFQGQYPTNIAPRDSQQRFNTIQQTATSHQAEVSKLAASYKSAVGQNFNVSAIGSGALPIATVEVTAETLPALVEQPGVVAVLPNQKIKLIEPSAIDYQQLRRQEENNKLTWGLELLEIPKMWEKTKGKGVTVSVLDTGVHGDHPALKDRVKGFVVIDPLGRRITATPSFDGGNHGTHVCGTVAGGKTESGVSIGVAPEADLLAGGVLIGNATLRTLIEGISWSIENGADVINMSLGMSYYEPLFAQVFDMLINQYDVLPVVAVGNENHGNTSCPGNAHNAFSIGAVEMLPNSELGITFFSSGASLVFPDDAPNRLVTKPDVSAPGAQVYSAVPPTKQANGSFEYTYMDGTSMATPHVAGVVALLLAAQPDVPVSKIVEVLRETAEHPGGEQMRPDNRWGWGLIKPWEALQALK

SEQ ID NO: 2059 - protein, 438 aa, Arthrospira platensis NIES-39
MVVSREKTPTAQETFMQMAQAAGLRGRILVTIGLLILVRLGVFLPIPGIDRQAFSQNIQNTPFIGFLDLFSGGGFSALGIFALGILPYINASIIMQLMTAALPTLEDLQKNEGEAGRRKISQITRYVALGWAILQSIGIAIWVSPFAQNPNQPQFIVMAEVVLALAAGSMFVMWVSELITERGIGNGASLLIFINIVAVLPQSLGSTIELAQSGDSAIVGRVVILLLIFLAMIVGIVFVQEGTRRIPIVSARRQVGRKLYREKSSYLPLRLNQGGVMPIIFASAVLILPASISQFANNPILVQISTYLSPGGPAPWVYIAFYLLMILFFSYFYASLIMNPVDMAQNLKKMGASIPGIRPGRATSEYIERVLNRLTFLGAVFLGLVAIIPTVVESATRVPTFRGFGATSLLILVGVAIDTAKQVQTYVISQRYEGMVKK

SEQ ID NO: 2060 - protein, 533 aa, Arthrospira platensis C1
MPRKKKRGVTTLYSETKVKIGVSLTPTGAKLLSTTAKELGLSRSEFVERIARGDFKISMDEEGTTISLANTNTQTEVDDQSDDSPAITAELEKRSAEYDQLQQEYETLQKQVIEQANTIAELEQKLGHFPELQAQLENSVPAKEYHHVQQELQQHKDSITDLKKQLKRIGELESKLANTVSLEDHEALKQQNQETLNQLQSQLGDSQKLQQQLEQQKSTVADWQSQLKQTVTAEVHQKLQQQLEQQKSTVADLQSQLKQTVTAEVHQKLQQQLEQQKSTVADLQSQLKQTVTAEVHQKLQQQLEQQKSTVADLQSQLKQTVTAEVHQKLQQQLEQQKSTVADWQSQLKQTVAAEVHQKLQQQLEQHKSTVADLQSQLSASVSMDTYQKLEQEAEQHKNLINQLQEQLENRQTEIAEVRQKLTRIAELEAMISQTVPADKYSALQIQSEHQRYMVETMKKQLWDLVSSDHNLEFGELETVDGLVKCCGLVRQKLESQTRAISALQQRTQELQSLAMLAESHLNKWSNRIFSKTY

SEQ ID NO: 2061 - protein, 610 aa, Arthrospira platensis C1
MSDLFKGFEQLLELVKALEEKVENGEIKTEYQFNSRSLSSIPRTGNIPRPNNTTSNVGTSSIRTPSSPPRNTGASDPNVQPEPNLGITLKDIGGLNQELKELKELIAIPLKRPDLLVKLGLEPTHGVLLVGPPGTGKTLTARALAEELGVNYIALVGPEVITKYYGEAEQKLRAIFEKAAKNAPCIIFIDEIDSLAPNRSAVEGEVEKRLVAQLLSLMDGFSQNKGVILLGATNRPDHLDPALRRPGRFDREIQFRVPDINGRKEILEVLTRAMPLDDSVDLEFIADHTVGFVGADLKAVCQKAAYTALRRQVPSIDMQIPEDIAVEQSDFLQALKEIKPAVLRSMEVEVPHVEWEDIGGLETIKQTLRESVEGALLYPELYKETKARAPKGILLWGPPGTGKTLLAKAVASQARANFIGINGPDLLSRWVGASEQAVRELFAKARQADPCVIFIDELDTLAPARGTYTGDSGVSNRVVGQLLTELDGLESGSNILVIGATNRPDAIDPALLRAGRLDLQLKVDLPNLDSRFKILQVYNQGRPLLNVDLEHWAKITEGWNGADLVLLCNQAAVGAIRRFRSQGETDTAAIKITVDDFQASYEALSQQRTV

SEQ ID NO: 2062 - protein, 612 aa, Arthrospira platensis NIES-39
MNKRWRNAVLYAMLAIVVIALATTLFDQQPQSRETWKYSTFVQEVQQNRVERVSISADRTKALVTAQDGSKILVNLPNDPDLINILSENNVDIAVQPQTEEGLWFRALSSLFFPILLLVGLFFLLRRAQNGPGSQAMNFGKSKARVQMEPQTQVTFGDVAGIEQAKLELSEVVDFLKNADRFTAIGAKIPKGVLLVGPPGTGKTLLAKAVAGEAGVPFFSISGSEFVEMFVGVGASRVRDLFEQAKANAPCIVFIDEIDAVGRQRGAGLGGGNDEREQTLNQLLTEMDGFEGNTGIIIIAATNRPDVLDAALMRPGRFDRQVVVDRPDYSGRSEILQVHARGKTLGKDVDLDKIARRTPGFTGADLSNLLNEAAILAARRNLTEISMDEVNDAIDRVLAGPEKKDRVMSEKRKTLVAYHEAGHALVGALMPDYDPVQKISIIPRGRAGGLTWFMPSEDRMDSGLYSRSYLQNQMAVALGGRLAEEIVFGEEEVTTGASNDLQQVTRVARQMITRFGMSDRLGPVALGRQQGNVFLGRDIMSERDFSEETASAIDEEVRALVDEAYKRARQVLEENRPVLDSLAEMLIEKETVDSEELQELLASSDVKMAAIA

SEQ ID NO: 2063 - protein, 606 aa, Arthrospira platensis C1
MRLQDFLGTNTRYDIQQIDDDEALSRQIQTRLIDLGLLDPPADGIFGPLSTAAFKRFQELMNISESGILATETAQKLLDTTTMRPPNMRLEDFLGTNIRYEIQAIYDNEGLSRQIQTRLIDLGLLEPPVDGIFGPLSTAAFRRFQELMNISESGILGSETAKKLIETTTIRRENMRLQDFVGTNIRYDFQAIYDNEALSRQIQIRLIDLGLLAPPVDGIFGPLSRAAFRNFQELMNCSEPSGILGTDTAKKLIETKTVSRPGNMRLQDFLGTNLRYDVKAINADAGLSRQIQIRLIDLGLLDPPADGIFGPKSTAALHRFQQLMECSEPGFIGSETAKKLIETKVSDLPVTTPILKVIRNTVFKVRPIASSQLNNSEKFSIPAGREFSVLAYDPIRAHLRVALRNESFGGYSILYIWAGHVEVYEGGTRTHPRPLPTSRRLNVPFKSQLDNFYNPTGACNVTSIAMCLAYFNIPRRNLRYRQFEDELYRYALDMGYSRHNPYDLARIVRDYGARDHFTENAVIEDVQDWIAAGYPAVIHGYFTSFGHIIVVVGYDQNGFIVHDPYGEWFSTGYRTDLSGAYLHYSYRLIRRVCIPDGNFWVHFISR

SEQ ID NO: 2064 - protein, 694 aa, Arthrospira platensis C1
MTNNVASENRNVAIVGPYLSGKTALLESLLFATGTITRKGTAKEGNRIGDSVAEARDRNMSVEINAAYTEYGGINFTFLDCPGSVEFAQETYNALMGAGLAIVVCEPEPLRILTLSPLFKFLDDWEIPHIVFINKMDRAFSDEEGCTLNFLELLNALKTVSSRPIVPQEYPIAKGSELIGFIDLVTEQAYNYHPGAASDPVPMPEELKDLEHAARQEMLEQLSNFDDHLLEELLEEIEPPTEEIVKDLKMELGADLIVPVFFGAAELEYGVRSLLDALVREAPEPSLTAERRGLKGTSDIPIAQVLKTFYTPQGGKLSLVRVWQGELTEGIVLNGIRAAGMYRLLGQQTQGVQVAKTGEIVALARMEGIKTGDTLTAQPDRLKAPLPKAQVLPPVLAFAIAPENRKDEVKLSAALTKMIEEDPSLTWEQNTDTHQVILWGQGEIHLKVTLDRLRRKYNLPIVTSPPQIPYKETIRSNTNSHGRYKHQSGGHGQFGDVYLDITPLPRGEGFNFSETIVGGAVPKQYIPGVEMGVREYLQQGPLGFPVVDVSVTLTNGSYHSVDSSEQAFKQAARLAMQTGMAKCNPTLLEPIVTVEVCAPNDFTSQLFQLITTRRGQILGYEPVADWKGWDQVSAYLPQAEMQDLIVELRSLTMGVGYFNWKFDHLQEVPEQLAQRVLATVADDSNGGGNSKSKN

SEQ ID NO: 2065 - protein, 888 aa, Arthrospira platensis NIES-39
MVNRVTNIEELENLIARVKAAQQEFSGFTQEQVDYIFKKAALAANAARIPLAKIAVEETGMGVVEDKVIKNHFASEIIYNKYKNTKTCGVIESDKSFGFQKIAEPVGILAGIVPTTNPTSTAIFKALIALKTRNGIIFSPHPRAQKCTNEAARIILEAAVEAGAPEDIIGWIDEPTVPLSQALMQHQDIKLILATGGPGMVRAAYSSGRPSLGVGAGNTPALIDDSAHIKMAVSSIILSKTFDNGMICASEQSVIVVDSIYDQVREEFLSRGAYFLTPEETDRMANVIFVDGHLNPEIVGQTVNKLGGMAGLNLPDNTRVIIGERPEIDDDDPFAHEKLSPVLVMYRAKDFEDAVLKAERLVQLGGRGHTAALYTSPNNTAHINAFEGKVQTARVLINTPSSQGAIGDLYNFRLDPSLTLGCGTWGGNSISENVEPTHLLNIKTVAERRENMLWFRVPPKIYFKYGSLPVALRELAGKKRAFIVTDKPLFNLGITASLEEVLEEIGVKYDVFYDVEPDPSLDTVQRGLTLMNTFEPDVIIAIGGGSPMDAAKIMWLMYEHPDIEFEGLAMRFMDIRKRVYDLPPLGEKALMVAIPTTSGTGSEVTPFAVVTDRRNNIKYPLADYALTPNIAIVDPELVLNMPKSLTSFGGIDALTHALEAFVSVLASEYTNGMALEAIRLIFKYLPSSYKNGANDPKAREKMHYASTMAGMAFANGFLGICHSIAHQLGGTFHIPHGLANALMISHVIRYNATDAPFKQATFSQYKYPNTKWRYARVADYLHLGGNTDDEKIDRLILAIEELKHQVGIPKAMKEVVKESEAEFLAKVDEVADQAFDDQCTGANPRYPLIEDLKQLIIDAYYGHPVVASENNGKTVFPTFGPEPVMMGE

SEQ ID NO: 2066 - protein, 1193 aa, Arthrospira platensis NIES-39
MNTRQYATLDGNEAVARVAFRLNEVIAIYPITPSSPMGEWADAWTSEGQPNIWGTVPAVVEMQSEGGAAGAVHGSLQGGSLTTTFTASQGLLLMIPNLYKIAGELTCAVLHVAARSIAAQALSIFGDHSDVMAVRATGCGLLCSASVQEAHDLALVAQASTLKSRIPFIHFFDGFRTSHEVQKIELLEESDLRAMIDDEDIYAHRARGLTPDRPALRGTAQNPDVYFQARESVNPFYNACPEMVQKAMDKFGELTGRHYKLFEYHGAPDADRIIILMGSGCETVHETVDYLTAQGEKVGVLKVRLYRPWDANAFIGAVPKTAKAIAVLDRTKEPGSSGEPLYLDVVTAISESWEGLAPKIVGGRYGLSSKEFNPAMVKAVFDNLQLDKPKNHFTIGINDDLTHTSLPFDPEFSTEPDNVIRAMFYGLGSDGTVGANKNSIKIIGDETSNYAQGYFVYDSKKSGAVTVSHLRFGPNLIRSPYLIEKSNFIGCHQWNFLEKLNVVDAATNGATFLLNSPYGPDEVWNYLPIEIQEQIVRKNLKLYVIDANKVARDSGMGSRINTVMQVCFFALAGVLPKDEAIAKIKKAIEKTYGKKGSAIVRMNLQAVDNTLDNLFEVNIGEANSHVRIASPVPANAPDFVREVEGMMLARKGDQLSVSQLPCDGTYPTGTSKWEKRNVAQEIPVWDADVCVQCGKCIMVCPHAVIRGKAYDESALNGAPETFKTTAVRDKAFEGQKFTIQVSPEDCTGCGICVDVCPAKNKSMPSKKAINMEYQPPIRATERDNWEFFLNLPNPDRRNLRSDMIKQQQWQEPLFEFSGACAGCGETPYIKLATQLFGDRMVVANATGCSSIYGGNLPTTPWAQNAEGRGPSWSNSLFEDNAEFGLGFRLSIDKHTAFACELLQTLGGIVGDELVAKIINNPQKSEADIWEQRELVAQVKQKLQGSDDTNAKQLLSLADYLVKKSVWILGGDGWAYDIGYGGLDHVIASGRNVNILVMDTEVYSNTGGQSSKATPRGAVAKFAAGGKPSPKKDLGLIAMTYGNVYVASVAMGARDEHTLKVFLEAEAYDGPSLIIAYSHCIAHGINMTTAMSHQKAIVESGRWLLYRYHPDLKAEGKNPLLLDSRSPKKSIEQSMYAENRFKMLTKTKPVDAKRLLKEAQKDVDTRWQMYEYLAARPLNDEGNKPNTDTSGDKE

SEQ ID NO: 2067 - protein, 103 aa, Arthrospira platensis NIES-39
MAAVSLSVSTVKPLGERVFVKVSASEEKTAGGILLPDTAKEKPQVGEIVAAGPGRRNDDGSRCEMEVKVGDKVLYSKYAGTDIKLGGDEYVLLAEKDILAIVN

SEQ ID NO: 2068 - protein, 107 aa, Arthrospira platensis C1; identical to SEQ ID NO: 586

SEQ ID NO: 2069 - protein, 116 aa, Arthrospira platensis NIES-39
MSQQAVGALETKGFPGILAAADAMVKAGRVTLVGYIRAGSARFTVMIRGDVSEVKTAMDAGIAAVEKVYGGALETWVIIPRPHENVVAVLPIDFSDAVEEYRAAAEGLTLPRGNAR

SEQ ID NO: 2070 - protein, 152 aa, Arthrospira platensis NIES-39
MSKRTQVVLTKDVSKLGREGDLVEVAPGYARNYLLPYSFAVRATPGILRQVERRREEERQRLIELKQQAQSRKTALETIGRFTIAKQVGENEAIFGTVTTSELAEAIQKATGQEVDRRGITLPDINKIGFYKAEIKLHPEVTATVEIHVVAE

SEQ ID NO: 2071 - protein, 162 aa, Arthrospira platensis C1
MRRLLALVLALGLWFGGSAAAEAYNLTPCSDSAAFQQRAQTSIARSANPDQAKARFERYSQELCGEDGLPHLITDGSLSHAGDFLIPSVLFLYIAGWIGWVGRSYLQYAQKDKKPTEKEIIIEVPKAVQLMLGGFLWPLAALKEMTTGEMFAKDNEITVSPR

SEQ ID NO: 2072 - protein, 162 aa, Arthrospira platensis NIES-39
MRRLLALVLALGLWFGGSAAAEAYNLTPCSDSAAFQQRAQTSIARSANPDQAKARFERYSQELCGEDGLPHLIVDGSLSHAGDFLIPSVLFLYIAGWIGWVGRSYLQYAGKDKKATEKEIIIDVPKAVQLMLGGFLWPLAALKEMTTGEMFAKDNEITVSPR

SEQ ID NO: 2073 - protein, 170 aa, Arthrospira platensis C1
MKSKLLGGLCVLITAFMPVKAFAQIGVPTTPSDFDIRYQRPDPQTGRVTPPRYYSLPDLANPFRTLPSAFRYPIIYELGVNRNIRSDAVITDEVFIPNLPPIPAGITLDNIPRVRAEYTRRVEEWGERVQECKRLDPLIIKTDTGNPVLINQRSAGRIVLNANNISVCPR

SEQ ID NO: 2074 - protein, 195 aa, Arthrospira platensis C1
MPCNVQDDALVTSLFDTIRDQWGKLDILIHCLAFAGKEELSGDFSTVSREGFTRALDISSYSLVQLSGAAKPLMTSGGSIVTLTYLGGVRVVPNYNVMGIAKAALEMNVRYLAAELGPLGIRVNGISSGPIRTLASSAVGGILDMIHHVEEIAPLKRTVTQTEVGNTAAFLCSDLSSGITGQIIYVDSGYCIMGM

SEQ ID NO: 2075 - protein, 207 aa, Arthrospira platensis C1
MLKFLNQVGDYAKETIQAAKYIGQGLSVTFDHMKRRPITVQYPYEKLIPSERFRGRIHFEFDKCISCEVCVRVCPINLPVVDWEFNRETKKKKLKHYSIDFGVCIFCGNCVEYCPTNCLSMTEEYELAAYDRHELNYDSVALGRLPYKVTDDPMVTPLRELAYLPKGVMDPHDLPPNSRRSGLRPEEILDKMEQQRDGESQAKAEKA

SEQ ID NO: 2076 - protein, 212 aa, Arthrospira platensis NIES-39
MTLRLGDTVPNFTQSSSEGEINFYDWAGDSWVVLFSHPADYTPVCTTELGTVAKLKPEFDKRNVKVIALSVDDADSHKGWIGDINETQQTNINYPILADSDRQVSDLYDMIHPNANASLTVRTVFVIDSNKKLRLTLTYPPSTGRNFSEILRVIDSLQLTDNYSVATPADWQDGEDCVIVPSLKDPEELKQKFPKGYKEIKPYLRMTPQPNK

SEQ ID NO: 2077 - protein, 229 aa, Arthrospira platensis NIES-39
MSVGILGTKLGMTQVFDTETGKAIPVTVVQAGPCTITQVKTEATDGYTAIQLGYGEVPNKTRKLNTRKSPDKEVNKYLSHAEQGHLTKSNSPLVRHLKEYRLESTDNFELGQEVKVDAFEPGQIVDVTGISMGRGFAGNQKRNNFRRGPMAHGSKNHRLPGSIGPGTTPGRVYPGKKMAGRYGGKQITTRKLTIVRVDLERNLLLIKGSIPGKTGGLLNIKPANLVGGK

SEQ ID NO: 2078 - protein, 281 aa, Arthrospira platensis C1
MAGVGMGRYSLGKSPAGMAKALFLFVPWGQQILIHWIKRPDVGGNTIAMSQSQKSVVIAPSILSADFSRLGEEIRAVDEAGADWIHVDVMDGRFVPNITIGPLIVDAIRPVTKKPLDVHLMIVEPEKYVEDFAKAGADIISVHAEHNASPHLHRTLNLIRECGKQSGVVLNPSTPLDLIEYVLDVCDLVLIMSVNPGFGGQKFIPTVVPKIRQLRQMCDERGLDPWIEVDGGLKIDNTWQVLEAGANAIVAGSAVFNADNYSEAIAGIRNSKRPTPELATV

SEQ ID NO: 2079 - protein, 380 aa, Arthrospira platensis C1
MVKVYFRTVTNNNQTYGKGYFVYGNSQTANDQEIVYHTDLREFVYTDPDTQIDLSKGARGTLHFVIGGNPANAVPARSVFNIEMADPVGNLQTTAKEGSQSCRPGQLGLTNKAGIWLEWPSIGDAAPSWWEGKPDGSSSEGEKPTQPSGGSEEPQPTPPNVDWSSFIPPQGGCAPTPPGHIKIKIPYDIGKRDFPNSYLPQVDLSKMNLSGIDLSFSYLCATNLGATNLVAANLGYAYLCHAYLGYANLNYAYLGYANLCCADLSYAVLSQADLSFANLCQAKLIGAQLNQASLAYANFCYAYLGYANLSYSYLGYANFCGADLTNADLQGTDMTGANFTNANLTNADLRGANITGANFSNANLTGAKLDDAQKQLLGIA

SEQ ID NO: 2080 - protein, 358 aa, Arthrospira platensis NIES-39
MVDSLKKPTFEEIRPGVKVPAKETILTPRFYTTDFEEMEKMDISANEEEIRAILEEFRIDYNRHHFVRDEEFEQSWDHIDGETRKVFVEFLERSCTAEFSGFLLYKELSRRLKEKSPVLAECFLLMSRDEARHAGFLNKALSDFNLSLDLGFLTKSRKYTFFKPKFIFYATYLSEKIGYWRYIKIYRHLEAHPEDRIYPIFRFFENWCQDENRHGDFFDAMLKSQPSLLNDWKARLWCRFFLLSVFATMYLNDLQRADFYAAIGLNARDYDIEVIEKTNETAGRVFPIVLNVNHPSFYQRLDHCVKTNEKLSAIANSNAPGFVKFFQKLPHYISNGWQFLNLYLLKPINVEPTHGVAR

SEQ ID NO: 2081 - protein, 392 aa, Arthrospira platensis NIES-39
MTHHQDAIAPHGGKLINRMASAEQRAELLEKADTLPRVQLDERSQSDLELIAIGGFSPLTGFMEQADYSNVVHNMRLSNGLPWSVPITLSVTEEEAAHLSEGSLIRLDSPKGKFVGVLELTQKYTYDKEHEAIHVYRTNDNKHPGVKVVYDQGPVNLAGPVWLLQRESHPLFPNYQIDPADSRSLFREREWKTIVGFQTRNPIHRAHEYIQKCALETVDGLFLHPLVGATKSDDIPADVRMRCYEILMERYYPKNRVILAINPAAMRYAGPREAIFHAMVRKNYGCTHFIVGRDHAGVGDYYGTYDAQHIFDEFEPAELGITPMKFEHAFYCTLTKGMATSKTSPSTPEQRIHLSGTKVREMLRRGELPPPEFSRPEVAAELIKAMRVPSEA

SEQ ID NO: 2082 - protein, 432 aa, Arthrospira platensis NIES-39
MVSTPLQTTKSEEIFSAAQKIMPGGVSSPVRAFKSVGGQPIVFDRVKGAYVWDVDGNQYIDYVGTWGPAICGHAHPEVIAALHEALEKGTSFGAPCALENVLAEMVIDAVPSIEMVRFVNSGTEACMSVLRLMRAFTGREKIIKFEGCYHGHADMFLVKAGSGVATLGLPDSPGVPKNVTVNTLTAPYNDLEAVKKLFSENPGQIAGIILEAVVGNSGFIPPDAGFLEGLRMLTEENGALLVFDEVMTGFRIAYGGAQEKFGVTPDLTTLGKIIGGGLPVGAYGGRQDIMAMVAPAGPMYQAGTLSGNPLAMTAGIKTLELLQKPGTYEYLDQITKKLSNGLLEIAKETGHAACGGQISAMFGFFFTEGPVHNYDHAKKSDLAKFGRFHRGMLERGIYLAPSQFEAGFTSFVHTEEDIDKTLAAAREVLSGL

SEQ ID NO: 2083 - protein, 474 aa, Arthrospira platensis NIES-39
MSEQKFGVIGLAVMGENLALNVERNGFPVAVYNRTSAKTDEFMQKRAPGKNVKPAYTLEEFVASLERPRRILVMVKAGKPVDAVINQLKPLLDHDDMIIDGGNSLYEDTERRTKELEATGLGFMGMGVSGGEEGALWGPSLMPGGTQNSYQALEPILTKIAAQVDDGPCVTYIGAGGAGHYVKMVHNGIEYGDMQLIAEAYDLLRNVIGLNEQQLYEVFAEWNTTDELNSFLIEITADIFKQKDPETGKPLVDLVLDSAGQKGTGRWTVVSALELGVSIPTITAAVNSRIISSYKDERVAASQELPGPSANFDGDVTSFINKVRDALYCSKICSYAQGMALMGKASQEFNYNLNLGEIARIWKGGCIIRAGFLNKIKQAYDQNPQLPNLLLAPEFKHTILDRQSAWREVLVTANTMGIPVPAFSASLDYFDSYRRVSLPQNLTQAQRDYFGAHTYERIDKPRGQFFHTEWANVD

SEQ ID NO: 2084 - protein, 475 aa, Arthrospira platensis NIES-39
MRILFVAAEAAPLAKVGGMGDVVGALPQVLRAMGHDVRVFMPYYGFLPDKIKIPKEPIWWGTAMYQKFAVFETTFPKTDVPLYLFGHPSFMPRRIYYGEDEDWRFTLFANGAAEFCWNYWKPQIVHCHDWHTGMIPVWMKETPDIGTIFTIHNLAYQGPWRWFLERITWCPWFMEGHNVMAAAVQFADRVTTVSPTYASQIQTAGYGENMEGLLSYISGKMSGILNGIDTSSYNPENDRYIVENFNADTVEKRKTNKVALQEELGLEVNSGAFLIGMVTRLVEQKGLDLVIQIMDQFMSFTDSQFILLGTGDRYYETQMWQMASRYPGRMTTQILFNDALSRRIYSGADALIMPSRFEPCGISQMLAMRYGCIPIVRRTGGLVDTVSHNDPVGEGGTGYCFDRYEPLDFFTSMVRASEAFRYKDHWRRLQQRAMHQNFSWENSAREYIKVYEEVAGYYSYQPPTPEAEPETGVTT

SEQ ID NO: 2085 - protein, 530 aa, Arthrospira platensis C1
MSVSYFDTANQLLRKGQLDEAIASYNQAIAASPKSAWYYHNLGEALSQQGKIDEAIAAYRQATELNPNSAWSYDNLGTLLNQQGNLPEAVRCFRQAIELDPYFWQFYHNLALVLIKQGHPEEAVSLLQKAIELTADDAELYHSLGKAYHQQQQYSEAVTAYRQGLELNPYWSDCYMSLGQTLEALGETEEAIASYRRAYELNPNLSEALPKLQTVLESQGRWEELATLYRRCCIVDPNSATSHKYLGTALANSGKLSEAAESYQKALELDPNLVEILQPLGQVLTQLNQWEAAVDIFRKATQVDPNSASFYHQLGQALTKCDRLSEALAAYQKASELHPTSTPVLFDLGQVLTKLYHWSEAIATYQKALYLNPPNQAEIQTHLQEVQDKQRHLDEEIAAYSESHEFHPNSGESYETFGQFLRSKGKIEDAIIGFHQACILNPQSAVAHHQLGYTLARGQRWDEAIIAYQKAGELNPYSPHVQYHLGQALVEEGRLEEAIAHFKQSITIDPEFEEGYDALKQAIAKKKGSL

SEQ ID NO: 2086 - protein, 736 aa, Arthrospira platensis NIES-39
MTATTSKPVSAPEFCQGIQYFSETFPRLETYGQKPAIAEGTVAISDPKDPVAVYQTLLYADALRYLILQVTGSKASGHPGGFASQAEAYAALVMLGYKNIITEVGHHAPGFYSAVFLDRSLEDMEIYTVQQLRDRFREMHGLLGHLSGYIPGLLNPAGPLGQGQHFAMAAALLHRDKLFPFTLGDGGMGEPYPMSSMAHFNTAYPNVTNFLPILVWNGYSQEHHSMVSTKTNEEMIAYWKGNGFKEVLLVDAKDFDDQNQPGDYVDSTAFSIDRRMAFTQAVMETVDKAAKFALNGTLTVFIIKQLKGAGVHARGAKSHNLYPGDTLDSPHMIKALQERSLPVAAWELVRKNIERAGGGPASKTVVTEFEYPIADLGTLPLEEYTVGGDPKVATTAMGAIVGHVGQKDPHFLVTNADGNAASGINNINQALKIIHPTPDDIYFQGPNGQVYEPLSEDACAGMAAGLALMGARTLWCSYESFAINGLPIWQTVTQAMAELRHLTPSTITLFTAGALEQGRNGWTHQRPEIEAYFAAMLRNGNVFALFPPDANSIQVCYQWALNTKNKGITITASKSPLPIRTTFEQTRQGLRDGAVILEEVKGDKTVVFAVIGDMTLIPVFEAAAYLETEGIGTRIVSVINPRRLYRPTDVAWDTCSEADGDFISDELFENLFGGDALIGVTGGASLMLEPIMLRSNIRRDTFAWKRGETTSSAGQLMAFNGLTAETLTKRAIELIH

SEQ ID NO: 2087 - protein, 929 aa, Arthrospira platensis NIES-39
MLKALLGDPNARKIKKYQPVVTDVNILEEDVRSLSDEGLKAKTGEFKEMLAKAQNRGEREQILDEILPLAFAVVREASRRVLGMRHFDVQVLGGMILHKGEIAEMKTGEGKTLVSTLPAYLNGLSGHGVHIITVNDYLARRDAEWMGQVHRFLGLSVGLIQQGMGPEERKKNYSCDITYATNSEVGFDYLRDNMATSMEEVVQRPFNYCIIDEVDSVLIDEARTPLIISGQVERPSEKYMRAAEVAKGLQKDKDHYEVDEKARNVLLTDEGFAAAEEFLGVKDLYDPNDPWAHFVFNALKAKELFIKDVNYIVRDDEVVIVDEFTGRVMQGRRWSDGLHQAIEAKEAVEIQPETQTLATITYQNFFLLYPKLSGMTGTAKTEEAEIEKIYSLQVTVVPTNRPTARADLSDMVYKTEQGKWLAIATECAQMHNMGRPVLVGTTSVEKSELLSGLLSQQEVPHNLLNAKPENVERESEIVAQAGRKGAVTIATNMAGRGTDIILGGNADYMARLKLREYFMPRIVKPQDERELAIPQIGGGPRRNKPQGFAAADKPKVWKVAAGIFPTELSVDTQEKLRSAVDFAVSVYGERSVPELQAEDILAVASEKAPTTDVVVQRIREVYQAIVAEYEVFTHEEHNEVVSLGGLHVIGTERHESRRVDNQLRGRAGRQGDPGSTRFFLSLEDNLLRIFGGERVAAMMTAFQVEEDLPIESKLLTRSLENAQKKVETYYYDIRKQVFEYDEVMNNQRRAIYAERRRVLEGQDLKEQVIKYGEKTMDDIVEAYINPDLPSEEWDLETLVAKVKEFVYLLKDLAAEQLFDMTVEEIKTFLYEQLRNAYDIKEAQVNQIRPGLMRDAERFFILQQIDSLWREHLQQMDALRESVGLRGYGQKDPLVEYKREGYELFLDMMTDIRRNVIYSMFQFQPQPAVA

SEQ ID NO: 2088 - protein, 2483 aa, Arthrospira platensis NIES-39
MDEELFTTVFLEDDELQEISDDFEAETPFLLPIETVDDAAEVEITTTAAPVNPLSDVVNLRDFIIEQLFDEEVYLAQNPDLAQFKLELEAAGFEFNLREHFREFGKFEGREFSAFFSVTRYLEKNTDISLVINREEAFSHFLDFGLNEAREFSDFFSASFYAEANPDLAAITQETLVSKFAHFLGVGQFENRRCSRVFDANNYLQLNPDVSQLLQESANLGLQISAFSHFITRGRSENRQFSNIFDVSEYLQLNPDLVPFVESGEINAIDHWVRFGISERREFSLSFTVSQVLRTLSLSSLTEINISELFAQIESNLALIIESEDDVDDDVDDDVDDDIDDDVDDDVDDDIDDDVDDDIDDDIDDDVDDDIDDDIDATAPEIPQIPPLPVIPPIAEQPEPEPEPEPEPEPEPEPEPEPEPEPEPEPEPEPEPEPEPEPEPEPEPEEPELPLDVVLDVEHILTTYESQLQIAFEVQDVTTISTRELLDWLDENALEAGINPSPFVDIQFYVRTFGQQLTQFYSVTSVEELSYLQIVNFIEGEGLERGFSPSPNINFTHFKATYSSQIEAFFRTSIENITNAQLFSYIVEVGLEQGQSPSVLIDLNFVLSNQQSVTAIESHFGTEIANLTNAQIVRFISSDAGLQRVTPSTLVSLNYFRAVHRTRLEEFFGTEITEISNSQVFTFVNTIGLQEGLNTSAKLGFSYLQSVYGERITAALGEGASQQQVLAFIQREGLPENVNPSVFVHLDFVQQSQSQEVQQFFNVESATELSNQQVINSIKANVLVDVQYVVTQYAEQLAEFYEIEVEEVNSLSSEQVISFSLGAGANLGINPAPINFAETRELFETELRDFFRVSDVTVLSDSQVNSFVINQSRLSGRVNQLVDVVNVNYYQSIFSEALTATFGEDLTEENVVEFVFGDAAPAINTRFAKIKYKAALEQYAQSLGRTLETLTDDEVRLYLFTEGFDVENTLTPFNLEVVTTEYEIQLTAFYGVTNVAVLSEQQIYRFVVNQALEQGLSLAEVVDEEALEVLREEYSSLLIEFYGVENVETLSTNVVLDFIYGGLSRIVDYDYFRFTFTGDVEATFGVESISEVTKLQIVEYLYEQEVSVSSLHWFNVEAYLEEHGSAAETAIAQFFRVSSINELSVTQIRDFALNIGVQQFSIEGALNIEYIRETFNAAIVSSDLAVNAWLESFSFLNVDTAYVQSQLEGLLLDETLTLEQVNEILGTEIDSLDGLTDRHLITLVFNSDFQEIIGDVEIQLFQETLNIDYVRTVFASAIAHTLEVDITAVTGEEVLTVPNEQLDEFLLAQSEQIATELEIDADDVTLEVAQEWFITNSVTTVEGLSVEVDIAYIKYQLQQSLDDEQISLEDINSVLDEPVEEFDELTDEQIVTLGLNVEFQSQFSLEISLVQTELSIGFVVSQFSAELADFFGLSEAEFAAKEFTQEEIIEFFSSTQAQAIAEFLGETVVGGEDNDDLGDDQDIVDESNDDSDDDDQDIVDESNDDSDDDDQDIVDESNDDSDDDDQDDDSDDSPEFAAEDVLAYIEQLMVNVETVTQMEEIDIEFVTYQVGELFQASVFSLEDVNTILETEYESVDELTTEDITTLAFSVEFQEVLGEDFEIELVQSEVNYSYLRASQAEAIAALFSTEENPITVEDVLRGEIEPLTDAEILAAFEENFLTADVGFIRYQVEQLLAETTITIEQVNESLSLEESVEAIVELNDAQIINLVYNQEFQALLMEAEQTIELSAINYEAFIEANAETLIAQFEVDDVTELTLEQVHGFMFSGQVSIQGFVNFDYLRETFISAIASQELPDSTVLDWFNTDFSLININFLNAQFNGFTAEVQTQLLDSLGIELSEAESLSHQQLIQIFYSSEFQAITGIETLQTLAFDWQGYAQANAEALADFYQAFLVPAIPEGQAPNSVVVELSNFTGEQAQVTVTLEEVEGGIQVTVDSVEPIADINGVFFDIEDSSLLDSLSVTGDDVTNSSFSGDVKRVRNTSISPLKFDAGVQIGTPGIGQDDIQSTVFVITADGEELSLDQFVGQEFGVRLTSVQSGGSRSASSKLRGTAEAVFTADGDDVGVIDVSSLSAEQVLNFAFGQGWQSGIDPTEFVEVDFQRQQFAVEIARAYNIDVSEVASLESSLVLDYIYGGLSSQIDFEFYRTKYAASLESTFGMSAENLTRVQILEHAYTVGLEQGFNFVAIDYNAIAAQYPQVFADFFGIPVEEIFNLDLSIIQSFDLGIASELGIDITQFVDIEFFRQQASQQILQNYRIENVFRIDSQQLFEFSLQGNFSTAPTIDLNWAMTQYADILAENLADFDQDGDGNIDNSELFDALTGQLLEAGNETSDIYSFEQYFESEDVQEQVAEFFGVESFEDVTFTQRLEYMFGAGLQAGIDPYSEEFLEANPQMAMEIYLEENSTALIEFAGVRSINQVTFLDVYNFQAINEINAFSGISSIDDIDDIDDIVDDIIDDGDAFSV

SEQ ID NO: 2089 - protein, 72 aa, Arthrospira platensis NIES-39; identical to SEQ ID NO: 550

SEQ ID NO: 2090 - protein, 82 aa, Arthrospira platensis NIES-39; identical to SEQ ID NO: 593

SEQ ID NO: 2091 - protein, 92 aa, Arthrospira platensis C1
MKRYGKKREASYRIVAMDSLSRREGRPLEELGFYNPRTDETRLDTPAIIRRLKQGAQPTRTVRNILQKANVFEQLKSGVIAEPSIPEPVSQS

SEQ ID NO: 2092 - protein, 103 aa, Arthrospira platensis NIES-39; identical to SEQ ID NO: 533

SEQ ID NO: 2093 - protein, 127 aa, Arthrospira platensis C1; identical to SEQ ID NO: 540

SEQ ID NO: 2094 - protein, 144 aa, Arthrospira platensis NIES-39
MALSAGTKAPAFTAKDTNGNTVSLSDFAGKTVVLYFYPKDDTPGCTKEAQSFRDNYENYQSRDMVVLGVSTDDEASHKLFTEKYGLPFQLLADTDGAITKAYDVDGGGYAKRVTYIINGEGVIDHVDDKVNTSTHAQDILAKVN

SEQ ID NO: 2095 - protein, 149 aa, Arthrospira platensis NIES-39
MERTFLAIKPDGVQRGLIGEIIKRFEAKGFTLVGLKMMKASRQLAEQHYDVHKERPFFNDLVSFIISGPLVAMVWEGEGVIASARKIIGATNPLNAEPGTLRGDFGISVGRNLIHGSDAPETAQKEIALWFKDEELVSWEPSLKSWLVE

SEQ ID NO: 2096 - protein, 169 aa, Arthrospira platensis NIES-39
MRDAVTSLIKNYDITGRYLDRDAIDSLKSYFVTGTARVQAAATITANAAELVKQAASQLFGDLPELIRPGGNAYTTRRYAACLRDMDYYLRYATYALVAGDTDVLDERVLQGLRETYNSLGVPIGPTVVGIGILKDLATEKVQAAGIEVGAYLEQPFDHLISELSETDV

SEQ ID NO: 2097 - protein, 176 aa, Arthrospira platensis NIES-39; identical to SEQ ID NO: 514

SEQ ID NO: 2098 - protein, 181 aa, Arthrospira platensis NIES-39
MSVRLYVGNLPKELDRKELQAVFAEEGDTISAKVITDRKTGKCRGFGFVTVQSDDLADQIVEKYNGFMFGDNALKIERAQPRKKNKPESEEGRGSDGATATATATATATATPGAVNQSPTSSPTSAPTKSGGGKKKKSNRNQQGSSNANSSSNPESIQPDPRWANELEKLKQMLSAQASNS

SEQ ID NO: 2099 - protein, 198 aa, Arthrospira platensis C1
MIIPDQAQGMYLGQTATMTSPLKTIYQETIVPKLMEQFKYENIHQVPKVVKVTINRGLGEASQNAKALESSVNELAIITGQKPVVTRAKKAIAGFKIRQGMPVGVMVTLRSDRMYAFMERLIHLALPRIRDFRGISPKSFDGRGNYSLGVKEQLIFPEIDYDRIDQIRGLDISIVTTAQTDEEGRALLKEMGMPFREN

SEQ ID NO: 2100 - protein, 215 aa, Arthrospira platensis C1
MVEELMVEMHLLSVNVDFKYDPIYALGVVTAFDRFMQGYIPEADKLSIWAALIMAQESDPNQYRADATALEAQAATLSVKDLTERAKIAQESSGDDPLQSCFHAIANNPKFKYSRLFAIGLYTLLEKSDVTAAQDSEGLKTILSDFSEALRLPKDKLEKDLDLYRTNLEKVAQARLMVEEMTQAERKKREQRAAQSQTATSGSKNPSKDDQVSDS

SEQ ID NO: 2101 - protein, 212 aa, Arthrospira platensis NIES-39
MKLVIQGKNLEITDAIHEYVQQKIAKAVSHFQQLTNEVDVHLSVARNPRINPRQTAEVTIYANGTVIRAQESSENLYASIDLVADKIARQLRKYKEKRMAKQYQLPKTGEVVAQKPIVDDLIGDRTVKLPEEVVRTKYFAMPPMSIQEALEQLQLIDHDFYMFRNAETDEINVIYQRSHHGGYGVIQPRNGSVPTSNGKTGAELTERASTSP

SEQ ID NO: 2102 - protein, 216 aa, Arthrospira platensis C1
MTATQVSARELFRAAYENRYTWDADFPGYTADITYEHDGKVIHGRAKVGADMKAEVLDVADEAAQKAIHGQLWETAIHRVRRDFESVHGENTFSYGETDETGAVEIIIGGKGEGDRYQLRNNEVCMVHRHIHGVVVTIYTHSSHQTPEGYLSHRYDSVYHDPKTGEQKGEKSDFEDSYTQVGKYQILNQRIIHNPESGRSDRFTFSNIQLLNKATT

SEQ ID NO: 2103 - protein, 238 aa, Arthrospira platensis NIES-39
MTKKVSRRLQELQQKVEDRLYEPLEGLTLLKETATAKFVESVEAHIRLGIDPKYTDQQLRTTVTLPKGTGQEVRVAVLAKGDKVAEAQSAGADLVGSDDLIAEIQKGMLDFDKLIATPDMMPQVAKLGRLLGPKGLMPSPKGGTVTMDLTQAIAEFKAGKLEFRSDRTGIVHVMFGKVSFSAEDLLVNLSALQECIDRNRPSGAKGRYWRSVYVCSTMGPAIQLDINALRDLKIAEAA

SEQ ID NO: 2104 - protein, 241 aa, Arthrospira platensis NIES-39
MTTQSPSPNTTIINPMERPQVTQELSENVILTTVDDLYNWARLSSLWPLLYGTACCFIEFAGLIGSRFDFDRFGLVPRSSPRQADLLITAGTITMKYSPMLVRLYEQMPEPKYVIAMGACTVTGGMFSMDSTTAVRGVDKLIPVDVYIPGCPPRPEAIIDAIIKLRKKIANESFQERGNLQQTHRYYTRSHNLKVVEPILTGEYLESTTRQVPPKQLTEAIGMPVPPALQTEPMKKEEQRG

SEQ ID NO: 2105 - protein, 325 aa, Arthrospira platensis NIES-39
MTLLIVGATGTLGRQIARRALDEGYQVRCLARSYKKAAFLKEWGAELVPGDLCDPETLKPALEGVKVVIDAATARPTDSLSIKDVDWKGKVALIQAAKAAGVERFVFFSFLDAEKYTQVPLLEIKRCTEKFLAESGLKYTILRPCGFLQGLIGQFAIPILDGQSVWVPGVSSPIAYMDTQDIAKITIRALSVPEAENKTFPVVGSRAWTADEIIRLCERLSGKQARVTRTPNSIVRIVRKVTRFFQWSLNISDRLAFVEVLATGQPLKASMDETYQILGMNPEENTTLESYLQEYFGRIMKKLKELEYEREKQKKRKQKRSPFKS

SEQ ID NO: 2106 - protein, 391 aa, Arthrospira platensis C1
MDFGIGFLSNNLMLPILDFFYGIVPSYGLAIVALTLVIRFALYPLNAGSIRNMRRMKVTQPLMKERVDKIQKLYKDDPVKQREEMSRVYKELGNPLAGCFPLLLQMPILFALFATLRGSPFSDVNYAIDLQIFPQEQIEQIQPQIYKSKAQNVYVADGVHSSVQALIDTGNNLAVGQKTQVKFQTAQGESLQSKLDSYENPKVKPHWMVTKGEDKVQIDDEGNLVAVKPGEVTIQASLKGIAADKGFLFIDALGRVGAFDDDGNIHWDIVGMILGFGISLYINQVLSGQNQGSSGNPQQDTVNKITPVLFTGMFFFFPLPAGVLLYMLIANIFQTGQAFILSREPLPENLQKIVEESERQTGKKDKKDKKPGESGRASLPFEPGGHSKKKA

SEQ ID NO: 2107 - protein, 391 aa, Arthrospira platensis NIES-39
MRVLVTGGDGYCGWATALYLSNRGYEVGILDNLVRRHWDQQLGIETLTPIAPIQKRIQRWRELTGKSIDLFMGDINNYSFLINSLREFQPDSIVHFGEQRSAPFSMIDREHAVLTQSNNVMGNLNILYAMREEFPDAHLVKLGTMGEYGTPNIDIEEGYITIEHNGRKDTVPYPKQPGSFYHLSKVHDSHNIHFACKIWGLRATDLNQGVVYGVLTDETGMDELLINRLDYDGIFGTALNRFCIQAAINHPLTVYGKGGQTRAFLDIRDTVRCVELAIANPAEPGHFRVFNQFTEMFSVGDLAMMVKKAGVTLGLDVEIQNIENPRVELEDHYFNAKNTNLLDLGLQPHYLSDSLLDSLLNFAIKYKHRVDKNEILPKVSWRNPGSVYAKS

SEQ ID NO: 2108 - protein, 424 aa, Arthrospira platensis NIES-39
MYIDEIIAGEILDSRGNPTVEAEVILEDGTRGSALVPSGASTGEKEAAELRDGDPKRYGGKGVLKAVENVNNRIAPALVGMDVTQQRLIDLTMIELDGTPNKSQMGANAILAVSLAVARAAANYLGIPLYRYLGGSNACILPVPCMNVINGGVHADNTVDFQEFMIAPHNAPNFAESIRMGVETFHSLKSLLQKKGLSTGIGDEGGFAPNLKSNDEAVECILEAITAAGYKPGEDISICLDPATSELWKDGKYLFFKSDQSTKTPEEMAELWKSWANQYPIISIEDGMGENDWDGWKVLTNSIGDKVELVGDDLFCTNPAILAEGIQAGVANSILIKVNQIGTLTETLDTIELAKKHNYKCFVSHRSGETEDTTISDLVVATSTGKIKTGSGCRGERTAKFNQLLRIERDLGKAAKFAGRAAFV

SEQ ID NO: 2109 - protein, 446 aa, Arthrospira platensis NIES-39
MANVIVIGAQWGDEGKGKVTDLLSKSADVVVRYQGGVNAGHTVVVNGQTFKLHLIPSGILYPDTECIIGSGTVIDPKILIGELDQLQELGISTAKLMIAQTAHVTMPYHRLIDQASEERRGTRKIGTTGRGIGPTYADKSERTGIRVIDLMDSESLRSQLEWTIKYKNVLLEKLYDLPPVDPEAVITEYLGYAERLRPHVVDASLKIDNAVRKRHNILFEGAQGTLLDLDHGTYPYVTSSNPVAGGACVGAGVGPTMIDRVIGVAKAYTTRVGEGPFPTEMVDGIGQVLCDRGAEFGTTTGRQRRCGWFDGVIGRYAVRINGLDCLAITKLDVLDELDEIKVCVAYNLDGERCEDFPSDGRKFARCQPIYETLPGWKKSTAECRDLQDLPQQALDYLKFLAELMEVPIAIVSLGASRDQTIIVEDPIHGPKRALLDAKGQPVEHQS

SEQ ID NO: 2110 - protein, 473 aa, Arthrospira platensis NIES-39
MPTTAQEVLSMIQDQDIKVIDLKFIDMPGTWQHLTVYYDQIDETSFTDGVAFDGSSIRGWKAINESDMMMVLDPTTAWFDPFMAEPTLSVICSIKEPRTGEWYSRCPRVIAQKAVNYLKETGIADTAFLGPEAEFFVFDDVRFDQNQHSGYYFLDSIEGRWNSGREEPGGNLGYKPRYKEGYFPVSPTDTMQDLRTEMLLTMAQCGVPIEKHHHEVATGGQNELGIKFGTLVEAADNLMVYKYVIKNVAKKYGKTVTFMPKPVFNDNGSGMHTHQSLWKDGQPLFAGDGYAGLSQMALHYIGGILKHAPALLALTNPTTNSYKRLVPGFEAPVNLAYSQGNRSASVRIPLAGDSPKAKRFEFRCPDATANPYLAFAAMLCAGIDGIKNEIDPGEPLDVDIYDLTPEELRKIPSTPGSLELALEALENDHAFLTDCGVFTEDFITNWISYKLDNEVNPMRLRPHPFEFSLYYDC

SEQ ID NO: 2111 - protein, 548 aa, Arthrospira platensis NIES-39
MIETSSPLGIGIANLSHLTLAQENSSPNPVDELMNFRMGDISLVDFGAAILILLVGYLVALFAASLVKKLLKKTDIDNKLVSWISGSTEGGEDFPVEKWAGTLVFWVIFIFAIIGFFDRLQLTSVSAPLTTLLNEITRYLPRILGAAGLLAIAWVFATICRTLMIKFLDMFRLDERLNQQVSHGESESHFSLSHTLGNAIYWFIFLLFLPMILSTLELAGLLSPVQTMVNQILSSLPNILKALVIAAGGWLLAQIVSRIVTNLLAAVGFDRLSNQLGLQRAMGTTSLSSVLGTIVYVVLMIPIAISALQALQINAISDPAISMLNQIFNVIPQVFIAGVVLVLAYMFGVIVRDLVTNLLTNLGFNNIFMWLGVESKAIPVATETQTTEEDEVIDDKSVSSPAKQTPSEIVGVIALVGVMFFAVVTATDILGLTALTLIIEQLLIIAGRVLLGVIIFGIGLYFANLAHNLISSSGTSSAKLLAQAARIAIIIFVGAMALQQMGIASDIVNLAFGLLLGAIAVAIAIAFGLGGRDVASEQIREIISRLKQ

SEQ ID NO: 2112 - protein, 596 aa, Arthrospira platensis NIES-39
MSLPIRNVAIIAHVDHGKTTLVDALLKQSGIFREGEDVPDCIMDSNDIERERGITILSKNTAVRYGETLINIVDTPGHADFGGEVERVLGMVDGCILIVDANEGPMPQTRFVLKKALEKGLRPIVVINKIDRPRAEPYGAVDKVLDLFLELGADDDQCEFPYLFASGLAGYAKQDLEEEGVDMKPLFEYIIDHVPPPVGDPEKPLQLQVTTLDYSEYVGRIVIGKIHNGVIRAGQQAALVKENGEVVRSKITKLMGFEGLSRIDLESSSAGNLVAVAGFSDANIGETITCPNEPQALPLIRVDEPTLQMAFSVNDSPFAGQEGTYVTSRQLRDRLMRELETNVALRVEETDSPDKFMVSGRGELHLGILIENMRREGYEFQVSQPQVIYREVSGQPCEPFEYLVLDVPEEAVGSCMERLGQRRAEMQDMRMGVNGRGQLEFVVPARGLVGFRGEFMRMTRGEGIMNHSFLEYRPMSGDIEARRNGVLISFEEGVSTFYALKNAEDRGVFFITPGTKVYKGMIVGEHNRPQDLELNVCKTKQLTNHRSATGDELVQLQTPMDMSLERALEYIGPDELVEVTPESVRLRKVSKKLVKR

SEQ ID NO: 2113 - protein, 720 aa, Arthrospira platensis NIES-39
MQEIDKSISFDGRDIRLKIGLLAPQAGGALLVESGDTSVLVTATRAEGRPGIDFLPLLVDYEERLYAGGRIPGGFLRREGRPPDRVTLTSRLIDRPLRPLIPGWIRDDIQIVATTLSMDEQVPPDVLAVTGASVAVLLARIPFYGPMAAVRVGLVGDDFIINPTYKEIRNGDLDLVVAGSPQGVVMVEAGANELPEHDVIEAIDFGYEAVMDLIKAQTEIMQELNIDNPVEEPLPEDRTLIEFIQERVTEPVKKVLGQFELNKDERDAALDVIKEEQIVSAIASMPEDDPISLFNIENPKAVGMIFKDITKKLMRQQILTDGVRVDGRNLDQVRPVSCRVGLLPKRVHGSGLFNRGLTQVLSIATLGTPGDAQDLDDLHPQDEKRYMHHYNFPPYSVGETRPMRSPGRREIGHGALAERALLPVLPSKEQFPYVIRIVSEVLSSNGSTSMGSVCGSTLALMDAGVPITKPVSGAAMGLIKEGSEVRILTDIQGIEDFLGDMDFKVAGTDSGITALQMDMKITGLSLDVVADAIAKAKPARLHILEKMLEVLPSPRPDLSPFAPRLLTLKIDPDLIGLVIGPGGKTIKGITEETGVKIDIDDDGTVTIASTDSENAARAYQIVQGMTRKLNAGDVYVGKVTRIIPIGAFVEVLPGKEGMIHISQLAEYRVPKVEDEVAVGDEVIVKVREIDPKGRINLTRLKIHPDEAAAAKAAASSGTVQ

SEQ ID NO: 2114 - protein, 748 aa, Arthrospira platensis C1
MSSFEDYNKMTSANPYEINDQQYQGIGVPEESLGSILQRGGEELAITKVPGRFTVRLVSTPPVGGAGVSPLPGQADGLTPKQPVTDSGPQFTPVVSEAENLENLPIHIEETSSVPPELQEVKVKDTELDQAMELARQSDRVAFASHVYQADNNPGMVMYLTNQITIQFNEDVEESNRNAIANSQGLRLLKSVYGVPNTFVYEVIRQAKENPIKIANRLTWNPEVLVAEPNIVVKSQKYYRPSDPLYPRQWYLHNTGGADVAPDAHISVEPAWDITRGTRSIVVAITDDAIDLNHPDFQGIGKIVAPIDLKGQNRLPSPQSPSDNHGTACAGLAIAEENGKGIVGVAPGCALMPIRTTGYLDDESVERIFDWAINNRASVISCSWGASAVSFPLSIRQQAVITKAATVGRNGRGCVVLFAAGNANRPINGTINESGWPNNVISGRVRWLSGFAVHPDVISVSACTSLNKKAAYSNWGTGITVCAPSNNAPPGMWLQETGYIGTPPAIRTALRGLGVFTTDRVGAAGYDQGDFTSHFGGTSAATPLVAGVAALVLSVNPDLSAREVRRIIEQTADKIVDPDADPQLGISMGTYDGNGYSQWFGYGRVNAEKAVKMAQSQRVSRQQVQRRVEQSNNRVLNIPDHNPQGVTSTISVANTSPILDIQVTVDIEHQFLGDLEVRLIPPHGEEVLLQGRTLGGNKVLKTTYNLQTTPYMRELLNHSPQGTWRLVVADLAPHHTGKLNGWKLDLGL

SEQ ID NO: 2115 - protein, 870 aa, Arthrospira platensis NIES-39
MIEAYRQQAAERAQQGIPPLPLTAEQTSELCELLKNPPSGEKEFLMELLRDRIPPGVDEAAYVKAGFLTAIAKREISSPLICPQGAIDLLGTMVGGYNVQSLVSFLKSSDSNIASEAANALSKITLVFDAFNDILALSDINPYAKQVLDAWANAAWFIRNPKVPKAITVTVFKVPGETNTDDLSPAPHATTRPDIPLHALAMLESRMPEGIQTIAQLKQKGYPVAYVGDVVGTGSSRKSAINSVLWHIGEDIPFVPNKRRGGYILGGKIAPIFFNTAEDSGAFPIECDVSKIETGDVITIHPYKGEITNEAGEVISTFTLKPETILDEVRAGGRIPLLIGRSLTDKTREAMGLTPSELFARPAMPEDTGVGFTLAQKMVGKACGLPGVRPGTSCEPIMTTVGSQDTTGPMTRDELKELACLGFSADLTMQSFCHTAAYPKPVDIKTHKQLPDFFATRGGVALRPGDGIIHSWLNRMLLPDTVGTGGDSHTRFPLGISFPAGSGLVAFAAALGAMPLDMPESVLVRFKGQLQPGVTLRDIVNAIPWVAMQQGKLTTGKENKQNVFNGRIMEMEGLPDLKVEQAFELTDATAERSCAGCTIKLGTETISEYLRSNVALMRNMIARGYQDARTLTRRIAKMEQWLANPELMEADPDAEYADILEVNLDEIVEPIVAAPNDPDNVKLMSECAGDKIDEVFIGSCMTNIGHYRAAAKVLEGAGPVKVRLWICPPTRMDEQQLREEGVYGTFAAAGARTEMPGCSLCMGNQARVEDNTTVFSTSTRNFNNRMGKGAQVYLGSAELAAVCALLGRIPTVEEYMEIITQKIDPFAGDLYRYLNFDQIAGFEDEGRVIPIEQMPKIEDVLGIPAGALSN

SEQ ID NO: 2116 - protein, 2135 aa, Arthrospira platensis C1
MGKALALREKWSEAAIELRQAIALDNDWLEPQRELARVLVQLSAWDEAAGVLRGVAEESPEDSQTRHLLGDALSKLERWEEAVEAYRGAIALEPDFVWSHNNLGDALRQLERWEEAAEAYQNAIALKGDFVWSHNNLGDALFKLERWDEAAEAYQNAIALDKDSLILQRNLGKVLVKLSAWEEAVTLWQQVAEKSPNDSEVWHLLGDALSGSERWSEAVAAYQNAIGLNPEFSGSHNNLGDALLKLERWSEAAEAYQNAIGLNPEFFWSHNNLGDALLKLERWSEAVAAYQNAIGLNPEFFWSHNNLGDALLKLERWSEAAEAYQNAIAWRDDLPWSHYNLAEALVKLERWEAAVKAYKRAMEIQPDLPCIYEKLGDALRHQVPPNLEEISQVYYKAIEANPNNLEVYYKALEVNPKDAQMSLKLADAFRSQGQLDQAVTFYKNTLQLTPEDVDIQVLALHRLGSISQNRGHLEEALGLYRRCGELSPGVDSGLAVAAVLEKLGRWTDAVDQYRQVVLEFGECGPASLGLGRALAELERPVEAVVEWRRAVKLGVETPEVHRLLAETLVELGRWSEVVEHWKWLLERYPGAVDWRRRLALALMGLGRWTEAAAQWGEYWRVAPGSGRGRVVDFRPQKKTHGEIDHSQELSITGDLTVEFWLYLRDWPKSWTDIISKFVNDKQNEFCFRLKDDQKGQWYYGKGEAVAKQVNWVPQEDMRLHEWVHVACVRKVGQYGRIYFNGVLRREADWSGESEAAGTEAPVWLMASTQWQLFHDGKLSEVRLWNRARSGDEIREGMCEGLTGEEPGLVGLWHGDESDEGVLVDAVGHHHGRLVMAADAGKERPRVGVCGWELSHNAAGRAYTLAQLYGGFTEVELIGCLYPKYGGQVWEPIRGGEIRCHTIRVEDEGRFIEQALGLVLAHPYEVVHLSKPRIANIILGLLYKLVWGARVIVDIDDEELIFVRASEPVDLRELLESGERLPKWKHLQGKEWTRIAVGLVREFDGVTVSNPALQERYGGVVIRHARDEARFVPSADLKRRSREGFGIAQDKKVVLFFGTPRKHKGLVTTARALGSLGRKDVVFAIIGDFEDGKLKEELQGIPGVDYVFVGNQPFESIPDVVAVGDICVLLQDADFRVSQFQIPAKLSDALGMGLVVLLSETAAVADVIESGAVVPVAEGDLPAVLDRVLSDEAECNKFRVRGRELLAAEFGFGVNGSRLAEVMDEVRSGVGVLSDELNLLLAGFPAVGSVLPKWTKNKIAHKTDRESYALNRLSSIMSFINRDNNELVTQRYVNTPHKKLPITVLIIAWDVGHNPLGRSYMLAEVVERVVSNTLLIGFQFPRYGDDVWEPVRNEKVPVITLPGLNLPEFHVSLQRIAKRIRPDVVIACKSRLPSVELGLMIKEECNCPLIIDIDDYELSFFQNRTELTLSDIEAMPEASVATDIEPYAEIWTRLAQNLARTADEIIVSNIALQFKFGGTIIPHVRDENTCNPDLYDSSEVRGRYGIPLNFKVVLFFGTPRLHKGVDRLAQAINAIADPNFRLVIVGSAPDHNVIEKLDTIAPGRIIYLPTQPFSHIPEILSMADVVCLPQEERHIISNYQLPAKAIDAISMGVPLLVSNTLPLMELVDQGLAKLIDPNDLSGCIEEVVKNSVTDQQYESNLRSRFIQFYSYDAAAQKMRQIIQRSLIVKPWQFVPKTNRIISASTHVLGSAAEISQKQSHEGTDIIVFWKQNDTGIYGRRHDMVIKYLASRQDVRKVIVFDAPISEFELVQKKSSKSEINQDRLIYTMTYEKLLGKHDTEKISYNIFVYPPGKYYIHQVQAGRTHINSGYLFYLQEVFRRESVNTNQAIFWIYPKNYLAPEVIKKFDPAKVVVDVVDDHRSWPNISDIEKSNINKNYHEILALADLVFTNCQQVYLSMKQFAPSDIRLVPNGCDSTIPVTPPKNSRKFDKFCSYPGKIIGYIGNLESKIDLKLLEKLAKKFDDCQIVLIGSAHTNPSVLKLKQYSNIFMPGVIPYSEIGSWVSRFDVGIVPHLNTELTKSMNPLKVFVYLSLNVPVVSMQIDNIDQTSKMLYVAKSHEEFITLVATVLDMKRPSADLSARYLAKNNWEERLGTHVNQLLFETKKHVKNVVDRRRIC

SEQ ID NO: 2117 - protein, 67 aa, Arthrospira platensis
MRVFKVTACVPSQTRIRTQRELQNTYFTKLVPYDNWFREQQRIMKMGGKIVKVELATGKPGTNTGLL

SEQ ID NO: 2118 - protein, 93 aa, Arthrospira platensis NIES-39; identical to SEQ ID NO: 638

SEQ ID NO: 2119 - protein, 103 aa, Arthrospira platensis NIES-39; identical to SEQ ID NO: 532

SEQ ID NO: 2120 - protein, 103 aa, Arthrospira platensis NIES-39; identical to SEQ ID NO: 534

SEQ ID NO: 2121 - protein, 128 aa, Arthrospira platensis C1
MTYAIIETGGKQVRVEPGRFYDVESLPVDQDEKLTIEKVLLVQHDGNVHIGQPLVAGAIIEGTIVRHFRDRKVIVYKMRPKKKTRKKRGHRQEVTRLMIDSITLNGEVLASREQSENPTSEPQAATAE

SEQ ID NO: 2122 - protein, 124 aa, Arthrospira platensis NIES-39; identical to SEQ ID NO: 561

SEQ ID NO: 2123 - protein, 132 aa, Arthrospira platensis NIES-39
MKYFVSRLVALLMVVTVALVGCGNSPDGLTGNYSQDTLAVVNSLRTAIALPEDAPEKPAAQAEARTLINSFASRYRRDPAVSSSSSFTTMRTALNALAGHYSSYPNRPVPDKLKQRLEQEFKQVEAAVKRGA

SEQ ID NO: 2124 - protein, 156 aa, Arthrospira platensis NIES-39
MRLQDAKPKAGSQKRRRRLGRGVSAGQGASCGKGMRGQKSRSGGSTRPGFEGGQNPLYRRLPKLKSFPLINRKQYTTINVGRLDSLSANSEVTLSSLIAAGIITTDRGPLKILGDGELNVALQVKAAAFTQSARSKIEAAGGSCEVLGARNTSPEG

SEQ ID NO: 2125 - protein, 161 aa, Arthrospira platensis C1
MIHSTILLAVEEAATESSLFDFDATLPLMAVQFLILAAILNQIFYKPLGNAIDSRADYIRQNKLSAKERLSKAESLAKQYELELAETRKESQQLIINAQAEAQKIAAREMAAAQQEAQKIREAAYQEIEQNKIEARKGLEQQVDSISRLILDKLLGAGMIG

SEQ ID NO: 2126 - protein, 164 aa, Arthrospira platensis NIES-39
MATLTVWKYNSADGAKNALTKLAELQKQRLIQIEDAAIVFWPQGRKKPKTTQAVDLVGSGAFGGAFWGLLFGLIFFVPVLGMAVGALAGALSGYFTDYGIDDDFIKDVRNQVTEGTSALFLLTSSVTLDKVEEAFKDEEKGELIKSNLTNEQEAKLREDFGADE

SEQ ID NO: 2127 - protein, 156 aa, Spirulina platensis
MSRRRVVQKRPVPPDSRYNSRLVSMMVRRIMRHGKKSVAHNIVYDALATIEERTGSDPLELFEKAVRNATPLVEVKARRVGGATYQVPMEVRSERGTTLALRWLIHFSRTRSGRSMASRLASELMDAANETGSAVRKREETHRMAEANKAFAHYRY

SEQ ID NO: 2128 - protein, 177 aa, Arthrospira platensis C1
MVDVFCHNGLLNRLCFVQIGADFKKTILVMKRYRSILACVLAFVTAFVVGCSSPVAVEPPSYSSIQLEKIQEYKSNIAAIRDRSTTELAGYIQKGDWINIDNFAHGPFGTVLQEMNYVVRNLLPNEQPEARKLSREVFEHLQDMSEAAAKADRQQAAISYQEALKDLDLFLSKFPQV

SEQ ID NO: 2129 - protein, 177 aa, Arthrospira platensis C1
MVNLVLLATEASHEGGFGLNFNLFETNLINLGIIIGLLVYYGRGFLNKILSERRAQIEQAIQEADQRLKEAEKALAEQQENLAQAKAEAERIKASAVERAEVIREQIAARAKADVEQMKLTANQDLEAERSRAIAQLRALAVSQALERAEGQIRERLDENSQQQLVDRSLALLGGGS

SEQ ID NO: 2130 - protein, 240 aa, Arthrospira platensis C1
MVSLGLEDKVIIVTGGARGIGAAIVKLLVEFGAKVASIDVIDGETPPGGLALKADVTKLDSMESAAKEIGEKLGTVYGVVANAGITRDNFFTKLTDEDWDQVIAVNLKGVKNTIQPFIQGMYDQNAGSIVAISSISGDRGNAGQTNYASTKAAVIGMMKSIAREGARFNVRANAIAPGFINTEMTQKIPDKVRDKITAEIPFRRFGEPEDIAWAVAFLLSPVASSYVTGEVLRVNGAHHT

SEQ ID NO: 2131 - protein, 234 aa, Arthrospira platensis C1
MNAKKGIIKRSDLIGRLVLDRQSVEQLGHIEEIAADLNSNQVIGFTTKSGMLPVGGKKRAFSWQQIETIGVDAVLVNKSSDEGNFILPENADSSINHEVWTNAGKKVGVLVDYLIKNDTGTVTNYLFKTDGGLRGILQGVYIMPASAMTSAGSKRVIVSESMVENPPQYTEGLDQKIRQAAEFLQEDLERTLSDLEGLKQEAQKLSKSLERVADQDDREDDSEKVGSKDSSQPQ

SEQ ID NO: 2132 - protein, 241 aa, Arthrospira platensis NIES-39
MRKIIIAGNWKMYKTQAEAQEFLKGFVMELEDTPEEREVVLCVPFTDLGVMSKSLHGSRVRLGAQNVHWEDSGAYTGEISPLMLVEIGVRFVVIGHSERRQYFGETNETVNLRLKAAQNHGLTPILCVGETKEQRDAGETESHIFSQLEEGLVGVDQNNLVIAYEPIWAIGTGDTCESEEANRVIGLIRGKLSNPNVTIQYGGSVKPDNIDEIMAQSEIDGALVGGASLQADSFSRIVNYR

SEQ ID NO: 2133 - protein, 254 aa, Arthrospira platensis C1
MSQPFLTINDNDSLTLSQSLQYLQNSGKLQDFLANILRQYVIDKELQSRDEVNSNAAAIEQAVINFRLERNLSDPQAFQTWLDENRLTYKSFHDQVSNGFKRETLKLAVVKENLEEYFQERKPFLDSVVLSRIVVDDYEMAESLKSKIASGEGSFEALAREYSLTTERRVNGMMGAVSKATLPDTLKSTIEGAKVGQIIGPFEVEGRWCLFRIEEFIDVTLETKGIKKQLQDELFDRWMNEQLKTLTVKMQIGD

SEQ ID NO: 2134 - protein, 288 aa, Arthrospira platensis NIES-39
MSQVVDPTEFQVVFTANGAVIVGSPNQSNRIRGTADAIRIQGGDMADTLTAGDNPNMVIYGFSGNDSIVGGEGGNELYGNQGNDTIYGIAGNNLIYGGQGDDLIYGGDGNSSLSGDKGNDTLVGGSGNDIMRGGDGDDLLIGGDGNDLLFGEKGNDTLQGGPGNDTMYGGQGDDLIQGGDGNDFLAGDKGNDTLTGGAGADTFALTANPNLSRDVITDFNSAEGDVIALRAGAGYNLDSFQTVATAADAGGLGGLVYIQSTGVLLFNGEEVAEFLGSPDITASDFELF

SEQ ID NO: 2135 - protein, 283 aa, Arthrospira platensis NIES-39
MINKILVAVAGRGLCEEMLNMLMDLPSLQQASITLLHVVPSQVTAEGMSVKLEEGGKILAQAVQSVKVDPNRVNPRLKQGDPKDIVCQVADEENADLIIMGSRGLGRLQAVLENSVSQYVFQLTSRPMLLVKDDTYVKKLRRVMVAYNSSPEAQECLKTAIDFVKEIQGGQLIIAHVNKDLSGKSAEDYTATAENDPVLAPAVAQAKQMGVSYRCVTGTGKPGPEICRIAEDLNADLLLLGSPDRRPTVAKSFIDIDRLLGNSLSDYVRVYANCPVLLTRHAG

SEQ ID NO: 2136 - protein, 307 aa, Arthrospira platensis NIES-39
MESLKGRDLLSLADLTVAELHSVLSLGIQLKSGMRKLQRRKVLGLMFSKASTRTRVSFSVAMYQLGGHIIDLNPSVTQVSRGEPLVDTARVLGRYLDAIAIRTFAQKDLETFASYAEIPVINALTDREHPCQVLADLMTVQECFNRMAGLTLTYFGDGANNMAHSLLLGCAMVGMNIRIATPSQYPPNPEIVEQAKAIAAGKTEVIITDDPAEAAKGSHVLYTDVWASMGQESEADDRIPLFMPFQVNESLLAKADDDAIVLHCLPAHRDEEITDGVIEGVRSRVWDQAENRMHAQKALLASLLSDD

SEQ ID NO: 2137 - protein, 329 aa, Arthrospira platensis C1
MSNTDRFAILRRGIGATLRVLLVAVATAGLFLAGDLVLPQSAAAYPFWAQETAPETPREATGRIVCANCHLAAKPTEVEVPQSVLPDTVFKAVVKIPYDTNVQQVLGDGSKGALNVGAVLMLPEGFKIAPADRIPEEIAEEVGGLYFQPYSADQENVVIVGPIPGDQYQEIVFPVLSPDPATDKSIHFGKYAVYAGGNRGRGQLYPAGNASNNTVYKASVGGTITKITQEEYVGYQVTITTAEGDSVVETVPPGPELIVSEGQPVAAGDSLTNNPNVGGFGQDDTEIVLQSSTRIQGLLAFFALVMLTQILLVLKKKQVEKVQAAEMNF

SEQ ID NO: 2138 - protein, 327 aa, Arthrospira platensis NIES-39
MAQTLLFNALRQATDEEMARDPAVLVLGEDVGHYGGSYKVTKDLHKKYGDLRVLDTPIAENSFTGMAVGAAMTGLRPIIEGMNMGFLLLAFNQIANNGGMLRYTSGGNFKMPLVIRGPGGVGRQLGAEHSQRLESYFQAVPGLKIVACSTPYNAKGLLKSAIRDDNPVLFFEHVLLYNLKEDLPEEEYLVPLDQADIVRSGKDVTILTYSRMRHHVMQAVPAMVKQGFDPEVIDLISLKPLDLNTIGESIRKTHRVIIVEECMKTGGIGAELTASINDNFFDELDAPVLRLSSQDIPTPYNGMLERLTIVQPEQILEAVQNMLSHQV

SEQ ID NO: 2139 - protein, 381 aa, Arthrospira platensis NIES-39
MKIAIAKELNVNERRVALIPDVVSRLVKQGLEIYVEAGAGEGSCFSDALYEEAGAQVITDSAKLWGEANILLKVSPPQEEEVGKMAEGAVLIGFLNPLGEPDLIQKLSDRRVTAFSMEMVPRTSRAQSMDALSSQANIAGYKAVLIAAANLPKYFPMLTTAAGTIRPAKVLVLGAGVAGLQAIATARRLGAIVEAFDIRPEVKEQVQSLGAKFVDVTLDEDTVAEGGYAKEISEQAKQHTQEVLTQHVAASDVVITTAQVPGKKAPVLVNANMVAQMKPGSVIVDLAAEQGGNCEGSEPGKNIQKNGVTIMGPINIPGSMPVHASEVYAKNLSALLQLMVTKEGELDLNFADDILDGACVTHGGEIRSQRVKEALGVPVGQ

SEQ ID NO: 2140 - protein, 376 aa, Arthrospira platensis C1
MAGDYYDVLGVSRDADKEEIKRAYRRLARKYHPDVNKEPGAEERFKEINRAYEVLSEPEIRARYDRFGEAGVSGAGAGGYGQDFGDSFADIFESFFSGFGGGMGGPTAARRRTGPTRGDDLRLDLRLEFKEAIFGGEKEIRIRHLETCETCNGTGAKPGTSPKTCSTCGGSGQVRRATRTPFGSFTQVSVCPTCNGTGQMIEEKCVSCGGEGLKEVTKKLKITIPAGVDNGTRLRVSNEGDSGKRGGPAGDLYVFLSVDSTPNFKRDGINILSEVKISYLQAILGCTLEVETVQGTTSLTIPAGTQPNTVLTLENQGVPRLGNPVSRGDHLITILIDIPTRITNEERELLEQLAQIKGERTGKGGLEGFLGNLFQK

SEQ ID NO: 2141 - protein, 406 aa, Arthrospira platensis NIES-39
MTLRVAVVGSGPAGSSAAETLVKAGIETYLFERKLDNAKPCGGAIPLCMVSEFDLPPEIIDRRVRKMKMISPSNREVDINLENENEYIGMCRREVLDGFMRDRAASLGANLINGTVHKLEIPASSGEPYTIHYNDHSSGDAVGTAKTLKVDLVIGADGANSRVAKAIDAGDYNYAIAFQERIRIPADKMAYYEDRAEMYVGNDVSPDFYAWVFPKYDHVAVGTGTMKVNQAMIKKLQAGIRARAAHRIEGGKIIKVEAHPIPEHPRPRRVVGRVALVGDAAGTVTKSSGEGIYFAAKSGRMCAETIVETSNAGQRIPTEDDLKLYLKRWDKQYGMTYLVLDVLQRVFYRSDASREAFVEMCSDLDVQRMTFDSYLYKTVVPANPLVQMKITAKTLGSLLRGHALAP

SEQ ID NO: 2142 - protein, 427 aa, Arthrospira platensis NIES-39
MSDTNLDILAQSDPTVTEFIGQELQRQREHLELIASENFTSAAVLAAQGSVLTNKYAEGLPKKRYYGGCEFIDKIEQIAIDRACELFDATHANVQPHSGAQANFAVFLALLQPGDTIMGMDLSHGGHLTHGSPVNVSGKWFNVCHYGVSPETETLDYDKILELAKQHQPKLMICGYSAYPRIIEFDKFRAIADEVGAYLLADIAHIAGLVATGHHPNPLPHCHVVTTTTHKTLRGPRGGLILTRDPELGKKLDKAVFPGTQGGPLEHVIAGKAVAFGEALKPEFKTYSSQVIANAQALANCLQQRGLKIVSGGTDNHLMLVDLRSVKMTGKIADRLMSEINITANKNTVPFDPESPFVTSGLRLGSPAMTTRGMGTSEFIEIGNIIADRLLNPDDDTVTADCRARVAQLCDRFPLYPHLQIKVPALT

SEQ ID NO: 2143 - protein, 474 aa, Arthrospira platensis NIES-39
MVLSLFGIISPFSMFSSLGVDPVPLLANTIEGISEAPEADGNIVLLAVLLSLVAIYTASKVGGEFFNWLGFPPVLGELVGGVVIGISALHLVVFPEGGVGASDSVIMQILSSTAGLDISAAGATFEAQSEVISVLAEIGVIVLLFEIGLESNIRELLEVGVQSLVVAIVGVVAPFFAGTIGLILLFNVPPVAAIFAGAALTATSIGITSRVLAEIGRLSSKEGQIILGAAVMDDILGIIVLAVVASLAKTGEIDVTNIIFLIISATVFLVGAILLGRFFNDTFVTLAKQFKTRGRIVIPAFILALLLSYIAAAIGLEAILGAFAAGLVLDETEPGKELEELTRPISDVLVPIFFVTVGAKTNLEVLNPAVPDNRQGLVIASFLIVVAIFGKVISGFSVFGVENINRLAIGVGMIPRGEVGLVFAAVGSDSGALSPSLDVAIILMVILTTFVAPPLLRVVFRDDEPTATEPETTA

SEQ ID NO: 2144 - protein, 503 aa, Arthrospira platensis C1
MVLSDVPFLVNNDCENDCEYNRTRRVIVSQGFDYDLVIIGAGVGGHGAAIHAVNCGLKTAIVEADLMGGTCVNRGCIPSKALLAASGRVRELRNAHHLQSLGIQVGAVNFDRQTIANHAENIVTKLRSDLTNSLKRLKVDTFHGWGKVAGPQKVAIATGDGEKIITAKDIILAPGSVPFVPPGIEIDHQTVFTSDDALKLSSLPQWIAIVGSGYIGLEFADIYTALGCEVTMIEALDNLMPTFDPDIAKLAERVLLSSRDVETFSGKLALKVTPGSPVLIELADAKTKQVEQVLEVDACLVATGRIPVSKNMGLETVGVETQRGFIPVDNYLGALSGTKRVPHLWAIGDVTGKMMLAHAASAQGVAVVETICGRDRQVDYLSIPAAAFTHPEISYVGMTEPAAKELGKSQGFEVATVKSYFKGNSKAIAEVDTEGVAKVIYRQDTGELLGVHIFGLHASDLIQEAANAIALRQSVNTLTFLVHTHPTLSEVLDEAYKRAATIG

SEQ ID NO: 2145 - protein, 540 aa, Arthrospira platensis C1
MVNPLQLQFISPTMPKVLVSDPIDQVGLDIISQVAQVDVKTGLPAEELVKIIPEYDALMIRSGTRVTKEIIEAGTQLKIIGRAGVGVDNVDVPAATRQGIVVVNSPQGNTIAAAEHAIAMMLALSRHIPEANVSVKSGQWNRKQFIGVEVYKKTLGIVGLGKIGSHVASAAKAMGMKLLAYDPFISQDRAEQLGCRLVDLDLLIRESDYISLHMPKTEETYHLINAQALAQMKPTARIINCARGGIVDEVALAEALKNDQIAGAAVDVYENEPLEENSPLRELGQKVILTPHLGASTEEAQVNVAIDVAEQIRDVLLGLPARSAVNIPGLYPDALEQLKPYLQLAETLGNLVSQLVGGRVDFLDIRLQGDLANRDSKPVVVAALKGLLSQALRERVNYVNATIEAKERGIRVIETRDASVCDYTGSLHLEAKGSLGTHSVTGALLGDREIRVTNIDDFPINVPPTRYMLFTLHRDMPGIIGKIGSLLGSFNVNIASMQVGRKIVRGEAVMVLSLDDPLPDGLLSEIMKVAGIRDAYTVTL

SEQ ID NO: 2146 - protein, 502 aa, Arthrospira platensis NIES-39
MKSSLVILYHREPYDEVIENGKIHYRAKKSPNGIVPTLKSFFANVNQGTWVAWKQVTAKQKADFQERVEVEDEGNYTVRRIALNADQVKHFYHITSKEAFWPVLHSFPYHFTSETADWENFTTINRLFAEAACEEAADDALIWIHDYNLWLAARYIRELKPDARIAFFHHTPFPSVDVFNILPWRQEIVESLLCCDLVGFHIPRYSENFVNVARSLCEIKVVKREPVAPHLTKVGTALAEPEMVSQLEYKGQIVNIDAFPVGTNPGFIESVLEKPEGQSRLTAINEELGDRKLILAAGRVDYVKGNRQMLEAYERLLERRRDLHGKIQFLMTCVSAADGMRVYKTAQHQIEQLVGKINGRFARLDWMPTLLFTQPIPLPDLFSYYRLADVCWTTPLRDGLNLVAKEYVVAREDRGGVLVLSEFVGAAVELPQAVLANPYSTQRMDEAIEFALAMDPEEQKRRMAEMRKTVVKYDVKYWADHVFERFESMTHQKAAVKTTVAV

SEQ ID NO: 2147 - protein, 707 aa, Arthrospira platensis C1
MPDKKSESQVLIMTGMHRSGTSLTASLLQSAGLHVGRRLMQGTEFNPKGYFENIDFFEFHLDLLRSQGVNIDGWTLQENLDVPDEFIDKANAIVDKNSLSHIWGWKEPRTTLFLDFWAQLLPDAKFLLIYRSPWDVIDSLYRRGDEIFRNQPELAVKYWIFYNQKVLDFYNKYGDKCLLANIETIVKYQDKYVAEINQKFGINLTNPSPAVYDDSLMQTNISEDGQRPSLIDYYFPEAIEMYQELESRGWHPNQTPDLSWNNQIKSSPYMAWAFRDWANYRLSAAENKSLRVELEGTQAKLEETLSQLNPTRDELEETRSQLQETESIVEQFKSQLEQTEGVLEKTHSQLQKTESILQESHNQLTGLRSQFSQVQEELEQAKSQLSQTQWDVMKYQSQLHHTQEELEQAEQQNRELNEYESRLMKTEMMLSQSRLELEQANKTQMRTIAQLHYTQGKLEYSDQYLAELERLEPQLEKTEIQLSQSLLKLNQVEKNHQRTLVQLHQTQGNLETCQLYLAESQQQQTQYKNQLEEWKRLGEESIEQQDEMEKAIAQYQAKLQATEQELESSQHQLQQTQGELQRSQDQQLKIEEELVRLRLERSLNPTGETTKQVEYRFLVWKAWSSYTMGNYDDMVVSLRQSWKFRNDSPSETILDWLRSFEQFSSEKSIPFNSESLTKLPEWQKLMKLVMANKPLIAHEISSSKQTV

SEQ ID NO: 2148 - protein, 750 aa, Arthrospira platensis NIES-39
MSKQIIIAEQHRIAAVFSEDEIQELVVATGNQQVSDIYLGIVENVLPGIDAAFVNIGDPERNGFIHVSDLGPLRLKRSSGSITELLMPQQKVLVQVMKEPTGTKGPRLTGNITLPGRYLVLMPYGRGVNLSRRIRSEAERNRLRALAILIKPSGMGLLVRTEAEGMAEDAILEDLEALQKQWEEVQQEATSTRPPALLNRDNDFIQRVLRDMYSTEVNRIVVDSADGIKRVKQHLVNWSVGKTPQGVLIDHHRERIPILEYFRVNAAIREALRPRVDLPSGGYIIIEPTEALTVIDVNSGSFTRSATSRETVLWTNCEAATEIARQLRLRNIAGVIIVDFIDMDSRRDQLQVLEHFNKVLKADKSRPQIAQLSELGLVELTRKRQGQNIYELFGRSCPTCNGLGHLIHLPGESAADTAEASERFMVGPKGLSSTPGLDTGTRTAAVDNTRRVQANVSSVSSAETVYRDDSEIVSAETDTGGNFPELELLNHPSYQDIGGTSNIRRRRRRRIGDLEPLVREEEGNRGNLRVNSGNTYNETTKTETNTDVAFSGRQELTERFPKSVKSDAIKAIPEPPEVVAVEMTGDEQDVYALMGISPLVLSNQSVKNARNAIVTVRLPGDTPLPLSSILEEETDTAISWAPTLPIPNAVTVPPAENLISQDDQNLVYNHVEDTTDDSEESPEITESIEVIDPSDLTVTDINDVTDPNDDIDDSDYIYPSEDSENLETEGDAENTPVIRRRRRRSSAVSE

SEQ ID NO: 2149 - protein, 763 aa, Arthrospira platensis C1
MVSTVERPTKLTSPTDNSSGSITPEWKGFKQGKWTKEVNVRDFIQKNYSLYEGDSGFLANATERTNNLWDQVKELMAEERKQGILDAETKIPSGITAYGAGYIDRSLEQIVGLQTDKPLKRAIMPYGGIRVVKKSLEAYGYELDPETEKIFTQYRKTHNDGVFDAYTPEILLARHSGLVTGLPDAYGRGRIIGDYRRVALYGVDRLILDKKEQQASLELDAMDSETISRREEICEEIRSLQELKEMAASYGLNIGRPAATAQEAVQWTYFGYLAAVKEQNGAAMSLGRVSNFLDIYFERDLQNGTLTESGAQEIIDHFVMKLRMVRFLRAPEYNQLFSGDPTWVTECIGGMGEDGRPLVTKNSFRFLHTLYTLGAAPEPNLTILWSERLPENFKRYCAKVSIETCSTQYENDDLMRAEYGDDYGIACCVSAMKIGKQMQFFGARANLAKALLYAINGGKDETTGEQIGPSWLPVQGDYLEYDDVAEKFDRCLEWLSRLYVNTLNIIHFMHDKYAYERIELALHDRDVYRTMACGMAGLSVVADAFSAIKYSRVKVIRNDQGLVVDYEIEGDYPKFGNNDDRVDDIAANLVKQFMNKIRQHKTYRNSVPTQSILTITSNVVYGKKTGNTPDGRKAGEPFAPGANPMHARDTQGAIAALASVAKLPYEHSQDGISYTFSIVPQALGKQESDRISNLVGMLDGYFADDGHHINVNVLNRETLVEAMEHPEKYPQLTIRVSGYAVNFIKLTREQQLDVINRTFHSRI

SEQ ID NO: 2150 - protein, 905 aa, Arthrospira platensis NIES-39
MAKERPPLEEMTLRQLRKVASEYSISRYSRMRKAQLLAAIQDIERQRFSSPSQSRTLEAKAEVEVAKFTLGQEEQTDDFLSSVDENLVELGSGYSESRVVMMARDPEWAYAYWDISSQQKEQFRRLGGQQLALRIYDVTGINLSNQSPHSVQEYPCDEMAREWYLPIPVSDRDYVIEIGYRCADGRWLAMARSQAVRIPPIYPSEWIDDQFITVSWGDELKGQTFAQLSPPGLSYGDRIYDDLFNLAKEAEAQRIAGSLFGSMHHVSSFQHGISSYIFPSGVGKWASGVGETMSGVGMSGVGLGVTQSGSALGYSMCVGMSGVGLGVTQSGSALGYSMSGVGMTESGSALGYSMSGVGMSGVGLGYSISGVGMSGVGLGITESGVGLGYSISGVGMSGVGLGYSISGVGMSGVGLGITESGVGLGYSISGVGMSGVGLGYSISGVGMSGVGLGVTESGVGLGYSISGVGMSGVGLGVTESGVGLGYSMSGVGMSGVGLGVTESGVGLGYSMSGVGMSGVGLGLTESGVGMSGVGMGYSMSGVGMTESGSALGYSMSGVGMSGVGMGYSMSGASITESGSALGYSMSGVGMSGVGMGYSMSGVGMTESGSALGYSMSGVGMSGVGMGYSMSGASITESGSALGYSMSGVGMSGVGMGYSMSGASITESGSALGYSMSGVGMSGVGMGYSMSGVGMTESGSALGYSMSGVGMSGVGMGYSMSGASITESGSALGYSMSGVGMSGVGMGYSMSGASITESGSALGYSMSGVGMSGVGMAERMSGIGFTMSGAALGYSMSGIGMSGIGMAASMPPIRPRKFWLVADAELIIYGATEPDAKVSIGGRPIKLNPDGTFRFQMYFPDGQFDYPIMAVAADGEQTRSIHMKFNRETPERHTNTREEAVLEWVG

SEQ ID NO: 2151 - protein, 936 aa, Arthrospira platensis NIES-39
MRIPVATYRIQFNPDFDFEDAQKILPYLQELGISDIYASPIFKARSGSTHGYDVVDPNQINPELGSPETFDELIEEIQERDMGWVQDIVPNHMAYDSENKLLMDVLEHGPDSEYFDYFEIDWDQAYENIKGRVLAPLLGDFYGNCLENGQLKLSYNESGLSVNYYNLKFPLRIESYATLISYKINTLSQTLGNRHPDVIKLLGVLYILKNIPSETSSQQRRDQAEFVKKLLWEIYQENPEIQKFIDENIDFFNGDTGKSESFNLLDNLLSDQFFRLSFWKVGAEELNYRRFFTVNELICVRVEDYKVFQRTHDLIGELVKSGKFTGLRIDHIDGLYNPVQYLRWLREKTGEIYIVVEKILELEEKLPANWPIQGTSGYEFLNYVNGLFCQSKNEERFNQIYAEMTGLTRTYNDLLVAKKRLIADKNLAGDADNLAQLLKRVCGDYRYGRDFTLAGLKTAIMEFLVRFPVYRTYINQEGVGEDDRAYVQQAIREAKVKLPELLNELNLMEKFLFLDYDEFLSEENQQLWLRFVMKLQQFSGPLTAKGIEDTLFYVYYRFLALNEVGGSPSHFGISVEKFHEFNQERLNSWPHAMNATATHDTKRGEDVRSRLNVISELPDQWEERVKVWSQLNRVHKTQIDSKIIPDRNDEYFLYQTLVGSFPFLEEEYPEYVQRIKDYVVKAVREAKVHTAWLRPDTDYENGFVNFVEKILDFSEDNKFWQEFRPFQEKVAFYGMFNSLSQTLLKLISPGLPDIYQGTELWDFSLVDPDNRRPVDFDGRLSYVQEIKRRSRTGMQNLIDDLMATWEDGRLKLFLIARVLQARQEYLDIFQQGDYQPVAVTGKYCDRIMAVARSYGKHTAIAIIPRFLTDIIEPPQFPLGDIWGDTAIIVPEGNGSNWYEAIVNHDIAASPNILVSQILQYFPVGLLINESVPISDK

SEQ ID NO: 2152 - protein, 1077 aa, Arthrospira platensis NIES-39
MPRRNDLKKILLLGSGPIVIGQACEFDYSGTQACKALREEGYDVVLVNSNPATIMTDPETARRTYIEPLTPEIVEKVIEAERPDALLPTMGGQTALNIAVALSKNGVLDKYGVELIGAKLDAIEKAEDRLLFKQAMEKIGVACCPSGIANNLNEARAIAEQIGTYPLIIRPAFTMGGTGGGIAYNQEEYEELAMGGLDASPMSQILVEQSLIGWKEYELEVMRDLADNVVIICSIENLDPMGVHTGDSITVAPAQTLTDKEYQRLRDAAIKIIREIGVETGGSNIQFSVNPVNGDVIVIEMNPRVSRSSALASKATGFPIAKFAAKLSVGYTLDEISNDITKKTPASFEPTIDYVVTKIPRFTFEKFPGAEPVLTTQMKSVGEAMAIGGTFCESFQKAMRSLETGLAGWGLNTNEKVPSLDTIRSGLRTPNPDRMITLRYGMLLGMSVEEIYELTGIDPWFLDKLQQLLETEKFLKRTPVTEINHDDMLAIKRQGFSDRQIAFASQTTEDEVRKYRKGLGVKPAYKMVDTCAAEFESTTPYYYSTYWEEDEMISSDRPKVMILGGGPNRIGQGIEFDYCCCHASYSLRDDGYITIMVNSNPETVSTDYDTSDRLYFEPLTKEDVFNIIEAEEPLGIVIQFGGQTPLKLAVPLEKALSESTLKTKIWGTSPDSIDTAEDRERFEKILRELNIQQAANGMARSYEEALAVAGRIGYPVVVRPSYVLGGRAMEIVYSDEELERYMTFAVLVEPDHPILVDKFLENAVEVDVDAIADHTGNVVIGGIMEHIEQAGIHSGDSACSIPTQTLSETVLATIRRQTIQLAKALNVVGLMNIQFAVQGEQVYILEANPRASRTVPFVSKAIGIPLAKMASRVMSGKTLAELGYTQEKIPDYVSVKEAVLPFAKFPGTDVLLGPEMRSTGEVMGIDTEFGRAFAKAELAAGQVIPMSGTVFVSVNDRDKEAIVPVVQDFLDLGFKVTATINTRKVLWEHGVKVDLELKLHEGRPNVLDAIKNHAVQLAIITPSGSEARADGITIRRSALAYKVPIITTIAGAKATISALRSLQKHPLDVKALQDYYI

SEQ ID NO: 2153 - protein, 1035 aa, Arthrospira platensis NIES-39
MSSLVQSSEPIPSAVVSSNAPVQASDLLLRNRLKIVEDLWESVLRQECGEQLVDLLLQMRSMTSPEGQASPHLQANVWQIIKDLDINAAIRAARAFALYFQLINIVEQHYEQREQELAYAQIKHQGPAESPADKSNRSIFETRHQRFSTAEEAPVELLNQTSRRQDDRDLATFHNLFPMLQRLNVPSQVIQRLLNQLDIRLVFTAHPTEIVRHTIRTKQRRIAKILQQLDTVDESYGKVDNTNPEATGLVKTWTGELQEQLTEEIRLWWRTDELHQFKPTVLDEVEYSLHYFQEILFDVIPQLYQRIKQTLQPHFPHLKPPNYDFCKFGSWVGADRDGNPSVTPEVTWKTACYQRGLIINKYIQAVDHLNQLLSLSLHWSDVLPELLESLDRDQVQLPEVYDQVAIRYRQEPYRLKLCYILKRLENTRDRNQRLSTSNEVERERERIVTKENAGSLYHSGAAFLKELKLIERNLMATGIQCRDLENLICQVEIYGFYLARMDMRQESSVHSTALNEIVDYLQLLARPYDDLTEAERTLWLITELQTRRPLIPAELPFSPKTCETINTFRVMRELQQEFGQEICQTYIISMSHDVSDLLEVLLLAKEAGLYDPATGIGNLQVVPLFETVEDLKKAPSVMKDLFELPLYRAMLAGGYQKYEQVSQDVNASLQEIMLGYSDSNKDSGFLSSNWEIHKAQKALQTLAESYHISIRIFHGRGGSVGRGGGPAYKAILAQPGKSINGRIKITEQGEVLASKYSLSQLALYNLESVATAVIQASLLHTGFDEIEPWNQIMEELSVRSRSCYRALIYEQPDLVDFFEQVTPIQEISQLQISSRPARRQSDKKKDISGLRAIPWVFSWTQSRFLLPSWYGVGTAIEQFIREEPEENIKLLRYFYIKWPFFRTTISKAEMTLAKVDLEMAHHYVRELSHPQDRDRFEDLFQRIAKEFNLTRQMVLEITGQKQLLDNDPVLQRSVRLRNGTIIPLGLLQVSLLQRLRHHGTSATPGVIHSRYSKGELLRGALLTINGIAAGMRNTG

SEQ ID NO: 2154 - protein, 1121 aa, Arthrospira platensis NIES-39
MTASAEYLQEYQKTEAAYTDGKLDEAATLVYKLVEDYPEDPFARLLCGHIYYGLQQYDVAREQYEVVLGLTDDPELVQQAEDYLTEASQFCEDSETGSSLGDISLDDEFDDAQETILEDLSSVGDDANGSLDLDLEEELDLNAIDEQLDELEELTAASQQLGKYPQKPSATIETLDDALDLYDDEDMGMEEIDISSALDDLDELSNLEFEEGTEENLEAIDDVLGDFDISADELEPENLNGKASVGGEELNDSLEDEFALEEDNFNPLELEANPLVDDSNFDLDDEVDPDLTNPLNNPFAQGQETDEEEEDPDLNFDLETSDPFVMDEEDELVLTEGLDPEDPMSGSLEQLPEELFEEDLIDAPHKDSPATNTPGVTQEHQDSWDDLGDDFSLTDLPLTDEPITNETIVDHVALEIKPPDLGDVQDELDIGELELEEDDIFSPLEDMADARHQTVAETNGNGNGKGLVKPDQISLNKTPNNNLDEEEENFSDLNLDEFDQVDDSVSDEFELDDIPDTFDLDSLEESTVSNGTANGAIAHNKTNQTSGSQVNEFLEDFEEFDDVEGFGIPDAAGYAFMPDSADLDDDDLDSNFLGRSSSIPDNDSSAIYEDDVFNTPTEREAITAFSNLSEDSVDTNISVEQGSFAFLENKPLRSKSFYIALGSGLVTLIAVAVATNIATKVAASSYQGEVVNYLRRSGWLMTIVAGASSFGTAFAMGRITSQQLEKATGDLQKQFDAIARGNLNARVNVYAEDELGQMCAKFNYMAQFIESTTREAQRKAEEQEEAKENLQRQVIRLLDDVEGAARGDLTVSAEVTADVLGAVADSFNLTIQNLREIVVQVKQAARQVSRGATDSASFAKDVAGDALRQAEELAATLNSVQLLTDAIQRVADSAKEAEEVARTAAAVATKGGEAVEMTVAGILKIRETVAETTRDVKRLAESSQEISKIVAIISNIASRTNLLALNASIEAARAGEAGRGFAIVADEVRQLADKSAKSLKEIEQIVMQIQSQTSSVMMAMEEGNQQVIEGTRLAEQAKRSLDDIIQVTNRIDVLVRSITADTVEQNETARAVAEVMQAVELSAQDTSQEAQRVASALSNLVGVARDLLTSVERFRVDPSER

SEQ ID NO: 2155 - protein, 2091 aa, Arthrospira platensis NIES-39
MDIAAEGQSPILIITGMHRSGTSLTASLLQEYGVNIGQNLVGSNYGNIKGHFENIDFVEFHKEILRDNGIDELGCVAEDKISLTPTQREQAQQLIAQNQDPLSPWGWKDPRTTLLLDFWGELIPEAKFIFVYRTPWEVVDSLYRRSTDEALITSPEMAVKMWIFYNKKLLNFYKNNPQRCLISNVYKVGNYTKDFIKAINENLGLWLKIDDNRSNFDESLLINKIIKSRKPGLIGYYFPEALSLYQELEEAAKNLGSGLNNFEREAVQQKPSPSWAFKDWSNIRQLEKECGILEADVKLWQDHFHDAVDRLVSKETELGRTQLKLNGLEIKQQDAIAKLVTTEEQLGKTQGELEASTLELRGMTAHAHNLEVGLQEATTKLVATEQELGQTQGELQKIQDKYQDFDIKYQDVLSKLINTETELGTTEFKLHNAQLKISSLETELGQTQFRLQTSQVQFKQAFAKLRELEEELGQTQMARNLAEGELAAIKASKFWKIRSKYATAKRQARRTLKPRFLSSIDNPTNWELLGCRDSYMQVQGWCLHTGKLNLEAVRARVNDEIFEGTYNIERLDVGNIYDYVPGSSNCGFGVQIPLIPGNNRLQLEVKDTRGKWHQFGEYPLRVSPLQAAFDVPNTNIVPVGETLFAGWCCHPQYQITKLFLRYGQQTVECAYGLPRGDVGEIFSDWVGSSNSGWEVLINLPPGTWNISLEAQLENGETVALEKQQPLTVKRVNPLNKVSGKTKQLIKLSAAIRQRAAERKQRLGRLIPMPWEIPTIIRRMSEMYDQTSEIPGEVLLPTGFEIPATIDPYDAWLKANVWTERAADILRNRLAAVPATALPKISVVMPVYNPPIEFLQQAIASVCSQVYSHWELCIADDCSSDPEVAKTLNQLAETEPRIRLHFRSENGNISAATNSAASLATGDFILFLDNDDELTPDALAEIALYLVTNPETDILYSDDDKIDTQGKRFAPQFKPDWSPELLLSYMYMGHALVVRHSLFQELGGFRIGYEGSQDYDFALRATEKARQIGHIPLVLYHWRTAPGSTAVSGAAKPASFQAGQNAIIDAIARRQSAATVHQPQWAVKLNLGIFSHTFPHSGPSVAIIIPTKNQLKLLQACINSLAKTSYQNYQIVVIDNQSDDPQTLAYLASFSDLPKCRVLKISNPETGFSFAHINNRAAEQVEADYLLFLNNDTEIINPDWLSQMMGYGQFEAVGAVGARLIFPNDTIQHAGIIHGLHHGLAGHAFKLTHRDDFGYLAYSKVVKNYSAVTAACLLTPRALFWEMGGFNETDFAVAYNDADYGYRLSEAGYRCVYCPDAELIHREGTSRGFGDNPKEVATFRRRYANQIDPFYSPHLSLANEWFQIQPRRYFGHNLTVKIQPKVLMCSNALEYTGAPLHQLEIAIKLAGDGDIEPVIFSVTDGPLRQVYEQQGIKVIVREHPLTGVYDRQGYGQAISALAEELRLDSYDLVYANTLENFFMVAAAENMGVPCVWNVHESEPWQTYFNRFGGEIAAQALECFHFPYRVIFVADATRNQYLPLNSHHNFITIHNGLDVDRLLTQAEKWTRKSARETLDIDPGEIAILLLGTVCDRKGQQDLVKALPLLPPQWHSRIRCLIVGDRPSLYSSQLANLVNQLPESLRNRASIVSETPDTALYYRAADIFICTSRIESYPRVILEAMGFDLPIITTPVFGIPEQVRCEINALFYTPNQPDELAKCITELLENERKRQQFAQNAKYVLDSLNRFEEMTAAYGEIFQEAYLMNPHPHPQLSQEAPELEVVETETIPETPVPPETVTIEAPQDKNYWETNPTAAIASQWVSNPIVANTIYKRMSGGQSQKYWLRWLIEDYFTQRNFDQLISLGCGIGNHEIVMAQERFANHIDAFDFSEASLNIARQTAANVGVNINFYQDDFNTFTLDKGKKYDIAFCSGSLHHVKEIERFLGIVHGCLHPDGYFIINEYVGDNYCIYSPHQVQIINRLYKCFGEILRSGIQENFINPTIHQVFATDPSEAVRSKLILPFIEYYFNIEVYNPFGGAILHPLYPLLEHTQLLPGDPKSEALVRLLLEFEEILMEIPGGLASDFCLCVLRPKQF

SEQ ID NO: 2156 - protein, 57 aa, Arthrospira platensis C1; identical to SEQ ID NO: 523

SEQ ID NO: 2157 - protein, 71 aa, Arthrospira platensis C1; identical to SEQ ID NO: 647

SEQ ID NO: 2158 - protein, 69 aa, Arthrospira platensis C1; identical to SEQ ID NO: 648

SEQ ID NO: 2159 - protein, 81 aa, Arthrospira platensis NIES-39; identical to SEQ ID NO: 527

SEQ ID NO: 2160 - protein, 77 aa, Arthrospira platensis NIES-39; identical to SEQ ID NO: 644

SEQ ID NO: 2161 - protein, 98 aa, Arthrospira platensis NIES-39; identical to SEQ ID NO: 617

SEQ ID NO: 2162 - protein, 87 aa, Arthrospira platensis Sp-1; identical to SEQ ID NO: 529

SEQ ID NO: 2163 - protein, 104 aa, Arthrospira platensis NIES-39
MSGFIRGLFGRKSEPTETQGSSFYLDPNSAKSLGEIGQPLEVKKSFPKMSGGKPFQAPKATAKPAMEMTQPKASESPAPEVKSDRRRADSSLDMFRNMARDLKK

SEQ ID NO: 2164 - protein, 114 aa, Arthrospira platensis NIES-39
MKKLLSVILLGVALLTFALPRPALAGDVAAGASVFSANCAACHMGGRNVIVANKTLSKSDLAKYLKGFDDDAVAAVAYQVTNGKNAMPGFNGRLSPKQIEDVAAYVVDQAEKGW

SEQ ID NO: 2165 - protein, 107 aa, Arthrospira platensis NIES-39
MSTAVEVTDSTFEQDVLESALPVLVDFWAPWCGPCRMVAPVVEEIAQQYDGQIKVVKLNTDENPQVASQYGIRSIPTLMIFKGGQRVDMVVGAVPKSTLANTLEKYL

SEQ ID NO: 2166 - protein, 105 aa, Spirulina platensis
MATIQQQKIRIRLKAFDRRLLDTSCEKIVDTANRTGATALGPIPLPTKRRIYCVLRSPHVDKDSREHFETRTHRRIIDIYQPSSKTIDALMKLDLPAGVDIEVKL

SEQ ID NO: 2167 - protein, 118 aa, Arthrospira platensis NIES-39; identical to SEQ ID NO: 581

SEQ ID NO: 2168 - protein, 117 aa, Arthrospira platensis NIES-39
MTQGKGFGRDGFGLGKMKELAQAFQKAQAVQEGAKRLQEDLDELEVLGEAGGGLVKVYLSGNQQPRRVEVSPDLLGEDPDVVSDLILTAMKEAYNNSTSIMRERMEELTGGLNLPGL

SEQ ID NO: 2169 - protein, 136 aa, Arthrospira platensis C1
MVEPTKSANPTTASPEGGTMTPTPDQGPNKEQFEEIKEKVVVFLSELPGYVSKFFGEYQKPIVTILLIVVAVVTIKVLFAVVDALNDIPLVAPTFELIGMGYAAWFVYRYLLKASTRQELVQEVNALRKQVFGNKS

SEQ ID NO: 2170 - protein, 133 aa, Arthrospira platensis NIES-39
MATNDTIADMLTRIRNSCMARHQTTEIPSTKMTRSIAKVLQDEGFIANFEEAGAGVKKHLVVSLKYNTKTRTPTIRTLKRVSRPGLRVYKNRKELPRVLGGIGIAIISTSRGVMTDREARLQGLGGEVLCYVW

SEQ ID NO: 2171 - protein, 128 aa, Arthrospira platensis NIES-39; identical to SEQ ID NO: 555

SEQ ID NO: 2172 - protein, 163 aa, Arthrospira platensis C1
MLKRYIWLAVATVFFTFQMWVGNANALELTEELRTLPINAQGDTAVLSLKEIKKGQQVFNAACAQCHALGVTKTNPDVNLSPEALALATPPRDNIAALVDYVKNPTTYDGFIEIYELHPSLKSADIFPKMRNLSEDDLYNVAAYILLQPKVRGEQWGGGKYLR

SEQ ID NO: 2173 - protein, 184 aa, Arthrospira platensis NIES-39
MTSIETPTTLIVTAYNNKNQAKEVLKVLKDMERAGIIFIVNAAVMVKNEKGKVSISETGDTGPRGGAIMGGITAGLIALFNPIGALGVIAMTAGGAGVGALVTHFIDLGFPQEDLKDLSESLTPGSSALIALVEQTWVEKVCEELAKFEGKLYRRAIKEELAAQLTETAKTVEVEPETESESNQ

SEQ ID NO: 2174 - protein, 183 aa, Arthrospira platensis NIES-39
MFRKISLAQVGLVLGGLITVVGFVAYFADYATLNLAGFFYGIPLLLGGLALKAAEIKPIPFSEPTTPEVLSKREQQATPTQNQVRSDVTRYRYGQSAHLIDAIERLKLGGNDDEHPQLQALREGVVDGSYALILEFYSPFVPLSVWEEKQTKIAQFFGPNLRVQVTQPDTDCVDLIMIADTES

SEQ ID NO: 2175 - protein, 206 aa, Arthrospira platensis C1; identical to SEQ ID NO: 490

SEQ ID NO: 2176 - protein, 201 aa, Arthrospira platensis C1
MEITVQCQKRPSGSKPRALRREGLIPAVLYGHKGAESEELTIDAKSAENLMKKGAVNHTLIQLNIPDLSWAGKALLREVQTHPWKGFPYHLSFFSVGTLESVEVTIPLNFIGEPIGVKNSGGMLDLVITEVQVNCKPGNIPEAIDVEVSSLEVGDALHISELQLPEGVEVIAEADQVVASILYRGGGQAEDGEGETEAATA

SEQ ID NO: 2177 - protein, 219 aa, Arthrospira platensis C1; identical to SEQ ID NO: 511

SEQ ID NO: 2178 - protein, 222 aa, Arthrospira platensis NIES-39; identical to SEQ ID NO: 487

SEQ ID NO: 2179 - protein, 297 aa, Arthrospira platensis NIES-39
MVSFGRVMTAMVTPFWEDGSINYPEAERLAAHLADNGSDTLVVCGTTGESPTLTWDEEHELFKVVQQAVAGKAKVIAGTGSNSTQEAIAATQKAAKLGVDGSLQVVPYYNKPPQEGLYQHFLAIASACADLPIVLYNIPGRTGQNLQPETVARLASVPNIVAIKEASGSLDQASQIRQLTPKEFQIYSGDDSLTLPLLAVGGTGVVSVASHLVGKQIQDMIQMFEAGRVQEATEIHIKLFSLFKTLFITTNPIPIKAALKLLGWNVGLSRSPMCEPSPEVIEKVKGVLGELGLIETR

SEQ ID NO: 2180 - protein, 323 aa, Arthrospira platensis NIES-39
MFFPPSCHPTQVSIIGAGKVGGTLAQRIAESNVAHVVLLDVVEGLPQGVALDLMQAGSVEGHDRKILGTNDYADTAGSDVVVITAGRPRTPGMNRNDLIETNAPIVARAVTNAIASSPNAVIIIVTNPLDVMTYIAWQVSQIEPFRIMGMAGVLDSARFQAFIATELNVSVADVNATVMGSHGDLMVPLPRYSTVNGIPITELMDTETINRLIARTRNGGAEIVGLLKTGGAYYAPASSVRTMVESILLNRRRLLPTSAYLKGEYGMKDIFLGVPCWLGCRGVEAVLELNLTDNEREALNSCAQSVREGIEKADAVLAATAAV

SEQ ID NO: 2181 - protein, 307 aa, Arthrospira platensis NIES-39
MEQLFLIIILLFGGSTLAGSVKIINQGDKALVESLGKYNGRTLDPGLNFLVPFYHRVAYKETVREQVLDIPPQKCITRDNVSISVDAVVYWRIMDLEKACYKVNNLQAAMENMVRTQIRSEMGKLELDQTFTARTEVNEMLLRELDIATDPWGVKVTRVELRDICPTKAVMDAMELQMSAERQKRASILASEGERESAVNSAKGRAEAQVLAAEAQQKAVVLEAQAQRQSQVLKAHATAEAIQILTKTLQSDPEAREALQYLLAQNYIEMGATIGNSDSSKVMFMDPRSIPATLEGMKSLISDTPSS

SEQ ID NO: 2182 - protein, 303 aa, Arthrospira platensis C1
MKAQENRRVRKAVITAAGFGTRMFPASKMIKKEFFPIVDAEGIAKPVIQVVVEEAINAGIEEVGIIVQSGDRSLFEDYFQGSPKPEFWRKLSPSSRDYSHYLQTLGERITILTQEQQEGFGHAVFCAAPWVHDEPFMLLLGDHVYASDLEVNCARQLLEVYEKVQQSVIGVRITPGDRIQHYGCVAGTPVKDSDYLFDLTEIYEKPTLNYARTNMRVPGLEWDRFLTIFGLYIIEPKIFDLLADNIRHDVREKGEYQLTSCLQTLLEKEQITGYLVPGRCFDTGLPETYFKTLVEFRNIKTKS

SEQ ID NO: 2183 - protein, 320 aa, Arthrospira platensis NIES-39
MKILALVPGGIGDQILFFPTLDDLKQAYPHAQISVVTEPRAQTAYRVCKSVSKVIPYDFKGRNSLADWGNLIGIVRDREYDVVISLGQRWTVGLLLWLTGIPNRVGYAGSSGEIFLTDAVPLKTEQYAAQMYHDLLQGLDIITPFSGLQINVPKSDLAWADREQESLGVKESGYILIHGGSSQMAINKGIDKIYPVESWQKIIEDIQQRQPNLPVVLVKGPEDQALITQITQRCPQVKLTQPEDIGKLAAMIAAANLMVCTDSAPMHLAIAVGTYTIALFGPTDPHKLLPPSERAIAVKSPTGKMADISPDEVLKRIWGN

SEQ ID NO: 2184 - protein, 314 aa, Arthrospira platensis NIES-39
MAQFKIECIESNISTDRSQYGKFVLGPLDRGQGITVGNALRRVLLSNLEGTAITAVRIAGVNHEFATIDGAREDVLEIMLNLKEAVLKSHTHQKQIGRLLVQGPATVTVGHFDLPSEVEVVDKNQYIATLSPGATLEMECQIEKGTGYRAVDRHRDDSAALDFLQIDAIFMPVRKVNYTVEDARDGGSLEKDRLTLEIWTSGSLTPQEAISQAAAILVDLFGALKDINLESITSDQRDDIDPTSQIPIEELQLSVRAYNCLKRAQINSVADLRDYTEEDLLEIKNFGQKSAEEVIEALQNRLGITLPKERAAKS

SEQ ID NO: 2185 - protein, 312 aa, Arthrospira platensis NIES-39
MRILVTGGAGFIGSHLIDRLMEQKHDVLCLDNFFTGNKDNILKWIGNPYFELIRHDITEPIRLEVDQIYHLACPASPVHYQYNPVKTIKTNVMGTLNMLGLAKRVKARFLLASTSEVYGDPDVHPQTEEYRGNVNCIGPRSCYDEGKRVAETLAFDYYHQNNVDIRVARIFNTFGPRMLENDGRVVSNFIVQAIRGIPLTVYGDGSQTRSFCYVSDLVEGLIRLMNGDYIGPVNLGNPGEYTILELATKIQQMINPDAEIQYKPLPQDDPKQRQPDITKAKKYLDWEPTVHLNDGLKLTIEDFRSRVILESK

SEQ ID NO: 2186 - protein, 342 aa, Arthrospira platensis C1
MQTYENPTVKYDWWAGNARFANLSGLFIAAHVAQSALIAFWAGAFTLFEVSWFDPTLPMGEQGLILLPHLATLGLGVGDGGQVVDTYPFFVVGAVHLISSAVLGAGALFHTFKAPEDLKTAQGQAQKFHFDWEDPKQLGLILGHHLLFLGMGALLLVAKAMYFGGLYDAATQTVRLVTEPTLNPATIYGYQTHFATIDNLEDLVGGHIYVGVMLIAGGVWHILVPPLKWAKKVLIFSGEAILSYSLGGIALAGFVAAYFCAVNTLAYPVEFYGPPLDIKLGIAPYFADTTVLPMGAHTPRCWLANAHFFLAFFFLQGHLWHALRALGFDFRRVERALNSIEV

SEQ ID NO: 2187 - protein, 334 aa, Arthrospira platensis NIES-39
MQFPKFLQKFAILIAVALFCASCDYLPDVSYNPWELVPVATDAKLFDIDFVDNSDHGWIVGSNATLLETQDGGKTWETKQLDLDEPNLLLTSVSFSGSEGWVVGEPSVLLHSTDGGKSWTRIALSNKLPGAPNNIVALGPSAAEMTTNVGAIYQTKDGGQTWQAMVEDAVGVIRSLSRSEQGEYVTVSAKGNFYSTWEPGQTSWTPHIRYSSKRLEKIGFGQDNRLWMLARGGEIRFSDPNDPEEWSDPIKPEFSTSWGLLDLAYRTPEEIWVTGGSGNLLCSFDGGETWQKDRKVEDIPSNFYRIEFMSPKRGFILGQRGTLLRYTGNTSASS

SEQ ID NO: 2188 - protein, 343 aa, Arthrospira platensis NIES-39
MVKERTVPSFQVDSVVITREEGLMLYEDMVLGRLFEDKCAEMYYRGKMFGFVHLYNGQEAVSTGVIRSMRRDEDFVCSTYRDHVHALSAGVTAREVMAELFGKATGCSKGRGGSMHMFSSKHNLLGGFAFVAEGIPVATGAAFQSKYRREVMGDESSDTVTACFFGDGACNNGQFYECLNMATLWKLPILFVVENNKWAIGMAHERATSDPEIYKKGPAFGMPGYEVDGMDVLAVREVAQKAIARARAGEGPTLIEALTYRFRGHSLADPDELRDRDEKEFWFARDPINKFFAYLTEHNLADSDELKAIDKKVQDVINDAVEFAQTSPEPDPSELYRYVYADD

SEQ ID NO: 2189 - protein, 365 aa, Arthrospira platensis C1
MDDKLMLMIPGPTPVPEKALLALAKHPIGHRSGDFSQIMAEVQENLKWLHQTQNDVLILTASGTGAMEAGIINFLKRGDRVLCGCNGKFGDRWAEVATAYGLNVEIISAEWGQPLDPEKFREVLEADTEKQIKAVIITHSETSTGVLNDLETINRHVKNHGEALIIVDAVTSLGAVNLPIDEWGLDVVGSGSQKGYMIPPGLAFVSVSPKAWEAYKTADLPRYYFDLGPYRKTAAKNTNPFTPPVNLFYALQVSLQMMKAEGLENIFARHHRLMTMTRDAVKGLNLPLFAPDHAASPAITAVCPPESIDAEKVRSIMRKQFDIVLAGGQDHLKGKIFRIGHLGFVCDRDILCAIAALETTLQQLN

SEQ ID NO: 2190 - protein, 394 aa, Arthrospira platensis NIES-39
MLGTCKEVDIVIGRGKKARRAYGIDEIALVPGPRTLDPSLADTSWTIGNINREIPIIASAMDSVVDVNMAAKLSQIGALGVLNLEGIQTRYEDPNPILDRIVSVGKTEFVTLMQELYAEPIKPELIKKRIAEIKAQGGIAAVSATPAGASKYGDAVAKAGADLFFVQATVVSTAFLSPESVTPLDLAEFCKNMPIPVVLGNCVTYEVALNLMKAGAVGILVGIGPGAACTSRGVLGVGVPQATAVADCAAARDQFYQETGRYVSVIADGGLITGGDICKCIACGADGVMIGSPFARAEESPGRGFHWGMATPSPVLPRGTRIQVGSTGTLEQILRGPAQLDDGTHNLLGALKTSMGTLGAKTIKEMQQVEVVIAPSLLTEGKVYQKAQQLGMGK

SEQ ID NO: 2191 - protein, 396 aa, Arthrospira platensis NIES-39
MTEVYIVSATRTPLGRFGGGLSGFSPADLGAHAMKAALAKAGVSGENLDLYIFGNVLRAGHGQLIPRQAALKAGIPATVDGYAIDMVCSSAMMSLINGCYTIKAGEADLVLAGGTECMSQTGFFLSHRARWGYKFLMGAPEQLMDILLYDGLTDSTTGDGMGDETERLAAEHGFSRQALDEVAFYSQKRAAEATEKGLFKNEISPIEVSSRKGTQVIDTDEGIRAETTLESLAKLRPAFQKDGVLTAGNSSQISDGAAAIILASEAAVQKYGLKPLAKVLGGAWAGGESWRFPEVPILATQKLLGRLKMSVNDFDLFENNEAFAVSTLLFDTMLGVSQDKLNVNGGAIALGHPIGASGSRIVVTLLNALEQHDKSLGLAALCHGTGGGTAFAIERV

SEQ ID NO: 2192 - protein, 424 aa, Arthrospira platensis C1
MIHEVFMPALSSTMTEGKIVSWQKSPGDRVGKGETVLIVESDKADMDVEAFYEGFLATIIVPEGGTAGVGQTIALIAETEAEIEEAKKQATATAPTPSPEATPTPSVGTPEPVAATVAIDSTPSRRNGRIVATPRARKLAKQLNVDLNNLQGSGPHGRIVAEDVEAATGRTQTPTVAPQPTVSPVAPPTPIATPAPAPVPLGEVVGMNTLQNAVVRNMLASLQVPTFHVGYTITTDNLDKLYKQVKSKGVTMTALLAKAVAVAIQKYPIVNASYVDSGIQYNKAINIAVAVAMPDGGLITPVLSNADQIDIYSLSRTWKDLVARARSKQLQPQEYSSGTFTLSNLGMFGVDRFDAILPPGQGSILAIGASRPTVVATDDGMMGIKPQMQVNITCDHRIIYGADAAAFLQYLAQLIETNPQSLTL

SEQ ID NO: 2193 - protein, 422 aa, Arthrospira platensis NIES-39
MGERAIDPPPISFFGAEIPPGLKISRDCEDLSPSNVILIRGIAAVLNAKYMNPGIDIQGSFIQVLLDLGIPTGVAKILWMPFPMGLMLVGATVGVLGSVWLERKISAAAQQRIGPEYIGPMGSLAPLADGLKLLLKEDIVPFKADPLLFTLGPIIVSIPVFLSYLIVPFGQNLAIANLGTAIFLWIALSSIQPIGLLMSGYASNNKYSLLGGLRAAAQSISYEIPLALAVLAVVMMSNSLSTLDIVQQQSGYGILGWNVWRQPVGFVIFCIAALAECERLPFDLPEAEEELIAGYQTEYSGMKFALYYLASYVNLVLSALLVSVLYLGGWNFPIPVEAIAGLLGVSETTPWLQVLTASLGITMTILKAYLLVFTAILIRWTVPRVRIDQLLNLGWKFLLPVALVNLLLTAALKLAFPIAFGG

SEQ ID NO: 2194 - protein, 463 aa, Arthrospira platensis NIES-39
MRKQRSLLFLILLLVITSLIILVRVPIRLGLDLRGGSQLTIQLQTSDEVPRIDERVLEGVQSVIENRVNGLGVSEAVVQTVGEDQILVQLPGVSDPEQAERVLGGTAQLDFREQRPGTEGELFAEIQVNRALDAELRQAIATGDDARLEELLQQLNESNQAIASLYQEPIIRGQQLQDAFPQPTQGGNGWEIVLRFNNEGGRNFAELTKNLAGTGRTIGIFLDDSLLSSPTVSVEFADTGITGGSAVITGNFTAAEANDLAVQLRGGALPVPVEIVENRTVGATLGRDSIQRSIYAGSGGLILVLIFMVAYYRLPGAIADVALVVYALFTLAIFALLGVTLTLPGIAGFILSIGMAVDANVLIFERTREELRAGKTLYRSVESGFYRAFGSILDGNVTTGIACVALFWLGTGLVKGFALTLGLGVAVSMFTAVTFSRTLMFTVISLPEFRKPELFCPNIPKTN

SEQ ID NO: 2195 - protein, 454 aa, Arthrospira platensis C1
MLNVKPMSIRGIDVSDYQPNVDWKAVANSGMEFAVIKSTEGATFVADVFAPYWKATKANGLIRGAYHFFRPASNIQGQIDNFLRTVPLEPGDLPPVLDIETTDGLDSKTICDRAAVWLEAIEAATGYQPIIYTYPGFWQQLNTDRFSEYPLWIAHYTQAEKPAIPGKWKTWVFWQYTDRGQVDGIRGGVDINIFESIRRGERGPKVELMQTMLKKRGFEPGVIDGIFGAGTERAVISFQDNKGIKEKNGVAGLKTWTALMGQVENFVPPRVEAEPTPEPTPAPAPEPAPEPAPEPAPEPAPAPAPAPAPTPTLELIDICRIYRGSATEDKALVWLQERIPSETLLEFARLWRNQAIPQTQSIRIIDVCRYYRDLPNQNQALRWLQREIPATILLEFEQKWNATPEVVVDIRLLDVCQFYSGTATQKEAIEWLQTQIPAPTMVEFARLWRRPSSR

SEQ ID NO: 2196 - protein, 496 aa, Arthrospira platensis NIES-39
MLKRQKSRTRSYRQFAEVVGSAPQPTSSIFQPQRPRWLSPSLLGCIPLTALIITFWSLAAVAQEDAQPITPEYVQGVLNTIWIVIASILVIFMNAGFGMLETGFCRHKNAVNILAKNLIVFAIATLIYWFFGFSVMFGGENPFIGGGGFFLTGDPSVYGLDPFPEGLPKEVFFLFQVAFAGTAATIVSGAVAERIEFVAFLLFSLLLVGISYPITGHWVWTDNGWLASMDFHDFAGSTVVHSVGGWSALMGAAFLGPRMGKYGPSGEPRAIPGHNMSIATLGCLILWIGWFGFNPGSELAANENVPYIALTTNLAAAAGGVSATLTSWIKDGKPDLSMIINGILAGLVGITAGCDAVPLWAAVVIGAIAGVIVVYSVAFFDRIQIDDPVGATSVHLVCGIWGTLAVGIFGGANLGIQILGILSIGGFTVVMTSIFWLAIKALVGIRVTPEHEYEGLDIAEHGMEAYNGFLKEVGPASVGGIDPGIPSREDGISRSY

SEQ ID NO: 2197 - protein, 531 aa, Arthrospira platensis NIES-39
MAAFFFPEVHRKSDFIWSGVGLFYALILWVCVARFTGAILLGQTASVALLGWLGWQTLLLRREVTPAHLQTPLPTPVKQKVSGLFSSRSVKKSTTPKPSSKKAKKASEPPTPAATPVTPEEVKPLTEPVAEPVAEPVAEPVAEPVAEPVAEPVAEPVATTEEAEAPAEPSPVVAETEAVAPVVEPETITEEPELAVSELEVAEVAPEPTTTAEAETPTAEEVSETVSETVSEEVSKAEETPTEEVTETPEVTKPEPVESAKVPEDQPSEPKKSKGLGGLLAGLKGIFGDRKKKEPAKTKAPDTSKDNPKAPETQGDASDWDDNDESWETDTDNASPSEAEKTNSPDTPEAGQVSTPDIESDHSGATADPVSTVEPIDEEPTDEEHQDSNVKADATNVETVPSVEPTDGEHQDGNIKAEAEPTATDTPETEAETVVSPVADSEEVRTDSAEKSPSETIIGTPEPEASDSPETSESLESEKSSTETEEEKGTQSESDSDSGVAEDEDDEDDDEDEDDKTPRALKRPRKPKRKR

SEQ ID NO: 2198 - protein, 557 aa, Arthrospira platensis C1
MEEFKLMSNLTGTSFIDVNRTGVFDPGDLPIANAAVFTDLPPFDGIYQPDQGERSAITGQDGSFAIDLQGLQAGTEFQLQQIPPADGSVSSPGNNLPLPFTVPADPTQNIGPVAIANLPPDVPVPSVPPITSKGNIQGRTFVDNNVNGRFDSGEPVIGGIPLFLDLDGNGVWTANEPITVSRPDGSFSFNNLTPGTYQLQPLLPGNDVPPGLGGVTPFADRLVATSVSVSPSSLDDRLGGFLGGIARRFLGSDRTEQLAQATNEPNAPELVTVSAGAVTSQDLGFVVPGSIYGFVVSDANSNGVADPGEAGIPGITVSGGGRTAVTDANGFYILDVDARFPTFSDAELAQNPYLHYVLSNEPGLLTESFAVEVVNPPGNLVATGPDPDFDVALGRGQAAQKDFFFNVPPAPVGGPGVPDSITGFVFTDVNIDSAYQVGEPLLEGVTVYLDLDKDGQLNSGPLRDPVTGAVILDENGNPFPAEPSTVTGPGGNFGFFNVSRWLPFIEPGDVEFQVRVEAPASLPFVTTPDVSISGEGLGVLAEVGASGVAFGMSQFPV

SEQ ID NO: 2199 - protein, 528 aa, Arthrospira platensis NIES-39
MDAITLWQRYQDWLYYHEEIGLYLDISRIRFDQAFLEAMKPKFDGAFRDMEALEGGAIANPDEQRMVGHYWLRNPELAPTPQIKQQIIDTVNKIETFVAKVHKGEIKPPQAEKFTDLLSIGIGGSALGPQFVADALAPDYPLINIHFIDNSDPDGIDRILQRLGDRLKSTLILVISKSGGTPEPRNGMMEVKQALLNQNLHFRDQAIATTQIGSKLYQEATSQGWLETFPMEDWIGGRTSEMSAVGLLPAALQGIDIHALLQGAKTMDIATRQPDIKTNPAALLALSWYAVGGGRGQKDMVILPYKDRLILLSRYLQQLVMESLGKEKDLEGNIVNQGISVYGNKGSTDQHAYVQQLRDGVPNFFATFIEVLRDRQKPSPEIEPGVTAGDYLSGFLQGTREALYDNQRDSITVTITEVNPYTVGALVALYERAVSLYASLVNINAYHQPGVEAGKKAAAQVLELQHQGLQVLRGHSQGISISDLAAKIDAQEQVETLYKILRHLAANDRGVELSGDPSKPAQLIAKWR

SEQ ID NO: 2200 - protein, 551 aa, Arthrospira platensis NIES-39
MVANNISPLAGKTAPGDILENIDRLIEQYYSVRPDPNNPQQQVSFGTSGHRGCSANGTFNEDHILAVTQATVEYRRDQGITGPLYMGIDSHALSEPAQKTALEVLAANQVETYIATDKGNGRFTPTPAVSHAILTYNRQRTEGLADGIIVTPSHNPPSDGGFKYNPPSGGPAGPEITKWIQQRANQILADGNRAVSRSPYNQALYASTTHTFDFITPYIADLENIIDMAAIRESGIKIGVDPLGGSNIGYWEPIAERYGLNLTIVNPTVDPTFGFMTVDWDGKIRMDCSSPYAMANLVKLKDDYDIAFGNDTDSDRHGIVTPSMGLMNPNHFLSVAIWYLFTNRQGWSPESAIGKTLVSSSLIDRVAKDINRRLCEVPVGFKWFVDGLLDGSLGFGGEESAGASFLRMDGTVWTTDKDGIIMDLLAAEITAKTGKDPGMHYKDMTERLGRAYYSRIDSAANSEQKARLSKLSPEDVKASTLAGDPIVAKMTNAPGNNAAIGGLKVTTEQGWFAARPSGTEDVYKIYAESFKGEEHLNQIISEAQKIVSDTF

SEQ ID NO: 2201 - protein, 612 aa, Arthrospira platensis NIES-39
MQLQTKIAAGRATGAFALIDSLKRHGVQHIFGYPGGAILPIYDELYRAEAEGGIQHILVRHEQGASHAADGYARATGRVGVCFGTSGPGATNLVTGIATAHMDSIPMVIITGQVARPAIGTDAFQETDIFGITLPIVKHSYVVREPGDMARIVAEAFHIASTGRRGPVLIDVPKDVGLEEFDYIPVNPGEVSLPGYRPTVKGNVRQINQAIKLIEEAERPLMYVGGGAISAGAHAEISELAELFQIPVTTTLMGKGSFDEKHPLSVGMLGMHGTAYANFAVSECDLLIAVGARFDDRVTGKLDEFASRAKVIHIDIDPAEVGKNRTPEVPIVGDVRQVLIDLLRRCREIGDVGNDNQTQSWLERINRWREDYPLVVPSYSDSLSPQEVIAELGKMAPDAYYTTDVGQHQMWAAQFLKNGPRQWISSAGLGTMGYGIPSAMGAKVALSDREVICIAGDASVQMNIQELATIAQYGINVKTVIINNGWQGMVRQWQQAFYGERYSASNMEIGMPDFEMLARSYGVKGMVVKSRDELHQALAEMLAYEGPVLMDVHVTKDENCYPMVAPGKSNAQMIGLPERRQLEKAVELIYCSNCGAKNVASNNFCPECGTKL

SEQ ID NO: 2202 - protein, 655 aa, Arthrospira platensis NIES-39
MSQPTIESILHEKRLFNPSEDFSKQARIKSMEEYRELYEKAKANPEAFWAELAENELHWFKKWDQVLDWQPPFAKWFVGGKINISYNCLDRHLTTWRKNKAALIWEGEPGDSRTLTYSQLHREVCQMANVIKQLGVKKGDRVGIYMPMIPEAAIAMLACARIGAPHTVIFGGFSAEALKDRLEDAEAKLVITADGGWRKDAIVPLKEQVDKALQAGAPSVDNVLVVQRTEQKIQMEPGRDHWWHDLQQNASGQCPAEEMDSEDMLFILYTSGTTGKPKGVVHTTGGYNLYSHITNQWAFDLQDTDVYWCTADVGWITGHSYIVYGPLSNGATTLMYEGAPRASNPGCLWDVVEKYGVTIFYTAPTAIRALMKMGERHPNARDLSSLRILGTVGEPINPEAWIWYNRVIGQGKCPIVDTWWQTETGGFMITPLPGATPTKPGSATLPFPGIIADVVDTEGEPVTNNSGGYLVVRHPWPGMMRTVYGDPERFRRTYWEYLRPKNGDYVYFAGDGAHRDEDGYFWVMGRVDDVINVSGHRLGTMEVESALVSHPAVAEAAVVGRPDEVKGEEIVAFVTLEGDRQPDEALEKELKQHVVNEIGALARPGEIRFSDDLPKTRSGKIMRRLLRSLASGQEISGDTSTLQDRTVLEKLRGGA

SEQ ID NO: 2203 - protein, 666 aa, Arthrospira platensis NIES-39
MTSPTFTKSAQKLSKLEAIKERSNQLREPLATELLNDRNYLTEDAVQILKFHGSYQQDNRDNRVPGQEKDYQFMLRTRSPGGFIPPELYQTLDHLADEYGNGTLRTTTRQGFQLHGILKKNLKTVLSSIIKSMGSTLGACGDLNRNVMAPPAPYCDRPEYEYAKTYANYIADLLTPQTGAYYEIWLDGEKIVSAEENPEVKAARDRNGNGTIFHEGEEPIYGKHYMPRKFKCAVTVPGDNSVDIYTQDVGLVVITNAAGELEGFNVLAGGGMGRTHRKEETFPRIADEIGYVDRADIYDLMKAIVATQRDYGDRTNRRHARMKYLIEDWGVDKFRAQVEDYFGKPLKPFKPLPPWKYQDYLGWHEQGDGKLFLGISVENGRVKDDGSFRLKAALQKIHQKFELPMLITGNHNIILYEISPKHQQQIDRLLKEHGVLPETEIDPLVRYAMACPAFPTCGLAIAESERAIPSILDRIRVLLDKVGLEQEHFVVRMTGCPNGCARPYMAELGFVGSAPDTYQVWLGGSPNQTRLAEPFMERLALCDLEAVLEPIFVGFKQNRQPSESFGDFCHRVGLDSIRTFVSNYQVNSSMNIETKEIPVPTSPETLSNDATAPQAPVDPSKIRHRVSVRHDIYSQLKDESKRQSKPIVEIATQAIEEYLAKVRAES

SEQ ID NO: 2204 - protein, 661 aa, Arthrospira platensis NIES-39
MTVLEQGTITIHTENIFPIIKKSLYTDHEVFLRELVSNAVDAIAKLKMVARTGEYSGDISNPEITIAIDKDAKTLSVSDTGIGLTADEIKKYINQVAFSSAEEFIQKYQATDGESIIGHFGLGFYSSFMVAKQVEIDTLSYKEGAEAVHWTCDGSPEFKLEDSARTTRGTTVTLTLMDDELEYLETSRIQQLIKTYCDFMPVPIIMDGETINRHTAPWRESPNNLTKEDYLDLYRYLYPFQEEPLLWVHLNTDYPFIVNGILYFPKLRPDVDVTQGNIKLFCNQVFVSDHCEEIIPKFLMPLRGVIDSTDIPLNISRSALQTNRTVRKIADYIAKKVGDRLKEVYRDNRQEYIRCWQDVGTFIKFGSLNDDKFKKQVEEILIFRSTYKPPTESGEAQTPEVQVQSEDGDVWEEVKTEKSFSTDEQGRYYTTLSEYLERNKSRHENRVFYCTDEAAQSTYIELHKSQGLEVLFLDSFIDTHFISFLEREHSEVKFLRVDSELDETLIEKDKPAEIVDPKTNKTRSEQIKELFEKSLNKPRVNIRTESLKSEDTPPAMVLLPEAMRRLQDMTALLQQQKADFPEDHILLVNTAHPLIQNLTNLSQGSIIQAGGSSPSEELAKMICHHVYDLALMAQKGFDAEGMKDFVERSNHVLTRLTERAM

SEQ ID NO: 2205 - protein, 760 aa, Arthrospira platensis NIES-39
MTSEIYTQTRLETATLGYPRIGKSRELKKALEAFWRGKSDAETLIQTRNEVEFKNWETQLHAGIDRIGIGDMSLYDHVLDWSIRLGIIPERFASFSGLDRYFAMARGFDGIRALEMTKWFDTNYHYLVPEIPETLQPPDFSDFLETVQRAQTLLGDRAVPMVLGPVTLLRLSRFEMNQDQAGKQLGDRYLLLLQELQKMGVAEVQIHEPALVLGDAANFKQLYQSTYQSLSQVGLPIHLITYFDDLGDNYPWVMELPVAGISLDFTRGRNLELLQQYGFPDDKELGAGIIDARNVWKIRPDSVLSTLEAISRVTPNLRIQPSASLQFVPYDAQRETKLPEPLRSVLSFAEQKLVEITLLADWADRSYGTQEPDKYLEVIRSQWQTFQEFSPVNQGVKERLQNLTSQDLERTLPYEQRQERQPVLPPFPTTTIGSFPQTSEVRQLRVKLKRGDITQAEYEAAIDAEIAKCIQFQEEAGLDVLVHGEFERTDMVEFFGVQLSGFAFSEHGWVQSYGSRCVRPPIIYGDVARTGPMTVREFKVAKSLTDKIVKGMLTGPVTMINWSFTRTDIPRSEQAMQIALALRDEVADLEAAGAKMVQIDEPALREGLPLKPERWDEYLSWAVDAFRLSAAIAKPQTQIHTHMCYSEFGDIIEHIERLDADVLSIENSRSNNETLFEITDAGYKHQVGNGVYDVHSPAVPSTQEMVQQLKTGVANLPVQQIWVNPDCGLKTRGWEEVIPSLKNMVEAAKILRQEANLTEK

SEQ ID NO: 2206 - protein, 972 aa, Arthrospira platensis NIES-39
MTMTHDPRQDIHHLQGLTPPEVETSRQTHGSNVMTPPPREPAWRQFLGKFDDPVIRILIIAAAIAISLGIVNGNYVEGIGIIVAIALATTLAFLNEYKANQEFDILNRMNDEVPIKVIRDHSFTTIPKKDIVVGDLVIIELGDEIPADGQLIEAVSLRVNEASLTGESEAVKKLASSELVASAELPDSAYPRDRLLRGTVVTDGHGTFQVTAVGDRTEIGQTAKLVCEITNIDTPLKQQLDRLSRLIGVLGLAIAVLIDIALVVRGIVTGNLNLSLGQWYIVALAVSSLIIILVRVWLPIVYDGLEISGSQATVPEWLEDDHAIGWVKSSLIGLLIFGVGIAIGYGGNFIPRNLSDWIPASAATEFVTYFMIAVAVIVVAVPEGLALSVTLSLAYSMRKMTKQNNLVRRMHACETIGAATVICSDKTGTLTMNKMQVQEINFPSFSNNIPSDLLTEAIAANSTANLEQHENQKSKAIGNPTEAALLLWLEQNQIDYLSERNRFEIKQQLAFTPDRKYMATLGRSPIDNQEIMHIKGAPDIVLGHCYSYLSENGVISLTKETRRLISQELKNCDAGGMRTLGFAYIPQPQLEGDDLNVEDRQDVVWLGFVAIADPVRPEVPEAVRQCRQAGIDIKMITGDSLLTAAQIGSQIGIIDENDTSEAYITGSQLRDMDDELASKTLKKVRVIGRARPQDKQRIVQLLQAQGEVVAVTGDGTNDAAALNQAQVGLAMGSGTFVAKEASDIILLDDSFRSVKQAVLWGRSLYQNIQKFILFQLTINVVACIIALLGPFIGINLPFTVIQLLWVNLIMDTFAALALATEPPTERVMEVPPRNPQDFIISKAMSSSIFTVGAAFLVILVGFLLYIQSDDQVTAYELSLFFTSFVMLQFWNLFNAKCFGSKDSVLSQLWQNPSFLAIAGVIFIGQILIVQFGGSIFRTVPLCLTDWLWIIGGTSLVLWIGESNRAIVRWRKS

SEQ ID NO: 2207 - protein, 7000 aa, Oreochromis niloticus
RQTPSPGDGGRGRGLKPGGKGPSPPEEPFGGFKLKPVQLKFIKKLKDIVLQEAESIGSSAVFECEVSPSTAITSWMKDDSNLRESPKHKFTSDGKDRKLHIIDVQLSDTGEYTCVAKNAGKEITCTAKLIVEELPVKWVKELEPETTCIKGQPMYLTCELNKERDVIWKRNGQVLKTKAGKVAVNVIGMQHAVTIQNSTDEDGGAYTCEVDGQEDVKTTTNVKVIETIKDWLVKPLRDQHVKPKAKATFKCELFKDTPNWKWFKGENELTPSDKVEITKDGKDMTLSINNCQPDDVADYTIQVEDRRYTAKLTLGEREAEILKPLSSVEVIEKEEANFDTEISEDDVAGEWKLKGQVLTRSPTCDIKAEGKKRFLTLKNVQLDQAGEVTYQALNAVTSAMLTVKEIEMGFVDPLKDLSVPEKKQAKFECTITKDVSKVIWFRGTEIVTPSPKYEIIDDGKKHMLIINNCEFDDEAQYTIEALGQKSAAQLMVEGMRLSFVQPLQDQTVKEGNSARFDLELSHENVPVVWYRNEVKLHVSRTVLIHVEGKRHTLEMRTLSLDDTCQIKAEAKGIYSMAKLTVVEGDPIFVVKLQDYSATEKEEVTLDCELSKDVPVLWYHEEKEIIASKMVIMRSEGTRRSLVLKKVELSDKGKYACDCGTDKTSANINIEEARDIKVVRPIYGVELFDGETARFEVEISEDDVHGQWKLNGAVLSPSSDVDIIEEGGKHTLILYNCKVSMTGEELPLNFLTPMTDVQVYEKDDARFEVEVSRTPKTFRWLKGSQELQSDEKYEVIQEGNLYVLVIRSAAYDDEAKYMFEAEDKRTTGKLVIQGIRLEFVKTIKDVTVKERETAEFSVELSHDKIPVVWYKNDVRLHPSKVVHMSAQAKVHTLAFKEVTIDDTSMIKVEAMDKSMTAMLTVIEGDAYFTTKLHNYTAVEKDEVKLVCELSKAVADVKWFKDGKEITPSKNIAIITDGKKRILMVRKAEKANIGEYTCDCGSDKTTAKLNIEERDIKVVRPLYSVEVTETETAKFETEISEEDVHGNWKLKGEALHQSADVEIKEEGTRHLLILYNVCMDMAGPVDFSAANARSSAQLRVKARSITLIHPLKDVTVTAGETAIFECELSYEGIAVEWFLGGQRMEASDRVKTRVAGRVHTLTVRDVNLSEAGEVKLTAKDFQTQAQLIVRVYLEPPVEFTKPLEDQTVEEEATATLECEVSRENAEVRWFREGQELRKTKKYDTIVDGRKRALIIHDCSPEDAKLYTCDAKDFKTSCFLEVTRTAPYVEFTKPLQDVEVREKESAKFECEVSRESAKVRWFKDGGEIRKGKKYEIIAKGVQRILIIHKSVFDDEAEYECDARTSKTSGMLTVIEEAARFTKNLSNVEGTETNTVKMICEVSKAGAEVTWYRGDEELPEGGRYEQQTDGRKRILIIRDLRMEDAGDYNCRLSPTVRTSATLKLNELAAEFIARPQNQEVVEGEKAEFSCSVSKDTYEVKWFRGDKEIEAGDKYSIISEGKRRALIVKSCELKDEGGYTAHIGTVKAVADLLVIEKLRIITPIKDTEVKEAGEIVFNCEANTEGAKAKWLKNEETIFESSKYMMAQRDNVFSLRIRDAQKADEAVYTVSLTNHRGEHAKCTASAKVAEEKLRFLEPIEDNETQEKKTISFVCKVNRPGATVRWLKAGQEVTLSKRIVYRADGLKHSLTIKDCIMEDEGEYTAVVGDDKCAAELIISEAPTDFTAQLKDQTITEFEDAEFTCKLSKEKAAVKWYREGREIRAGPRYQMEKEGKTCRLIIKVCRPDDECEYACGMDERRTRARLFVEETPVEIIRPPRDVFEPPGSDIVFEVELNKDRVEVKWMRNNMIIVQGDKYQMISEGKVHRLQVCEIRPRDQGEYRIVAKDKDARAKLELAAVPKIKTTDQNLVTDAGKPFVMTVPYDAYPRADAEWFFEGTSLPVQNIDTSLDKTEYRLKSPAKEDQGRYKVVIKNKHGEGEAFINLDVIDVPGPIKNLRVVDTVDGEVSLAWEEPENDGGSKIIAYVVERRDVKRKTWTVATDRADTPEYCVSGLQKESFYLFRVCARNRVGSGPTVATEDAVQAKNKFDVPDAPENVAVESVNKFGATITWEPPKFDGGSEITAYVIELRDRTSVKWEAALVCAADDRLAMLNDVVENKEYIFRVRAENKAGIGRPSAATNPVKIMDPIATERPSPPLNLNFSDQIKTAVTLTWETPVNNGGSMITGYIIEKCEDGSDKWLRCNARLCPDLSYRVSGLKPGQKYLYRVCAENAAGVSDPAEQLGPLLADDPHVGPTFDLSGFRKGLEVIVPQPLTVRVPITGYPTPVAKWTFGEKELTPADERVSMVTKPTYTELTISPSVRPDKGIYTLQLENDVSSVSGDIDVNVIACPSAPKDFKVAEVTRHHVHLMWEAPEHDGGSPVTHYQIEKREVSRKTWAKVAAGILDLEHTVTDVIEGKEYLFSVSACNKCGPGEPAYIDEPINVSSPATVPDPPENLKWRDKSAKTIFLSWEPPKYDGGAHIKGYVVDKCQRGTDKWEPCGDPIPELKFQVTGLVEGQWYAYRVRAFNKLGASRPCRATDEIQAVDAKEPPEIQLDVKLLAGLTTRAGTKIELPADVKGKPDPRVKWTKADVVLRADNRITIDTQPGHSKVSIDNTTRGDTATYIIEAVNACGRATATIDVNILDKPGPPAALDISEITNESCVLAWNPPRDDGGSPITNYIVESRQTDKEEWVKLSATVKHTTFKATKLTALKEYIFRVSAENQYGIGEPAEHVPITAKYSFDPPGPPTRTTPSDIAKDAVTLTWLEPDEDGGSPITGYWIEKLDPESDKWIRCNKLPITDTTFRVKGLTAKKKYRFRVLAENLAGPGNPSAETDPILIKDPIDPPWAPGKPVIRDIAKTSALLGWTRPEHDGGAKIEGYIIEFQKAGSEEWIKIAEDVPQTEHQLKGLIEKQEYSFRVRAVNKAGESEPSEPSDPVVCKERLYPPSAPQWLEVANITKINADLKWQPPSSDGGSPITNYVVEKRDVRRKAWQTVDTTVKEQKYTVTPLNEGSLYVFRVAAENAVGMGEFCELEDAVLAKDTFTTPGPPYALTVVEVTKRHVELKWEPPNSDGGRPITKYVIEKKEKVGTRWLKCCKTPDRKTQFKVTDVDEGSEVQFQVRAENEAGVGDPSEPTVILTIEDPTSAPSPPLEVVIPDASREHINVTWKPPVKDGGCPVTGYHVEVAEARPELKWLRVNSRPIKELKFRIDDGIKPEKKYVIRVRAINSVGVSDPSDVSDKVATKDPDCAPTMDLEAKDVIVVEGEKLHLNVPYRAIPTPKMVWQKDTVECKAGDRLSLTVEMNSAHLELLKCTRDDAGAYAITLENSLGTATGTVNVKVIGLPGQCKTITSSDVTKNSCKVSWEAPEDDGGTPIVSYTLERREASKKTYMPVMSGENVLTSTVKDLFVNCEYYFRVKAVNKVGAGEYLELQNPVIIEEIKQKPDPPIQVEAHDPTSKSITVTWKAPDYDGGCPIQGYIIEKIEKDGDRYERVTPSLVPGFSYVVMGLKEDMEYQFRVRAENAAGVSEPSRSSQPIKAADPVEKPKVTLHARVQSGLCIKKGEEICIDAYISGSPYPKVTWLRNDEDVTKEPTKKFIPVIKKKKTKAKVPEPEEEFVTPLRERLGIDQTKKGQSALMIRDAVRSDHGSFTIKVENTHGVATASCVVNVLDKPGAPINFTFDEIRNTSVICNWEPPEDDGGSEILNYILEKKDNKKDEIGWITVTSTLKGTSCPVTKLIEGKEYIFRVTAENKYGCGPPCISEPLVAKNQFSPPDAPNTPRVHEVTASTAHISWHEPKDNGSPILGYWIERKEVNSKHWTRVNRALLNSLEVKVTGLMEGLTYIFRVCAENLAGPGPFSDPTDRIVAMDEILPPGPPIPWIVDTGKDSVVVAWKPPLYNGGGDILGYHVEKVLAGEKDWSRSTEFRCKELTYTVTGLTEGADYYIRVLAVNDAGPGAPGVTEPVTVKEPQESPVVDFDDSVKNGVMIKAGESLRLPAVVRGRPQPEVKWAKDEAEIDKERMIVETVGKNSTLFIKKAVRADHGKYQITGTNSSGSKTAETRVDVMDVPGPVVDLKAVTVTKKNIVLTWSDPVDNGGSDIIGYEVLRKDANMKLFRQPIETASCKCDVQGLLAGEEYDFRVIARNKYGDGLPADLGPILAEDPKGTPSAPEKLHYTNRSKNTITLAWQPPRTDGGSPIRGYYVEKMRSDSTEFEVANRKIFTECCGTIENLSENQEYDFRVKAVNEVGEGDPSKRITVKIQDDEIAPSITILKFIKSNAINVRKGAAIDIPAEVRGLPLPTLQWMKDDVVIEKTDEEKMTMETEEVDRTTLRTKIAIPVTIRQDKGSYKLVAENCHGKAQQIIKVEILDRPLPPRNIVVSDIKADSCYLTWDAPEDNGGSEITNYIVERRDASKKKSDFDVLTINLIDRRFGVYKLDLNGTYQFRIKAENKYGVSDGCDSEKVQLRDPFGLPGPPRNPKIIAATATTMTVTWDPPLDNGGSTIQGYWLEKRERGAVYWGRVNRAPVTKPAVKGLQYTVLKLIEGTEYQFRISACNAAGVGPPSEATEYPPSIPGNPEIKDKTKNSVTLTWTPPDKDGGSPIKGYIIEVHEEGSPDWRRVNPADKLHPSTEITVPDLKEGKKCKFKIYAVNSAGNSEPARTGDILVQDILIEPTVTLDVTAHDLLNCRAGTTIKIPATITGRPVPKVTWTFDGTAETEKKNDLHTLPIDSEIHSTDTTSVIEIPACKLNHSGRYIINAESPAGHKVVKVRVSVLDLPGPPRDLKISDVTRGTCRLTWKPPECDGGERVKSYFIEKKTAEGKAWTKVNPACAAQSLVVPDLNEGQEYFFRVRAENRFGFGPYIATIQRTKARDPIHPPDPPTRLKIQSVRKGTVTLTWKAPKNDGGSPVTHYSVDLLCWDSSGTQKESWRRCNRRDVDTTSFKVEDLTEGDEYEFRVMAYNEVGPSRPSSTAGPITIQDQSCAPSIELNEFMEVEQGSDISIVAQIRGCPFPTLTWYKAPPHKSDAKVEVQYDEHINKIVSDDSCTLLIQQGKRPDTGLYTLVASNSLGKASKEMRLNVLGRPGPPSAPIKFEEIGAEKITLSWLPPKDDGGSKVTNYVIWRRVANRKTWVPVTSEPKERIWTVENLMTGHEYVFRIMAQNKYGVGEPLDSEPEVARDLYTVPGQVEKPTVTSVTMDSMTVNWEEPEDDGGSPITGYWLERKETTGKRWTRVTRDPIRPMGLGESFVVSGLIEGSQYLFRVSAINAAGPGLASPPTDPIFARDPITPPSPPTPKVSDWTKSTVDLEWIPPLKDGGSKIIGYWVEHKEEGTEAWVKAKDTEIRGTRFVITGLKTGGKYRFRVIAFNAAGNGEPGEVPEVLEVNDRIVAPEVDLDASVKERIVVHAGGVIRIIAYVSGQPSPDVTWSRDGAALPPEAKVETTAISSSLVIKPCTRKHLGVYILTAKNAGGEKTKKITVEVLDVPGPVGIPLVAENLSSDSCKINWFFPENDGGSPISNFVIEKREAERKAWTSLSYTASRQNAVAHDLTPGKAYFFRVAAENAIGIGPFVETAAEIVIKEPISVPDRPEEVEVTKVTKDLISIAWKAPKYDGGSEITMYILEARMIGKDKFTRLTKENLMDRKYTYDGLREGDTYEFRVIAVNEVGPSKPSFCTKPVTCKDELEPPTIELDFRDKIIIRVGESCLLQGRYTGKPPPSITWYRDDKELKADKHIMFKNTLTTMSLGLMKAEREHSGRYVVVVENSTGSRKGVCNITVVDRPTPPVGPVVFEEVHREYMVISWKPPLDSGGVDVSNYIIEKRDINRETWTTVTSASTKTTCKIPKLTEGREYIMRICAENMYGISDPLESEEMKAKDLFRVPEAPEMPTVREVYGTNALVLWNRPRDGGKPITNYILEKKETTAKRWSRVTRDPLYPATQYRVQDLVEGCEYEFRVMAENELGPGDPSVPSKPILAKDPIVRPSPPVTPEAYDKTKDSVSLKWKMPRHDGRGRIFGYLVEYQKPGAVEWMQANETPEQCPDLHYVVTGLAEGHEYKFRIFTVNAAGKSDPAYVKDTIKVHDRLEEPELLLDANMARDHLAMLGTDITLSATIKGVPTPTVSWKKNDADVPAHITVAVTATGSKVFIPKCVRADSGNYTITVENAAGKKTATVAVLVLNKPSPPRDLVISDVTSESAYLTWKAPEDNGGAVISHYIVQKKDVAAEQWVPVAAANKKLSLMAMYLMEGIQYLFRVAAENQFGRSDYVVTKTPIKAVDPLYPPGPPKNLHHTDADKTEVWLAWEWPDRTGGSEITGFIVEHQEEGQTDWVTFKTVSNNHTHVTGLEEGKTYRFRVKAQNAIGVSRPDTSVPVTCQEKTLPPTIEVDVKLIEGLIVKAGTTIALPAKMVGIPLPTAKWMTDGKEITSEGRYHIQSADSTTTLSIPECQRADTGEYILTVSNPAGSKTVALHVTVLDLPGPPIGPINIMEVTPDYMMIQWRAPKDDGGTPITNYVVEKKDVKKPWEPWSVVSSSGTVTRAKVSRLEKGREYIVRVRAENKIGIGAPLESPPTIAKHMFNPPGPPGLPECSDITENAVTVSWSLPDYDGGSPISGYVVERREMTGKWIRVNKTPVLDLRYRVSGLFEGNTYEFRVFAENIAGISEPSLTSDPIKATRAITKPGPPGNLKLKDWSKSHADICWTKPTRDGGSPILGYVIEAQKSGTAQWDRINKDLVKMCAYRVPGLIEGLEYRIRIRATNKVGDSEPRELPQTILAKDILVPPEVVVDVSCRDSVTVRAGQIISLITRVKGRPDPEITWTKDARALARDKRTQMNNNYPVCELIINDAVRSDYGKYAIVAKNSSGQAQATILVNVLDTPGACQNIKVAYVTKKSCMVSWENPEDNGGTEITQYIIECRQPSQRGWTVVSNDCTKRLIKAPLTESCEYFFRVSAENKIGTGPP

SEQ ID NO: 2208 - protein, 5696 aa, Oreochromis niloticus
RKVRKKVKVDTSKFMTPYLAHSQKMLEQFSHNKYRHAYEMSKGTPPAIVTDTPELIRIRKAQEQLSEVKYRMEGNKARTTSLYDGEAREIAHVKHVSELISKVLYRQKWDETKDRYLLPPDAPELVQAVKNAANYSKKLYTEAWDEDKTMYYPYSDSPELRRVAKAQEVLSDVHYKKGHHERKAKYTSLPDPPELELAKRVSQQRSDLKYKEDYNKNVKGQWCETPYFDVATARVAMENLSDRRYTQHYEDTKDQIYFMQTETPTYEANKKARIAASEVQYKKEYEKKKAESDYNTLPATDNPLLRQLRYAGTILSDKVYKANYEKSRGFSINYCDTPKFQMDSVLKSFSDAHYKDKYENEVKGHYIGSYEDLYMLHCQKVEEMKNEQLYKADYEDIKTRCFFPQTITPEYEAVKKLQQCSDNVYRQHPDTVKFTQVVDSPVQVQAAINAKQLSDLNYKAQYEEIKVKNSLPPDYPFFIQSRVNAFNLSDNCYKYDWEKTKAKKFEIKGDTISILAARAHTNAISDVKYKKEYEKNKGKMVGALSINDDPKMLHSVHVAKIQSDREYKKDYEKVKTKYHTPLDMLSVTLAKKSQAITSMAGYRSISTNYFLPPDSVLLDLAKKANVIQSDNEYKADYNSYTKGTPWVPYGSLEVEKAKKAAEILNEKKYRTHPDKIPFTSIDDHPIMMQAKVNQLQRSDLFYKRGLEEIHQKYSLPPDVPEFLQAKCNAYNISKNYYKLAWQELIAKGYDLKPDAIPIVAAKAARHAASDVQYKKAYEKARGHHVGFRSLQDDPLLVHYMQVAKIQSDKNYKKDYHKAKLKYHTPVDMLSVAHAKQASAVQTYVGYKQHHHKYFLLPDAMGLQLARTMNYNSSDHNYKMDYETSVKGIGWVPIGSLDVEKAKTAAAALNEKKYRQHPDTIKFTSVTDSMNMELAKTNAKIMNVKEYKASGEKFMHTYHLPPDAPQFLQARYNAANISQNYYTYSHRQDLLKGHHVKEDSIPIVAAKTSRNIASNYKYKLAYEKEKGHHVGFRSLQDDPLLVHYMQVAKMQSDKNYKKDYHKAKLKYHTPVDMLSVAHAKQASAVQTMAGYKKIPHSFLLLPDNLHLQLCRNMMAIQSDNVYKSDYNNYSKGIGWVPIGSLDVEKAKTAKAALDERNYRQHPSNFKYTSKTDAMNMTLAMANTKQMDITAYKASGEKFMHTYHLPPDCPEFLQAKFNAQTISESNYRHKWVEDIAKGYDMKPDAIPILHAKHGRHIASNVQYKKAYEKARGHHVGFRSLQDDPLLVHYMEVAKIQSDKNYKKDYHKAKLKYHTPVDMLSVAHAKQASAVQTMAGYKKIPHSYLLLPDNLQLRLCRTMNLQSSDNDYKSDWNNFVKGIGWVPIGSLAVETAKVGGQIQSEKKYRTHPSNFKFSKLMDSMDLALASANNQIMNKVQYFQKAYTAAWEKDKVTTHVMPDAPEILLAKANALNMSNKLYKAGVVEMANKGYNLKADAIPILAAKAGTTIASNYKYKLAYEKARGHHVGFRSLQDDPLLVHYMQVAKMQSDKNYKKDYHKAKLKYHTPVDMLSVLHAKQASAAQTMAGYRHIQHTNALLPDAMNLELARNMQLIASDNQYKSEYEHYIKGIGWVPIGSLSVETAKVGGQILSEKKYRTHPSNLKYSKLMDSMDLTLATANNQIMNKKAYTAAWEKDKLSVHIMPDAPEILLAKANALNMSNKLYKAGVVEMANKGYNLKGDAIPILAAKAGTTIASNYKYKLAYEKARGHHVGFRSLQDDPLLVHYMEVAKIQSDKNYKKDYHKAKLKYHTPVDMLSVVHAKQASAAQTMAGYRHIQHTNALLPDAMNLELARNMQFIASDNQYKSEYEHYIKGIGWVPIGSLDVEKVKSAGKALSEKLYRQPPSNFKFTKDMHSMDLTLATNNNQIMDKQSYIKAWEKDKTSIHVMPDAMGIVLARENRKNYSEKLYKLDHELSKKKGHNLRGDAIAVQAAKASTVIASDYKYKTGYRKQVGHHIGALSIQDDPLLMLALNSAKIASDALYKKDFNKSKTKFHLPVDMMAFELAKKNQIQVNHFNYITRLHNWTCLPDSNDVVQARHAYNLQSDVIIYVIIILLYCRTHVFYYISFLLSASFDHCKSFLVFVFLFQAIYKEDLKMLQGIGWVPIGSLDVEKVKKAGEILSEKKYRQLAKKCQIQVNDFNYRTHLHQWTCLPDSNDVVQARHAYDLQSDAVYKADLKWLQGLGWVPIGSLDVEKAKKAAEVLSERKYRQHPSKVPFTSPVDAMNLVLAKNNALTMNKRLYTEAWEKDKTTLHIKPDTPEIVLSQQNAITMSKVSIISEHDLLCQQEYFQNIFNIYSNFKKLLSVLIKTLSFIQNALQTLSLYNEVPKLEHFKKNCICLLLQKLYRQGYEETIKKGYFLPVDAISVKAAKASREIISDYKYKTGYRKQVGHHIGALSVKDDPLIVLALNSAKIASDALYKKDFNKSKTKFHLPVDMLAKKCQIQVNDFNYRTHLHQWTCLPDSNDVVQARKAYNLQSDAVYKADLDEVVGVGWIPIGSLDVLKAKNAAKILSDRLYKQKPDTLKYKTDMTSMPLVLAKTNADIMNKRNYIAAWDAEKIKVHVPPDIPELLLAKANAYNISKKIYKEAVEDIFRKGYDMKPDAVSVVAAKRAREIISDYKYKTGYRKQVGHHIGALSVKDDPLIVLALNSGKIASDVLYKKDFNKSKTKFHLPVDMLNLELAKKCQIQVNDFNYRTHLHNWTCLPDSNDVVQARKAYDLQSDAVYKADMEWIKGMGWVPIGSVDVEKAKKAAEILSERKYRQHPSNFKFTANTADMPYALAQANAQVMDKKAYIAAWEKDKTNIHVMPDTPEILLAQQNKLNTSLKFYREGYMEMINKGYYLPKDAVSVIAAKASRDIVSDYKYKAGFRKQCGHHIGALSVRDDPLIMLAANAAKIASDNVYKKDFNKTKTKFHLPVDMLTVELAKKCQQQVNDFNYRTYLHQWTCLPDSNDVVQARKVYDLQSDAVYKADLEWLRGCGWSPQDCIDVVKVKHAQTVLNERLYRQPPSTVKFTSVVDLPAIVLSKQNAENLSDRKYREVWDKDKLTIHVPPDTPTFELAKANAVNISNKLYTKAWDDQKAKAYHVKEDAVSVLKAKASRDISSDYKYKEGYRKQVGHHIGALSVKDDPLIVLALNSGKIASDVLYKKDFNKSKTKFHLPVDMLNLELAKKCQIQVNDFNYRTHLHQWTCLPDSNDVVQARKAYDLQSDAVYKADMEWIRGCGWIPHESVEVLKVKHAQKILADRGYRIKLDEQQFMVPADRIDLVRARNAAEVLNEAKYREAWHQDKTKYSLVDTPTLATAREVAKNVHPKLYTKEWDKVKATGYFMPPDAVPIKQCIQTTKVQSKHKYLEGYRKQVGHHIGALSVQDDPLLMLALNSAKIASDALYKKDFNKSKTKFNLPVDMLQFELAKKCQIQVNDDNYRTRLHQWTCLPDQNDVIQARKAYDLQSDHVYKSDLEWLRGCGWVAADSVEHVKVKKAQEILNDRLYKKNAQEGFGRFTLVVDRPEIVLAKINAANLSDLKYKETFNAEKGHYIGSDDTPQLAHSREVAKIISEKLYKSTWDESKATSYQLNHEYIPLVISKKSRDIASDVKYKDTHEKAKGHYMAGTLVDFPEVMRCGQQEKNKALRVYQKDYHQTKTKIHIPSDIIANQVAKRCQDMLSDVLYRTYLHQWTCHPDQEDAIRARKTNEILSDVFYKDDLNWMKGIGCYVWDTPEILRAKKSYDLQSDLKYRENAKKEFNNYSIVTDTPSYVTAVLGHTWASELNYREAYQKEKHVYTTVLDTHDYVRCQNFKYIFSNKNYTSTWDKIKAKSYQIPHDANALQHAKQQKIILSNVKYKEDYEKFKSLYSLPKSLEDDPGTARCVKAGKLVLDRLYKENYEKTKAKNHIPPDMLDILSARSTQNAVSEINYRKYLHQWICMPDMQMYVQARKVNEQLSDIFYKDDLNWLKGIGCYAWDTPEILRVKHAGNLQSENKYRAKGKDAFKEYSVVTETPVYETAKQNAQNLSDLHYRYDYNANIKGTNTAPAVTIETERARQANYIQSDNWYKEANKSFMPTGYSLPHDTPLIKQAKLNTVVSSNVKYKEAYEMVKAKGYTLHPEGVNFVTARKANKIINERLYRETYHKQKDKIHTTYDTPDIKQVKMNQEHLSDLRYKEKYYNSRGQLISMPITPELMHYHHVNEITSDLKYKEDLMWLRGIGCFLYNTPEMVRVRDVTKFRVNYPVEAKKNLDKFSVVLDTPEYKRVTELKTHMSNLIYKAQSKEDMAKVTTTADSVDIQRAKWAQQLTNQYQYVDLAAKQRAHFTPEINTPNMGHARKMKVVYSDNKYKEQYQKMKHRYTAIADTPLLIRAKKSYLQSSDLRYKETFELSKGHYRTVKDALDITYHRRVTDDISEVKYREKYISSLGTWKSIPDRPEFFFSKIVSGNVSDVKYKEDLDWLKGIGCFVWDTPELVQAERNKALYSERLYKASYEKNRGNFKYTSDTPFFQAAKQASVLINDRAYRAEYEKTKDKFTITTDDPRYQLARENRKMSQKMYKSRAKDLLKGGCNELLRPDILTALYQTTMGSKWKYREQYERAKDKFTSVLETPEYEAHKRSKKISDIIYKMEYNKTKAKAYTLPYDTPHQQHMKKVKELTSNLKYKEVYEKSKAHINMDPEAHEIRAAKEAYKNISNLDYKKKYEATKNQWIWTVDRPDFVNAAKNSLQQSDVEYKYDKEILKGCVIPVVDDKLTLLCMKNAEMASEVKYKHKYEKEKGHYIPVLDTPQILHAKAVRVLASESKYKEASKKEMQSGSFTTLSDTRDTAHSRTVNKLVSGNVYKEKFEKEKGKSIYNHMIVPPDVQHAMDVAKSQSNVAYKKDAKASLHYTTVVDRPDIKKATQAAKLISQIGYREKAREEASRGGSLAHRPDIALATEVSKLTSQVEAKPSLHGAASYDTPLMRHIKKMSAVTSDVKYKEKFDKEMKGKKPQYDLKESKIYKTLKEANVLASEVKYKGDLKKIHKPVTDMAESLSMKHITSTSRLSSDYCYKKKFEESKGHYHMIPDTPEQLHHKEASELQSNVKYKEKYEKEKGKPMLDFETPTYVTAKEAQHMQSQKDYKKDFEEYMRGKNLSGLEVTPAMIHVRHATKIASEKEYRKDLEEGVKGKGLTVLEETPELLRARNATQILCEREYKKSLEQEIKGKGMLALATDTPDFMRAKNATEILSQSKYKQTAEMDRASYTTVIDTPDIIHAQQMKNIVSQKKYKEEAEKTMSHYVPVLDTPEMQRVRENQKNFSTLQYQTDLKNIKGKVSTVKDTPEMLRVKENTKNFSLIKYKDSLGRGTAIPDLPEVKRVKETQKHISSVLYKDSSAKGTPVVFTPEMERVKRNQENISSVLYSDSFRKQVQGKAAFVLDTPEMRRVRETQRIISGVRYHEDFEKSKGSFTPTTTDLVTERVKKNTQDFSDISYRGIQRRVVEMERRRAIEHDQEGITDLRVWRTNPGSVFDYDPAEDNIQSRSLHMMSVQAQRRSKEHSRSTSALSGGADEKSEVSQDADHHMSLYSNGFMTSSIGYQHATVKTVELQQRSSSVATQQTTVSSIPSHPSTTGKTVRAMYDYTAADSDEVSFKDGDVIVNVQAIDEGWMYGTVQRTGKTGMLPANYVEAI

SEQ ID NO: 2209 - protein, 1934 aa, Oreochromis niloticus
MSTDAEMAVYGKAAIYLRKPEKERIEAQNKPFDAKSACYVADAKELYLKGTIIKKDGGKVTVKVLDTQEERTVKEEDVSPMNPPKFDKIEDMAMMTHLNEASVLYNLKERYAAWMIYTYSGLFCATVNPYKWLPVYDSEVVAAYRGKKRMEAPPHIFSVSDNAYQFMLTDRENQSVLITGESGAGKTVNTKRVIQYFATISVGGDKKKDSGKMQGSLEDQIIAANPLLEAYGNAKTVRNDNSSRFGKFIRIHFGQTGKLASADIETYLLEKSRVTFQLPDERGYHIFYQMMTNHKPELIEMALITTNPYDFPMCSMGQITVASIDDKVELEATDNAIDILGFSNEEKMSIYKMTGAVLHHGNMKFKQKQREEQAEPDGTEDADKVAYLLGLNSADMLKALCYPRVKVGNEYVTKGQTVPQVLNSVTALAKSIYEKMFLWMVIRINQMLDTKQQRNFFIGVLDIAGFEIFDFNTLEQLCINFTNEKLQQFFNHHMFVLEQEEYKKEGIVWEFIDFGMDLAACIELIEKPMGIFSILEEECMFPKATDTSFKNKLYDQHLGKCKAFEKPKPAKGKAEAHFSLVHYAGTVDYNISGWLDKNKDPLNESVLQLYQKSSVKLLGHLYPPVVEEAGGAKKGGKKKGGSMQTVSSQFRENLGKLMTNLRSTHPHFVRCLIPNESKTPGLMENFLVIHQLRCNGVLEGIRICRKGFPSRILYGDFKQRYKVLNASVIPEGQFIDNKKAAEKLLGSIDIDHDQYRFGHTKVFFKAGLLGTLEEMRDEKLAALVTMTQAVCRGFLMRKEFVKMMERRESIFTIQYNIRSFMNVKHWPWMKVYYKIKPLLKSAETEKELQQMKENYEKMKTDLATALAKKKEIEEKMVSLLQEKNDLQLQVASESENLSDAEERCEGLIKSKIQLEAKLKEVTERLEDEEEINAELTGKKRKLEDECSELKKDIDDLELTLAKVEKEKHATENKVKNLTEEMASQDESIAKLTKEKKALQEAHQQTLDDLQSEEDKVNTLTKSKTKLEQQVDDLEGSLEQEKKLRMDLERAKRKLEGDLKLAQESIMDLENDKQQSDEKLKKKDFETSQLLSKIEDEQSLGAQLQKKIKELQARIEELEEEIEAERAARAKVEKQRADLSRELEEISERLEEAGGATAAQIEMNKKREAEFQKLRRDLEEATLQHEATAAALRKKQADSVAELGEQIDNLQRVKQKLEKEKSEYKMEIDDLSSNMEAVAKAKGNLEKMCRTLEDQLSELKAKNDENVRQINDLGAQKARLLTENGEFSRQIEEKEALVSQLTRGKQAFTQQIEELKRHTEEEIKAKNALAHALQSARHDCDLLREQFEEEQEAKAELQRSMSKANSEVAQWRSKYETDAIQRTEELEEAKKKLAQRLQEAEEQIEAVNSKCASLEKTKQRLQSEVEDLMIDVERANGLAANLDKKQRNFDKVLAEWKQKYEEGQAEVEGAQKEARSLSTELFKMKNSYEEALDQLETMKRENKNLQQEISDLTEQIGETGKSIHELEKSKKQVETEKAEIQTALEEAEGTLEHEESKILRVQLELNQVKGEVDRKLAEKDEEIEQIKRNSQRVIDSMQSTLDSEVRSRNDALRIKKKMEGDLNEMEIQLSHANRQAAESQKQLRNVQAQLKDAQLHLDDAVRSQDDLKEQAAMVERRNGLMVAEIEELRAALEQTERSRKIAEQELVDASERVGLLHSQNTSLLNTKKKLEADLVQIQSEVEDTVQEARNAEEKAKKAITDAAVMAEELKKEQDTSAHLERMKKNLEAAVKDLQHRLDEAENLAMKGGKKQLQKLESRVRELEAEVEAEQRRGADAVKGVRKYERRVKELTYQTEEDKKNINRLQDLVDKLQLKVKAYKRQAEEAEEQANVHLSKYRKLQHELEEAEERADIAESQVNKLRAKSRDSGKGKDAAE

SEQ ID NO: 2210 - protein, 1525 aa, Oreochromis niloticus
MSTDAEMEAYGPAAIYLRKPEKERLEAQNTPFDAKTAYFVTDADDMYVKGKLIKREGGKATVETLTGKTVTVKEDDIHPMNPPKFDKIEDMAMMTHLNEPAVLFNLKERFASWMIYTYSGLFCVVVNPYKWLPVYDAQVVVAYRGKKRIEAPPHIFSISDNAYQFMLTDRENQSILITGESGAGKTVNTKRVIQYFATIAVAGAKKAETSGKMQGSLEDQIIAANPLLEAYGNAKTVRNDNSSRFGKFIRIHFGSTGKLASADIETYLLEKSRVTFQLSAERSYHIFYQLMTGHKPELLEALLITTNPYDYPMISQGEITVKSINDVEEFIATDTAIDILGFTADEKAGIYKLTGAVMHHGNMKFKQKQREEQAEPDGTEEADKIAYLMGLNSADMLKALCYPRVKVGNEFVTKGQTVPQVNNAVSALCKSVYEKMFLWMVIRINEMLDTKQPRQFFIGVLDIAGFEIFDFNSLEQLCINFTNEKLQQFFNHHMFVLEQEEYKKEGIEWEFIDFGMDLAACIELIEKPMGIFSILEEECMFPKATDTSFKNKLHDQHLGKTKAFEKPKPAKGKAEAHFSLVHYAGTVDYNISGWLDKNKDPLNDSVVQLYQKSSNKLLCFLYAAHAGADDASGGGKKGGGKKKGGSFQTVSALFRENLGKLMTNLRSTHPHFVRCLIPNESKTPGLMENHLVIHQLRCNGVLEGIRICRKGFPSRILYGDFKQRYKVLNASVIPEGQFIDNKKASEKLLGSIDVDHTQYKFGHMKLAQESIMDLENDKQQSDEKIKKKDFEISQLLSKIEDEQSLGAQLQKKIKELQARIEELEEEIEAERAARAKVEKQRADLSRELEEISERLEEAGGATAAQIEMNKKREAEFQKKLRRDLEEATLQHEATAAALRKKQADTVAELGEQIDNLQRVKQKLEKEKSEYKMEIDDLSSNMEAVAKAKGNLEKMCRTLEDQLSELKSKNDENVRQLNDMSAQRARLQTENGEFSRQLEEKEALISQLTRGKQAYTQQIEELKRHTEEEVKAKNALAHALQSARHDCDLLREQFEEEQEAKAELQRGMSKANSEVAQWRSKYETDAIQRTEELEEAKKKLAQRLQEAEESIEAVNSKCASLEKTKQRLQGEVEDLMTDVERANSLAANLDKKQRNFDKVLAEWKQKYEESQAELEGAQKEARSLSTELFKMKNSYEEALDDALRVKKKMEGDLNEMEIQLSHANRQAAEAQKQLRNVQGQLKDAQLHLDEAVRGQEDMKEQVAMVERRNGLMIAEIEELRAALEQTERGRKVAEQELVDASERVGLLHSQNTSLLNTKKKLEADFVQIQSEVDDAVQEARNAEEKAKKAITDAAMMAEELKKEQDTSAHLERMKKNLEVTVKDLQHRLDEAENLAMKGGKKQLQKLESRVRELEAELEAEQRRGVDAVKGVRKYERRVKELTYQTEEDKKNVTRLQDLVDKLQLKVKAYKRQAEEAEEQANTHMSRLRKVQHELEEAQERADIAESQVNKLRAKSRDVGKGSDSAE

SEQ ID NO: 2211 - protein, 7000 aa, Oreochromis niloticus
MSTQAPTFTQPLQSVVALEGSAATFEAQISGSPVPEVSWFRDGQVLSTTTLPGIQILFSDGRAVLRIPAVTAAHSGRFSVRATNGAGQATSTAELLVTVETAPPNFLQRLQSLTVRQGSQVRLDVRVTGIPTPAVKFYREGAEIQSSADFRILQDGDLYTLLIAEAFPEDSGTYSVTATNNSGRATSTAELLVQGEEAVPAKKLKTVSTSQITASQSRVQRKVETSFQASTKREIHAGEVMITQHLAHKTPPRVPPKPTSKSPPSYVSKVTAGRQQSPSPVRHVKGPTPTPVRPVSPSTKLSVSPIRPVKSPIMTRKQKVVSTSAEVLPPWKQGDYATEASYTSMASMTAVSSTTQLHMQKHWEQQVAATREVRVAQPACWLTQLHQYIQPDIFVLPWLLAVASNEGMAVVKNSKSVCKQEVSVRSFRNHIFKSQVEDVGEKKAEAVATVVAAVDLARVLKPVHGEGGRKEEEEDVELRIKQQAAATAEKQVIATKTLPIEPAVSAEQHRVQVSQIQRTTEIFSCVDTGVVQPPVPHFTVSKVSVPKHEPRHEVSLAGSAIATLHKELSSPSTPRKIIKPVKSPSPSRQAAVEVHVIPEPFLPPFRDVRYKTQLDSRGAYAFSEEEWTIFKLSCWFLQEVAAVPTRSQEPVVPPTLIAGLKNLTVTEGESVTLECKISSHPSPVIIWFREDYKIESSIDFQISYEHGFARLIIREAFAEDSGRFTCTATNEAGTVSTSCYLLVKVSEEIESREETAVTEIAITQEKTVAAEAKLQTVTEFSAGEPAAPFFIKKPTVQKLVEGGSVVFECQVGGNPRPHIIWKKNGVLLTTGYRYKVAYKETGECKLEISMTFADDAGEYSIFAKNPHGEASASTSLLEEEEYEAHMKQHDVTYKTEVTTTVVQEPSVVMSQYELEQRRTITPMSFVSETEFLISAFEERIIQKIELCIMRITYKELVAEDGELVVTIADEEAAQPAFDTPVKNYRIMEGAGVTFHCKMVGNPLPKIAWYKDGQRIRPSGRYQIEVLQDGRASLRLPVVLPEDEGVYTAFATNMKGNAVSSGKLYVEASEAVTPQRYTPQPAVQRIRSTSPRSLSRSPGRSSSRSPRRSPARRFDETDEAQLERLYKPVFVMKPSSIKCSEGQTARFDLKVVGRPMPDTYWFHNGQQVINDNTHKIVIKEDGTQSLIIVPAMPQDSGEWTVVAQNRAGRASLSVTLTVDAQETLARPQFVEKLKNITVKQGTLVELAVKAIGNPLPDIVWLKNSDIITPHKHPQIKIDGTKGEAKFQIPSASGSDSAWYTATAINKAGRDTTRCRVNVEVDFAAPQTERKLIIPRGTYKAKEIAAPELEPLHLRYGQEQWEEGDLYDKEKQQKPQFKKKLTSIRMKCFGPAHFECRLTPIGDPTMVVEWLHDGKPLAAANRLHMVNEFGYCSLDYEVAYARDSGVITCRATNKFGVDQTSATLIVKDEKGLVEETQLPEGRKGAYRMDEIERVAHEGGPAGVGADEESEKTKPDIVLLPEPARVLEGDIARFRCRVTGYPAPKVNWYLNGQLIRKSKRYRLRYDGIYYLEIVDIKSYDSGEVRVVADNPLGTAEHTVKLEIEQREDFRSVLRRAPEPKLAEATHEPGKIGFDIVKMDRPSEASQDREVVKLRKTQRIVHEKTSEESEELKSKFKRRTEEGFYESISAVELKSRKRDDSYEDLLRKTKEELLHHMKEKEEAERKKMEEQGKVTIPTIKPERVLLSPSMEAPKILERIASKTVAPMDEVRFRVRVVGRPEPECQWFKNGIQLEKSDRIYWYWPEDNVCELVIRDVETQDSASIMVKAINIAGESSSHAFLLVQAKTAVSFTQNLEDASAKEKDTMVTFECETNEPFVRVKWFKNNMEIFSGDKYRMHSDRKVHFLSVLMIEMRDDAEYTCVISDDENTRTSARLHVEGAALELIKHMENIEVPESYAGEFEVELSREDAEGSWLFGDKVLSPSNKYIISSRRGRHTLSVKDVRKEDQGKYTFVCGDLKTSASLKMKLRPVTLMQPLTDLIVCEGDIAQLEVRFSQENVEGTWMKNGQAISASERIHIVIDKMVHKLLVENVSTEDAALYSFVVPAQDISTSGKLSVQTIDIVVPLKDVSSIEGTKAVLEAKISAQDISSVKWYHNDKLLTPSDRIQMVAKGAKQRLVFTRTFASDQGHYKLVVGKVDTSCSLTVEEVHIVKHMEDKVCSESQNVTFNVEVSHPGIDSIWTFRNQQIKPGPKSKIESKGKAYSLTVIDAMKDEEGQYMFHAGEKTSSAKLTVSGGAITRPLQDVTVAESQTAELECEVANANAEGKWLKEGQPIDFNENVVSEVNGAIRRLIINITRPQDVGEYTYQVANSKTTANLRVEGVKIKKTLRNQTVTETQEAVFTLELTHPDVKGSQWIKNGVELQNSEKYEIISSGVVQTLKVKDCNIQDESVYSFKLGKLSANARLNVEKIKIVKKIKDATSLLDGTASFEMSLSHDNIPVRWMFKGLELTSSEKCKILSERKAHKLILKNLDSSDAGEYVAVVGHLQCSAVLTVEALQVTKPMKSVEVPETQVATFECEVSHFNVPSTWLKNGVEIEMSDKFRIVVQGKLHQLKIMNTSRDDSAEYTFVCGNDQVSATLTVNPVLITSMLKDLNAQERDTITFEVTVNYEGITYKWLKNGVEIKSSDRCQVRSRQLTHSLTIRNVHFGDGGEYKFVAGSGATTANLFVEARVIEFTKKIKDIKITEKKKAVFECEVSEPNIQVMWMKDGQEMDMSERYIVTAEKYVHRLVIQTVRMSDAGEYSVVAGSSVSKARLTVEGRDIRISEPPEREITVLEKHRATFEFEVNEEDVEGHWLKNGVEIQFSMEDRFNYVTIRKLHRLTISETYRSDAGEYTFIAGKNRSTMQLRINIPEPPQILRHMEPQSVEAGKPARFSVQVSGVPQPQVFWYKNSQALSAGFKCKFLHDGNEHTLLLIEVFPEDAAVYTCEAKNEYGTATSTATLNVEVSEVVSPDSPATVAPPVIISPIASTSACEGAPACFQCKVRGDDVKISWFHKKKEVKQSEFFRISQFDDSCQLEISRVYPEDDGEYTCMATNNGGTVSCSATLTLDGTEKTSDDKHSEKLEEEKVSATVPPVFRQKITPLEINVGSHTKFECEIEEAPDVTFKWYKSGTEIRQSEKYRIISCHTSSTLELLNPVKADSGEYTCKASNQHGTDSCTASLIVTEPPEFLLKPPANKFVKQGESLRLECKVSGTVPLKITWYKNDTKVTDGGNYRTSFVDSVAVLELVSTSFEDDGVYTCEAQNDAGSVSCSTTLTIKDPPSFVKIPQPVEGLKGKDVSLYCEMSGTAPFQITWFKDRKPLMESRKFKLVSEGSSATLHVIGIEPSDAGEYECKVSNSVGSDTCHTSIKLREPPSFVKRLSNMTVILGGEVTLVATVKGSEPITVSWVQDKDHILRDSDNRKITYENNQVAVKIFNADATTAGKYTCQLRNDAGSVECFANLTVLEPAKIVDKPDALSVTAGDMAALEVKVCGTPELIPKWFKDGAELASGRKYKISFSRMISSLNVLSAEKVDSGEYTFEIMNEVGKDLSKINLTVLETDKTIPPTFSRKLKDCTTVVGKPLEMECKVSGSSPFTISWYHNDEEIKSGPNYEISFSDNNCTLKVLTLKLADSGAYKCKAVNKAGTTETTAFLVVRDPEPPTFVVPPQPVEAMPGSNVTFSAMVKGSAPLKLKWFRGTKEIVAGHGYDFSLDDNKVLLELYNVDKSHAGEYTCQIINDAGKESYPVNLTVKEPATFSKKLKDISVEKGKPLTLECTYTGTPMITVSWYKDGQQIFASYKYNITTTESSCILECLSTDDKEAAGRFCCQVCNDAGKDTCEAVVSILEPPYFTESLEPMEVTAGDAVCLKCQVAGTPEIKVSWFKADGKVRSSPTCKLEYTKGVACLKLSKATKSDIGEYTCKAENRIGSASSSCRLNVLEAKTPPSFPKKITSLQQTEGQPVRFECRVAGSLPIEVSWLKDGKPLSQGEEFSMLYDDNTAVLQINNSEMRHSGEYTCVATNSVGSASCRAKLTLQEPRYPPVFDRKLSLQEVTVGDSIELECHMTGSAPIKVTWSKDHKDIRSGGNYKISCVDNTPHLTILKADKSDTGRYFCHASNDMGKDSCSSDITVKERKNPPVFTKKPSEHIEDMEGKLVKIEGRVSGSQPMSVSWFKDDTEIQSSDKYDISFKSNVAVLCIKNSQVNDSGRYSCQASNEAGKASCDVTVGISEAKKPPVFDVPLKPATVDEGEKLILRCHVCGSSPLKIQWMKDRKELTPSSSTRISFSDGTACLEISTVSKLNAGDYLCKATNEAGSEFCKAKVTVKAEAPAASPSKKMDNLFFIEEPKTAHVTEKGTATFIAKVGGDPIPSVKWMKGKWRQVTHGGRISIEQKGQEAKLEIREVTKSDSGQYRCVASNKHGEIECSTDMHVEEKKDVAMLEGDLRAKLKKTPSKQKSPQEEKDIDIVELLRNVDPKEYEKYARMYGITDYRGLLHAIEQLKKERAEESGRQEVDRGDRESDEDMARLVADLQKRMERTEPVTVVKDISNQSVFINEEAVFECEIKINYPEITLSWYKGTQKLDTSDKYNITISGDRHLLRVKNCQSSDQGNYRVVCGPHISSAKLSVMEVEVEKHLQDTMGKEGQSCTMSCQMSIPNVEAQWFKNGKQLKMKDRYTSEVKHKVQKLLIRDLKPEDQGRYTCKYQQLESSADLWVEAEQIHFTKRIHNIEVNERQSATFECEVSFDNAIVSWYKDTWELKESPKYNFRSEGRRHFMVIQNVTVEDEGVYSVIVRLEPRGEAKSTAELYLSGKEIELAMVPIDMPDSSVQRPEVPTRADFIHCLLSLLKLPEKISESVPERPTEKVLKPKKGMKEIPKLEPEDLPEKVPEKPHLLKHRTAASVEKIEEEKWERFEETSFEPKKRAKRTETESKERHTKVHYRQQGFDTGKREKRNSSFRREVEEEQEIIILKKIPSVPHKEPEQEELPLVTKTTVVNVEEMVHKKTPKTPKEEESAPPSTALKKVKKLPLDEVEPEVVKLKPFEKPLKPAEDPEKDKKKGERLPRQVETTEPPKQSEKEPVEVKELPAKVPKPGDQKKSPEKEPEEDKRPKKKPAEEKERPTDDLPKRHTSPAETPEERKQKAKPKKPEIPEAPEEKPVKPEKVDVAPLEKTILSVPAPAEKPEKVLEEKKPLQEKEEEVSLKPVEQLKKVELKKTPSPKATSRMKSKQTPSPGEGRGRGLRPGGKGPPPPEEPFAGFKLKAVPLKFIKKLQNIVLQEAESIGSSAVFECEVSPSTAVTSWMKDGSNLRESPKHKFTSDGKDRKLNIIDVQLSDTGEYTCVAKNAGKEISCTAKLIVEELPVKWIKELEEETSAIKGQPVYMTCELNKERDVIWKKNGEVLKKKEGKIQINIIGMQHAVTIQNSTEEDAGVFSCEVAGQEDVKTTTNVKVIEIVKDWIVRPLRDQHVKPKAAATFKCELFKETPNWKWLKGENEVQPSDKIEIKKEGKELTLVIKNCQPDDVAEYALEVEGRIYTAKLTLGEREAEILKPLVSVEVVEKEDAMFETEISEDDIPGEWKLKGEVLTRSPTCDIQMEGTVRRLKLKNCQLDQAGEVTYTALNAITSAMLNVKEVEMDFVVPLKDVSVPEKKQAKFECTITKDVFKVMWYKGADIITQDQKYDIIDDGKKHMLIINCCEFDDEDEYMIEVLGKTSKARLTVEGIRLKFISPIKDQTVKEGKTARFELELSHENIPITWYKNDNKIHPSRTVVIHVDGKKHALEMREVTLDDICQIKAEAKGILSMANLTVIEGDPYFTVKLQDYTAVEKDEVVLDCELSKDVDVMWYHNEAEIKASKTVNIKAEGKRRVLIIKRVGDKDKGQYLCDCGTDKTTATLHIEARHIKVVRPMYGAEVFDGETARFEVELSEDDVHGQWKLNGELLSPSTDVEIVEDGAKHTLVLYNCRVPQTGEVMFTAANAKCSANLKVKESTEVPVSFITPLADVHVYEKDEAKFELEISREPKSFRWLKGSQELSTDDKFELHVEGKRHSLIVKSARYEDEGKYMFEAEDKRTSGKLMIKGIRLAFIKPIRDVTVKERETAEFSVELSHEKIPVVWYKNDVRLHPSKVVHMSEEGKVHTLAFKEVTIDDTSMIKVEAMGKTSEAMLTVLEGDLYFTVKLQNYTAVEKDEVILSCELSKAAAEVKWFKDGEEIFPSKNISFKSDGKKHMLVIKKAAKSNMGAYSCDCGTDKTTADLNIEERDIKVVRPLHSVEVTETETAKFETEISEEDLHATWKLKGETLHPSANVEIKEEATRHLLILYNCKMDMAGSVDFAAANAKSSAQLRVKARVIGLQRPLKDVTVTAGETATFECELSYEGIAVEWFLGGTKLEPSDRVVLKAEGKVHTLTLRNVEQNEAGQIKLTAKDFQTEASLTVKEPPVEFSKPLEDQTVEEEATATLECEVSRENAEVRWFRDGQEIRKTKKYEMIIDGCKRALVIHDCTLDDSKTYACDAKDFKTSCFLNVEPPHIEFTKPLHDVEVVEKESARFECEVSREDVKVRWFKDGNEIRKGKKYEIIAQGRQHILIIHKSVFDDEAEYECDAKTSKSSGMLTVVEEEARFTKNLFNVEGTETDSVKLICEVSKPSADVIWYKGDKELPEGGRYEQTVDGKRRILLIKDLNMSDAGEYNCRLSPSNKTSGNLKINELAAEFISRPQSLEVVEGEKAAFTCSVSKETYEVKWMKDDVELEAGEKYQIVTDGKRRTLEIKDCELKDEGGYIVMIGPTRASADLTVLEKLKIITPLKDTEGKEGQEVVLNCEVNTEGAKAKWLKNDDTIFESSKYVITQRDNVFSLRIKDVQKGDESNYSINLTNQRGEHAKSHCSLTIREESLRIVVPPEDIDTQEKRTISFSCKVNRPNATLKWMKAGEEITFSKRIVYRVDKDKHTLTIKDCTLADEGEYTAVAGDDKATAE

SEQ ID NO: 2212 - protein, 1081 aa, Oreochromis niloticus
MSTDAEMEQYGPAAIYLRKPERERIEAQTAPFDAKTAYFVAVPDEMYVKGKLVKKEGGKATVDTLGGKTVTVKEDDIHPMNPPKFDKIEDMAMMTHLNEPAVLFNLKERFASWMIYTYSGLFCVVVNPYKWLPVYDAQVVVAYRGKKRVEAPPHIFSISDNAYQFMLTDRENQSILITGESGAGKTVNTKRVIQYFAIIAMTASKKAEPTPGKMQGSLEDQIIAANPLLEAYGNAKTVRNDNSSRFGKFIRIHFGTTGKLASADIETYLLEKSRVTFQLSAERSYHIFYQLMTGHKPELLEALLITTNPFDYPMISQGEVTVKSINDVEEFIATDTAIDILGFTAEEKVGIYKLTGAVMHHGNMKFKQKQREEQAEPDGTEVADKIAYLLGLNSADMLKALCYPRVKVGNEMVTKGQTVPQVNNAVSALCKSIYEKMFLWMVVRINEMLDTKQPRQFFIGVLDIAGFEIFDFNSLEQLCINFTNEKLQQFFNHHMFVLEQEEYKKEGIEWEFIDFGMDLAACIELIEKPMGIFSILEEECMFPKASDTTFKNKLHDQHLGKTKTKQRLQGEVEDLMIDVERANALAANLDKKQRNFDKVLAEWKQKYEESQAELEGAQKEARSLSTELFKMKNSYEEALDHLETIKRENKNLQQEISDLTEQIGETGKTIHELEKAKKTVETEKSEIQTALEEAEGTLEHEEAKILRIQLELNQVKGEIDRKLAEKDEEMEQIKRNSQRVIDSMQSTLDAEVRSRNDALRIKKKMEGDLNEMEIQLSHANRQAAEAQKQLRNVQGQLKDAQLHLDDALRGQEDMKEQVAMVERRNGLMVAEIEELRVALEQTERGRKVAEQELVDASERVGLLHSQNTSLLNTKKKLEADFVQVQGEVDDAVQEARNAEEKAKKAITDAAMMAEELKKEQDTSAHLERMKKNLEVTVKDLQHRLDEAESLAMKGGKKQLQKLESRVRELEAEVEAEQRRGADAVKGVRKYERRVKELTYQTEEDKKNLVRLQDLVDKLQLKVKAYKRQAEDAEEQANTHMSRLRKLQHEMEEAQERADIAESQVNKLRAKSRDIGKAEKAE

SEQ ID NO: 2213 - protein, 1003 aa, Oreochromis niloticus
MENSHTKTPAECLAYFSVNENSGLTPDQFKKNLDKYGFNELPAEEGKSIWELVIEQFEDLLVRILLLAACISFVLAWFEEGEETVTAFVEPFVILLILIANAVVGVWQERNAESAIEALKEYEPEMGKVYRSDRKSVQRIKAREIVPGDIVEVSVGDKVPADIRIVSIKSTTLRVDQSILTGESVSVIKHTDPVPDPRAVNQDKKNMLFSGTNIAAGKAIGVAVATGVSTEIGKIRDQMAATEQEKTPLQAKLDEFGEQLSKVISLICVAVWAINIGHFNDPVHGGSWIRGAVYYFKIAVALAVAAIPEGLPAVITTCLALGTRRMAKKNAIVRSLPSVETLGCTSVICSDKTGTLTTNQMCVTKMFVVKTVDGDHVDLDAFDISGSKYTPEGEVSQGGAKVNCSSYDGLVELATICALCNDSSLDYNESKKIYEKVGEATETALCCLVEKMNVFNSNVKNLSRIERANACCTVIKQFMKKKFTLEFSRDRKSMSVYCTPVKGDGGPKMFVKGAPEGVIDRCAYVRVGTTRVPLTNAIKEKILSVIRDWGTGRDTLRCLALATRDSPLKVEEMNLEDSTKFADYETDLTFVGCVGMLDPPRKEVTDSIELCRAAGIRVIMITGDNKGTAIAICRRIGIFSEDEDVSGRAYTGREFDDLPLHEQSEAVRRACCFARVEPAHKSKIVEFLQGYDDITAMTGDGVNDAPALKKAEIGIAMGSGTAVAKSASEMVLADDNFSSIVAAVEEGRAIYNNMKQFIRYLISSNVGEVVCIFLTAALGLPEALIPVQLLWVNLVTDGLPATALGFNPPDLDIMGKPPRSPKEPLISGWLFFRYMAIGGYVGAATVAGAAWWFLYDTTGPGVTYYQLSHFMQCHEENEDFEGLDCEIFEAAPPMTMALSVLVTIEMCNALNSLSENQSLVRMPPWSNFWLISAMTLSMSLHFMIIYVDPLPMIFKLTHLSTEQWIVVLKLSFPVIAIDEVLKFVARNYVEGKESCTFIHENKN

SEQ ID NO: 2214 - protein, 514 aa, Oreochromis niloticus
  MOD_RES (194)..(194): Any amino acid
KTKQRLQGEVEDLMIDVERANALAANLDKKQRNFDKVLAEWKQKYEESQAELEGAQKEARSLSTELFKMKNSYEEALDQLETMKRENKNLQQEISDLTEQIGETGKSIHELEKAKKTVETEKSEIQTALEEAEGTLEHEEAKILRIQLELNQVKGEIDRKLAEKDEEMEQIKRNSQRVIDSMQSTLDAEVRSRXKKKMEGDLNEMEIQLSHANRQAAEAQKQLRNVQGQLKDAQLHLDDAVRGQEDMKEQVAMVERRNGLMVAEIEELRAALEQTERGRKVAEQELVDASERVGLLHSQNTSLLNTKKKLEADLVQVQGEVDDAVQEARNAEEKAKKAITDAAMMAEELKKEQDTSAHLERMKKNLEVTVKDLQHRLDEAENLAMKGGKKQLQKLESRVRELEAEVEAEQRRGADAVKGVRKYERRVKELTYQTEEDKKNLIRLQDLVDKLQLKVKAYKRQAEEAEEQANTHMSRLRKVQHEMEEAQERADIAESQVNKLRAKSRDVGKGESAE

SEQ ID NO: 2215 - protein, 900 aa, Oreochromis niloticus
AVETQITYTNSYTIQHEDTYMTQEEDWDRDLLLDPAWEKQQRKTFTAWCNSHLRKAGTQIENIEEDFRNGLKLMLLLEVISGERLPKPDKGKMRFHKIANVNKALDFICSKGVKLVSIGAEEIVDGNVKMTLGMIWTIILRFAIQDISVEETSAKEGLLLWCQRKTAPYRNVNVQNFHISWKDGLALCALIHRHRPDLIDYSKLRKDDPIGNLNTAFEVAEKYLDIPKMLDAEDIVNTPKPDEKAIMTYVSCFYHAFAGAEQAETAANRICKVLAVNQENEKLMEEYEKLASELLEWIRRTIPWLENRVAEQTMRAMQQKLEDFRDYRRVHKPPRVQEKCQLEINFNTLQTKLRLSNRPAFMPSEGKMVSDIANAWKGLEQVEKGYEEWLLTEIRRLERLDHLAEKFKQKCAMHEAWTAGKEDLLSQKDYESASLMEIRALMRKHEAFESDLAAHQDRVEQIAAIAQELNELDYHDAATVNTRCQGICDQWDNLGTLTQKRRDSLERVEKLWETIDQLYLEFAKRAAPFNNWMDGAMEDLQDMFIVHSIEEIQSLITAHDQFKATLPEADKERMATLGIHNEILKIAQTYGIKLSGINPYTNLSLQDISTKWDTVKHFVPLRDQMLQEEVARQQANERLRRQFAAQANIIGPWIQTKMEEISHVSVDIAGSLEEQMNSLKQYEQNIINYKSNIDKLEGDHQLIQESLIFDNKHTNYTMEHIRVGWEQLLTTIARTINEVENQILTRDAKGISQEQLNEFRASFNHFDRKRNGMMDPDDFRACLISMGYDLVSGRAGEVEFARIMTLVDPNNTGVVTFQAFIDFMTRETAETDTAEQVMASFKILASDKNYITVEELRRELPPEQAEYCITRMTRYAGPDSPPGALDYISFSSALYGESDL

SEQ ID NO: 2216 - protein, 1384 aa, Oreochromis niloticus
MASKVIPWYKKKHVSQVKTDYAYQHTKHVSKQHTESKSSSKSVSQAQAQATEAMAEQAYTIPVFRQRTAEETEEYQRVSKNVGKGLAVIQEELQRMRIATKAQVESLEIQKEVKGMMRKRVDLLEEIPKLPDFLVALRPHTVWEKTPVKLFCTVEGNPRPIVKWYKDGVPVDPLSAPGKYKIENKYGVHSLIVSRCVVSDTAEYSAVATNQHGTATSKAKIIVKRPAGAGESCQLGLVPHLTEIHASKLDVSLLDRFPVSFGVEGNSIRLVCTMVVVPDLPNIPPIAQWYRDDKLLKPSKLVEMSVGGGAASLTLPHLAKDDEGLYTLRIFTKDGTAEHSAYLFVSDAAPSAPGAPGAPMSVKAYDVNSDYVLVAWKPPNTVNEAPITGYFVDRCEAGTDTWVQCNDAPVKICKYPVHGLRVGHSYYFRVRAVNSSGISRPSRKSDKVTALDAAESERLQGTDEGVPSAPGHVVATRNTKSSVFVQWEAPKHLKHLMGYYIDGRVVGAKEWFACNHKPFKHTRFVVHGLIPGETYVFRVQAVNLFGLSEESQESSPIAVEPALATPSAPFGITMLSSDGSSITVAWKSPKHCGGSKVNAYYIDKRDADTLVWKEVNLNAVTERMCTVENLKEGTFYEFRVTAGNMAGVGLPSAASIPMKCEAWTMEEPGPAYDLSFSEVRSHSLVILWRAPIYTGASAVTGYFVDMAKKGSSEFVTLNQEAVSHRYLQVTGLEEGESYVFRVRAVNAHGVGKPSQLSEPVCAKAIPGTKEIVAGVDEETGDVFLSLEACEICETSKFVWSKNYKPIGDCPRVAVTTKGRTSRLTFTNPDKDDLGKYSVIVTDTDGVSGSHTLTEDALNTMLELSYAIRHPIVPLKHGLNYEVLEKGHVRFWLQAVKLSPSVSYRFIVNDKEVTSGEGQKISHDVATGIIQMTVDHFTRANEGTYTVQIHDGKAKTQSSLVLVGDVFKAALKEAEFQRKEHIRKQGPHFSEYLYFTVTEDCTVMLVCKVANVKKESTLHWYKDDEEIVPDTPPNVMSGSCALPLPLFSRKDHGVYKAVLSDDRGKDTSVFDISGKVFDDIINAIAQIAGASASELVLQCTPEGIRLQCYMNYYTEEMKTVWKHKESKIASSEKMRIGGTAEMAWMQICDPSDKEKGHYTMEISDGVKTHTRTFDLSGQAYTDAYEEYLRLKAAAFAEKNRGRVVGGLPDVVTIMEEKSLSLTCTVWGEPTPEVTWFKNEQEVASTEHTRVTFDGGKFASLVINKVTPEDSGKYSINVRNKYGGEFVEITVSVYRHGEKIPEPKLGQPKAAAATPVPPKSPAPPSKTPTPTPSKAQTPAPSMKSPTPASTPISKSPTPTPKSPTPPRSVKSPTPPRFMKSPTPPRK

SEQ ID NO: 2217 - protein, 377 aa, Oreochromis niloticus
MCDDDETTALVCDNGSGLVKAGFAGDDAPRAVFPSIVGRPRHQGVMVGMGQKDSYVGDEAQSKRGILTLKYPIEHGIITNWDDMEKIWHHTFYNELRVAPEEHPTLLTEAPLNPKANREKMTQIMFETFNVPAMYVAIQAVLSLYASGRTTGIVLDAGDGVTHNVPVYEGYALPHAIMRLDLAGRDLTDYLMKILTERGYSFVTTAEREIVRDIKEKLCYVALDFENEMATAASSSSLEKSYELPDGQVITIGNERFRCPETLFQPSFIGMESAGIHETAYNSIMKCDIDIRKDLYANNVLSGGTTMYPGIADRMQKEITALAPSTMKIKIIAPPERKYSVWIGGSILASLSTFQQMWISKQEYDEAGPSIVHRKCF

SEQ ID NO: 2218 - protein, 514 aa, Oreochromis niloticus
KATVETEGGKTVTVKEDDIHPRNPPKFDKIEDMAMMTHLNEPAVLYNLKERYASWMIYTYSGLFCVVVNPYKWLPVYDATCVAAYRGKKRIEAPPHIFSISDNAYQFMLTDRENQSVLITGESGAGKTVNTKRVIQYFATIAAIGAKKAEPTPGKMQGSLEDQIVAANPLLEAYGNAKTVRNDNSSRFGKFIRIHFGTTGKLSSADIETYLLEKSRVTFQLSAERSYHIFYQLMTGHKPELLEALLITTNPYDYPMISQGEVTVKSINDVEEFIATDTAIDILGFTADEKINIYKLTGAVMHHGNMKFKQKQREEQAEPDGTEVADKIAYLMGLNSADMLKALCYPRVKVGNEMVTKGQTVPQVNNAVSALCKSVYEKMFLWMVIRINEMLDTKQPRQFFIGVLDIAGFEIFDFNSLEQLCINFTNEKLQQFFNHHMFVLEQEEYKKEGIQWEFIDFGMDLAACIELIEKPMGIFSILEEECMFPKASDTTFKNKLHDQHLGKTKCFEKPKPAK

SEQ ID NO: 2219 - protein, 1947 aa, Oreochromis niloticus
EMSSDADMAVFGEAAPYLRRPERERIEAQNKPFDAKTAVFVADPKELFVKGTLQSKEGGKATVKTLSGQVVTVKEDEIFPMNPPKFDKIEDMAMMTHLNEAAVLYNLKERYAAWMIYTYSGLFCVTVNPYKWLPVYNQEVVVAYRGKKRQEAPPHIFSISDNAYQSMLTDRENQSILITGESGAGKTVNTKRVIQYFATIAGSGDRKKDAAVTGKLQGNLEDQIISANPLLEAFGNAKTVRNDNSSRFGKFIRIHFGTTGKLASADIETYLLEKSRVTFQLAAERSYHIFYQIMSNKRPELIETLLITTNPYDYPFVSQGEISVASIDDSEELMATDSAIDILGFTGEEKIGIYKLTGAVMHYGNMKFKQKQREEQAEPDGTEEVADKAAYLMGLNSADLLKALCYPRVKVGNEYVTKGQTVQQVYNSIGALAKSVYEKMFLWMVLRINQMLDTKQPRQFFIGVLDIAGFEIFDYNSLEQLCINFTNEKLQQFFNHHMFVLEQEEYKKEGIEWEFIDFGMDLAACIELIEKPMGIFSILEEECMFPKASDTTFKNKLYDQHLGKSSNFQKPKSVKGKAEAHFSLVHYAGTVDYSITGWLDKNKDPLNETVVQLYQKASLKLLAFLYSNYASSEENTGGSGAVKKAAKKKGASFQTVSALFRENLGKLMTNLRSTHPHFVRCLIPNETKTPGIMEHHLVIHQLRCNGVLEGIRICRKGFPSRILYGDFKQRYKVLNASVIPEGQFIDNKKASEKLLGSIDVDHTQYKFGHTKVFFKAGLLGLLEEMRDEKLASLITITQALCRGFLRRKEFQKMMARRESIYIIQYNIRSFMNVKHWPWMKLYFKIKPLLRSAETEKEMAMMKVEFAKCKEDLAKAEAKKKELEAKMVSLLQEKNDLCLQIQAESESLADAEERCEGLIKNKILLEAKAKELSERLEDEEELNAELTAKKRKLEDECSELKKDIDDLELTLAKVEKEKHATENKVKNLTEEMSCLDDTIAKLSKEKLALQEVHQQTLDDLQAEEDKVNSLTKAKIKLEQQVDDLEGSLEQEKKVRMDVERAKRKLEGDLKLAQESIMDLENGNQQLKEHLKKKDFELSQLVSKIEDEQSAAVQCQKRIKELQACNEELVEELEVERVARAKVEKQRCDLSRELEEISERLEEAGGATTAQVELNKKREAEFQKLRRDLEESTLHHEAIAAALRKKHADSVAELGEQIDSLQRVKQKLEKEKSEYKLENDDLSSNMEIMVKAKINYEKLCHSLEDHLSEYKTKHDENTHLITEVNAQKARLQNENGELSRLLEEKEAILSQMLRSKLAFTQQVEELKRQVEEEIKAKNALSHALQSARHDCDLLREQYEEEQEAKAELQRGMSKANSEVAQWRTKYETDAIQRNDELEEAKKKLAQRLQEAEEAIEAVNAKCSSLEKTKQRLQGEVEDLMADVERANAQAAGLDKKQRSFDKILSEWKQKYEETQAELDGVQKESRSLSTELFKTKNSYEEALDQLEVLKRENKNLQHIEEISDLTEQLGENGKAIHELEKTKRQNETEKTEIQTALEEAEASLEHEESKILRIQLELTQVKGDIDRRMAEKDEEIEQMKRNHQRVLETMQSALDAEMRSKNDTVRIRKKMETDLNDMEIQLSHANRQAAEAQKQLRNMQSHLKEQTIHLDEALQNQEDLKEQVAMVERKSSLLQAEVEELRAALEQSERSRKLAEGEVADACERVGLLHSQNTSLLNSKRKLDADVSQLQGEVQDAIQEARNAEEKAKKAITDAAMMAEELKKEQDTSSHLERMKKNLEASVKDLQHRLDEAENLALKGGKKQLQKLEARVRELEGEVELEQKRAADAIKGVRKYERRIKELTYQTEEDKKTVLRLQDLVDKLQLKVKAYKRQNEEAEEQANVHLAKLRKVQHELEEAQERADIAESQVNKMRAKSREFGKSQAAESE

SEQ ID NO: 2220 - protein, 1947 aa, Oreochromis niloticus
IMSTDAEMAQYGPAAIYLRKPEKERIEAQNRPFDARTACFVPEPKELYIKGVVQSREGGQVTVKTEADETVTVKDEDCLPMNPPKYDKIEDMAMMTHLNEPSVLFNLKDRYAAWMIYTYSGLFCVTVNPYKWLPVYDPQVVAAYRGKKRMEAPPHIFSVSDNAYQNMLTDRENQSILITGESGAGKTVNTKRVIQYFATIAVSGGDKKDHSTGKIQGTLEDQIISANPLLEAFGNAKTVRNDNSSRFGKFIRIHFGTTGKLASADIETYLLEKSRVTFQLSEERSYHIFYQILTGHKPELIEMLLITTNPYDFPMISHGQISVASINDKEELVATDTAIDILGFSSEEKVSIYKLTGAVMHYGNMKFKQKQREEQAEPDGTEVADKVAFLMGLNSADLLKGLCYPRVKVGNEYVTKGQTVPQVANAVSALAKSVYEKMFLWMVIRINEMLDTKQPRQFFIGVLDIAGFEIFDFNSMEQLCINFTNEKLQQFFNHHMFVLEQEEYKKEGIDWEFIDFGMDLAACIELIEKPMGIFSILEEECMFPKASDASFKNKLYDQHLGKTNAFQKPKVVKGKPEAHFSLVHYAGTVDYNISGWLEKNKDPLNESVVQLYQKSSMKLLSYLYASFSSAEAESGGDAGGGKGGKKGGKKKGGSFQTVSAVFRENLGKLMTNLRSTHPHFVRCLIPNEIKKPGVMDNHLVIHQLRCNGVLEGIRICRKGFPSRILYADFKQRYRILNASAIPEGQFIDGKKASEKLLGSIDIDHTQYRFGATKVFFKAGLLGTLEELRDEKLASLVTQTQALCRGYLMRKEFSKLIAQRDCVWILQYNLRSFMNVKHWPWMKLFFKIKPLLKSAATEKEMATMKEDFIKCKDDLAKSEAKRKELEEKMVSLLQEKNNLLLQVQADSENLCDAEERCEGLIKSKIQLEAKLKEVSERLEDEEEMNAELTAKKRKLEDECSELKKDIDDLELTLAKVEKEKHATENKVKNLMEELAGQDENMTKLSKEKKALQEAHQQTLDDLQAEEDKVNTLTKAKSKLEQQVDDLEGSLEQEKKIRMDLERAKRKLEGDLKLSQESLMDLENDKQQAEEKIKKKEFENSQLLSKISDEQTINNQLQKKIKELHARIEELEEEVEAERAVRAKIEKQRSDLARELDEISERLEEAGGATAAQIEMNKKHEAEFLKLRRDLEESTLHHEATTAALRKKQADSMAELGEQIDNLQRIKQKLEKEKSELKMETDDLASNMETVAKAKVNLEKMCRSLEDQLMELKTKNDENMRQISDLSNQRARFQTENAELSRQMEERESLISQLTRGKQGFTTQVDELKRLIEEETKAKNALAHSLQSARHDCDLLREQYEEEQEAKAELQRCLSKANSEVALWRNKYETDAIQRTEELEEAKKKLAQRLQEAEEQIEAVNSKCASLEKTKQRLQNEMEDLMVDVERSNSLAATLDKKQRNFDKILAEWKQKYEESQAELEGTQKESRSLSTELFKLKNSYEEALDHLETMKRENKNLQQEISDLTEQLGESGKTIHELDKFKKQVETEKYDMQAALEEAEASLEQEESKILHVQMELNQMKAEVNQKLAEKDEEIDQMKRNHQRVLESMQATLDAEVRSRNDALRVKKKMEGDLNEMEIQLNHANRQAAEAQKHLRNIQGQLKDAQIHLDESVRGQEDMKEQVAMMERRTALMQAEIEELRAAVEQTERSRKVAEQELIDASERTGLLHSQNTSLLNTKKKLEADVTQLHCEIEEAVQEARNAEDKAKKAITDAAMMAEELKKEQDTSAHLERMKKNLEVTVKDLQHRLDEAENLAMKGGKKQLQKLEARVRELENELEAEQKRSTEAIKGVRKYERKIKELTYQSEEDKKNNIRLQDLVDKLQSKMKAYKRQAEEAEEQANVHMARFRKVQHELEEAEERADMAESLANKMRAKSREIGSKKYDRSK

SEQ ID NO: 2221 - protein, 412 aa, Oreochromis niloticus
TVETEGGQTVTVKEDDIHPRNPPKFDKMEDMAMMTHLNEPAVLFNLKERYASWMIYTYSGLFCVVVNPYKWLPVYDATCVAAYRGKKRIEAPPHIFSISDNAYQFMLTDRENQSVLITGESGAGKTVNTKRVIQYFATIAALGGKKAEPTPGKMQGSLEDQIVAANPLLEAYGNAKTVRNDNSSRFGKFIRIHFGTTGKLSSADIETYLLEKSRVTFQLSAERSYHIFYQLMTGHKPELLEALLITTNPYDYPMISQGEITVKSINDVEEFIATDTAIDILGFTAEEKLSIYKLTGAVMHHGNMKFKQKQREEQAEPDGTEAVADKIAYLLGLNSADMLKALCYPRVKVGNEMVTKGQTVPQVNNAVSALCKSVYEKMFLWMVIRINEMLDTKQPRQFFIGVLDIAGFEIFD

SEQ ID NO: 2222 - protein, 1934 aa, Oreochromis niloticus
MGDSLMAEFGKAAPYLRKSEKERLEAQTRPFDIKTECFVVDTKEEYVKGKILSKDGGMVTVQKEDGTTVTVKESDTHPQNPPKFDKIEDMAMFTFLHEPAVLFNLKERYAAWMIYTYSGLFCVTVNPYKWLPVYDAEVVAAYRGKKRSEAPPHIFSISDNAYQYMLTDRENQSVLITGESGAGKTVNTKRVIQYFASIAAVGGASKKDSSKGTLEDQIIQANPALEAFGNAKTVRNDNSSRFGKFIRIHFGTSGKLSSADIETYLLEKSRVTFQLKAERNYHIFYQILSNQKPELLDMLLITNNPYDYSYISQGEVTVASINDSEELMATDGAFDVLGFTPEEKMSVYKLTGAIMHYGNMKFKQKQREEQAEPDGTEAADKSAYLMGLNSADLIKGLCHPRVKVGNEYVTKGQSVDQVYYAIGALAKSVYEKMFNWMVVRINQSLDTKQHRQYFIGVLDIAGFEIFDFNTFEQLCINFTNEKLQQFFNHHMFILEQEEYKKEGIEWEFIDFGMDLQACIDLIEKPLGILSILEEECMFPKASDQTFKAKLYDNHLGKNKMFEKPRAAKGKAEAHFALVHYAGTVDYNIAGWLVKNKDPLNETVVGLYQKSSLKLLSLLFSNYAGADGGDKGSGKGAKKKGSSFQTVSALHRENLNKLMTNLKTTHPHFVRCLIPNERKTPGVMDNCLVMHQLRCNGVLEGIRICRKGFPNRVLYGDFKQRYRILNASAIPEGQFIDCKKSTEKLLGSLDIDHTQYKFGHTKVFFKAGLLGTLEEMRDEQLSRIITRIQANARGLLMRKEFIKLVERRDALMVIQWNLRSFLGVKNWPWMKLFFKIKPLLKSAESEKEMANMKDEFNKLKETLEKSEARRKELEEKIVTLLQEKNDLTLQIQSEQDTLTDAEERCEQLIKSKIQLEAKLKEMTERLEDEEELNADLTAKKRKLEDECSELKKDIDDLELTLAKVEKEKHATENKVKNLMEEMASQDENIAKLTKEKRALQEAHQQTLDDLQSEEDKANTLTKAKAKLEQQVDDLEGSLEQEKKVRMDLERSKRKLEGDLKLIQENLMDLENDKQQLEEKIKKKDFEVTQITSRLEDEQIASVQLQKKLKESQARIEEVEEELDAERAARAKVEKQRSDLSRELEDISERLEEAGGATSAQVELNKKREAEFQKLRRELEESTLQHEATAATLRKKHADTVAELGEQIDNLQRVKQKLEKEKSELKLELDDLCSNMENVVKTKANFEKMCRTMEDNMNEYKSKCEEAQRTINELTTQRAKLLTENGELGRQLEEKDCLISQLTRGKNSYNQQMEDLRRQLEEELKAKNALAHAVQSARHDCDLLREQFEEEQEAKAELQRALSKSNTEISAWRTKYETDGIQRTEELEEAKKKLVQRLQEAEEAIEAVNAKCSSLEKTKHRLQNEIEDLMLDLERSNAASAALDKKQRTFDKVLAEWKQKFEESQCELEASQKEARSLSTELFKLRNAYEECLDQLETMKRENKNLQEEISDLTDQLGEGGRSAHELEKIRKELEQEKVELQSALEEAEGSLEHEESKILRAQLEFNQVKADMERKLAEKDEEMDQAKRNYQRMVESLQSSLESETRSRNEAMRVKKKMEGDLNEMEIQLSQANRQAAEAQKQVKTLQAFLKDTQLQLDDTQHGNDDLKENIALLERRNNLIQAELEEVRAALEQTERSRKLAEQELTEATERMQLLHSQNTSLINQKKKHEADLLHLQCEVEEAIQENRNAEEKAKKAITDAAMMAEELKKEQDTSAHLERMKKNMEQTIKDLQHRLDEAEQIAMKGGKKQLQKLETRIKELENELEAEQKRGAESIKGVRKYERRIKELTYQTEEDRKNMARLQDLVDKLQLKAKSYKRAAEEAEEAANINMAKLRKLQHELEEAEERADIAESQVNKLRAKTRDGSSKKGLDE

SEQ ID NO: 2223 - protein, 1014 aa, Oreochromis niloticus
LGYHLELKERNNILWVKQNKQLVPETRFKVIGLEEGIEYEFRVYAENIVGLSKASKVSEIQVARDPCDRPGKPEAVIVTRNQVTLRWTKPQYDGGIKITGYIIEKKEGAGRWMKASFTNITETEFVVTGLIENQIYEFRVIAKNAAGVFSQPSDSTGAITAKDEVDPPKIDLEAKYSQAVVVNAGETFKLEATVYGKPVPTIHWLKEGQEITEAARLELKNTDFTACLVVKEAIRVDGGQYILLVKNVGGEKSVNINVKVLDRPGAPEGPISIYGVTNEKCSISWKPPLQDGGSDVSHYTVERRETSRLVWTVVEPKVQTLNLKITKLLPGNEYIFRVIPVNKYGVGEPLESEPMVARNPFVTPNPPTNVEVSTITKDSMVVTWERPTNDGGSPIQGYIVEKRDKDGVRWTRCNKRNISELRFRVTGLLENHSYEFRVAAENAAGVGMPSAPTVYYKALDPVFKPGPPNNPKVVDTSRSTVSLTWGKPIYDGGCEVQSYIVEACNGASDEWFMCTPPTGIMDTKYTVKKLLEKHEYQFRVCAINKVGVGEHADVPGKILLEEKLEAPDLDLDADMRKMINIRAASTLRLFVPVRGRPAPEVKWGKADGEIKETAQIDNTGSYASLVIENVDRFDSGKYTLTAENASGVKSVFISVRVLDSPSPPTNFVVKEITKNSVTLTWEPPHLDGGSKIKYYIVEKRESTRKVYSPITTCNKMSWKVEPLPEGGIFFFRVLAENEYGVGLPAKTIEPVKISEKPQPPGKVSVVDVTHSTVTLTWEKPLHDGGSRITHYEVELAPKDSETWSICASVKALETLVTNLLKGEEYQFRVVAVNDKGKSDPRQLAHSVIAKDLVIEPAVRPKASSYSVQVGYDLKIDVPVAGHPKPIITWTKDGVALKQTTRVNVTDSAQTTTLTIKDATREDGGMYTISVSNDLGSKNATVEVITLDKPGPPTGPVKLEDISAESITLSWEPPTYTGGCPISNYVVEKRDTTTTNWSVVSATVARTTLKVSNLK

SEQ ID NO: 2224 - protein, 1362 aa, Oreochromis niloticus
DKYVREEPMIRGPKFLVRLRSHMVFENTPVKIVCTVEGFPMPVVKWYKDGMILDLSSGRYLVETKGGIHSLEIPRCSTDDTAQYTAMAVNLHGQASTQASIIVKRFKQEEESCSYAWLPYAASMLPKIHYTKIHITFLDTFGPVFATEGESATLSATMTLEPNLANLQPEAQWYRDDTRLFDSKWVKIETGRGFSKLTLPNLYKDDEGLYTLRMVTKGGTAEHSAFVSVADGPPPVPAAPGAPMDIEIHDANRDYVIVSWKPPNTTTEGPILGYFVDKCEVGTENWTQCNDHPIKICKYPVSGLFEGHSFYFRVRAVNSHGISKPSRMSDPITAMDPTEFERLHAKRLGGRLDIVSYYDEVEAEGKPPGVPSGINASETDRTYVVLSWKAPAYTSRAPMWYYIEKCMADSGAWQRVNTQVPIRSPRYAVFDLAEGKQYKFRVLSANIYGTSEPSEPTGPIQTQELKGVPSAPGQVIATRETDTSVLIQWAPPKEPNNLIGYYIDQCVQGSKNWTSANHKPHKNTRFVVSGLTTGETYVFRVQAINELGLSDESQESAPLTVKAALTTPSAPYDIALLYCDGHSMILNWKKPLRSGGAKIKEYYVDKRRSGTTMWREVHIPPFTERVYKVENLTEGAVYQFHVYAANLAGLGPASKHSEDFTCDPWTMPEPGPAYDLTFCEVRDNSLVVEWQKPVYTGSGPITGYHVEYAKKGTANWITANEKAASHRFLKVTGLEVGTTYVFRVRAVNAAGVGMASMASDPVTAKAVAGSQEVSCVVDEKSGDIVLSFESCQINEGSKFIWKKDYKEITDFSKGVVIKSEGTHSKLIFKNPDKEDFGTYSVSVTNTEGVSSSYTISNEELAKMLALSYDIRHPVIPLKSELAYKILERGRMRFWLQAEEISSNVTYKFFANNKELSGADPNKMGHDVATGIIEFIMDHFTEENEGTYTCQITDGGGKAQSSLVLIGDAFKAALAEADFQRREYIRVKEGPHFSEFLSLQIGDDCSVTLVCKVANLKKESVFHWFREDTEIIPDVKPDLGSGVCKLPIKEFSLKTAGIYKATISDDRGKDMSQINISGKVFDDAINKLSQLAGASAAELVINCTATGIQLQCHMKYYTLEMNITWYHGKIALFCDRNHTAIIFYKELIDSQVVEPVEKDKGKYSIVITDPENSHKRTLDLSGDVYEKAFAEFQKLKAEAYAEKNRGKVVGGLPDVVTIMEKKTLSLTCTVCGDPKPQVSWLKNGSEVEPDDQYVVSLDQGRFASLTIKGVSMEDSGRYTMIVQNKYGGESVDIVVSVYRHGEKIPEAKPTLTPKTIIPPKLPIEIPQPKTQPAPSAAPSTPSPAAPKAALGRGVKSPTPSRRK

SEQ ID NO: 2225 - protein, 1180 aa, Oreochromis niloticus
MSAWIKRGSYNHEYHHKQSQYVVKEYSSSEAMEERYEHKTKTRIQEVVRTKLDDKYVREEPMIRGPKFLVRLRSHMVFENTPVKIVCTVEGFPMPVVKWYKDGMILDLSSGRYLVETKGGIHSLEIPRCSTDDTAQYTAMAVNLHGQASTQASIIVKRFKQEEESCSYAWLPYAASMLPKIHYTKIHITFLDTFGPVFATEGESATLSATMTLEPNLANLQPEAQWYRDDTRLFDSKWVKIETGRGFSKLTLPNLYKDDEGLYTLRMVTKGGTAEHSAFVSVADGPPPVPAAPGAPMDIEIHDANRDYVIVSWKPPNTTTEGPILGYFVDKCEVGTENWTQCNDHPIKICKYPVSGLFEGHSFYFRVRAVNSHGISKPSRMSDPITAMDPTEFERLHAKRLGGRLDIVSYYDEVEAEGKPPGVPSGINASETDRTYVVLSWKAPAYTSRAPMWYYIEKCMADSGAWQRVNTQVPIRSPRYAVFDLAEGKQYKFRVLSANIYGTSEPSEPTGPIQTQELKGVPSAPGQVIATRETDTSVLIQWAPPKEPNNLIGYYIDQCVQGSKNWTSANHKPHKNTRFVVSGLTTGETYVFRVQAINELGLSDESQESAPLTVKAALTTPSAPYDIALLYCDGHSMILNWKKPLRSGGAKIKEYYVDKRRSGTTMWREVHIPPFTERVYKVENLTEGAVYQFHVYAANLAGLGPASKHSEDFTCDPWTMPEPGPAYDLTFCEVRDNSLVVEWQKPVYTGSGPITGYHVEYAKKGTANWITANEKAASHRFLKVTGLEVGTTYVFRVRAVNAAGVGMASMASDPVTAKAVAGSQEVSCVVDEKSGDIVLSFESCQINEGSKFIWKKDYKEITDFSKGVVIKSEGTHSKLIFKNPDKEDFGTYSVSVTNTEGVSSSYTISNEELAKMLALSYDIRHPVIPLKSELAYKILERGRMRFWLQAEEISSNVTYKFFANNKELSGADPNKMGHDVATGIIEFIMDHFTEENEGTYTCQITDGGGKAQSSLVLIGDAFKAALAEADFQRREYIRVKEGPHFSEFLSLQIGDDCSVTLVCKVANLKKESVFHWFREDTEIIPDVKPDLGSGVCKLPIKEFSLKTAGIYKATISDDRGKDMSQINISGKVFDDAINKLSQLAGASAAELVINCTATGIQLQCHMKYYTLEMNITWYHG

SEQ ID NO: 2226 - protein, 381 aa, Oreochromis niloticus
MPFGNTHNNFKLNYKVEEEFPDLSKHNNHMAKVLSKEVYGKLRDKQTPSGYTLDDVIQTGVDNPGHPFIMTVGCVAGDEESYEVFKDLLDPVISDRHGGYKPTDKHKTDLNHENLKGGDDLDPNYVLSSRVRTGRSIKGFTLPPHNSRGERRIIERLSIEALNSLDGEFKGKYYPLKTMTDAEQEQLIADHFLFDKPVSPLLTCAGMARDWPDGRGIWHNENKTFLVWVNEEDHLRVISMQKGGNMREVFRRFCVGLQKIEEIFKKHDHGFMWNEHLGYILTCPSNLGTGLRGGVHVKLPKLSTHPKFEEILTRLRLQKRGTGGVDTASVGGVFDISNADRLGSSEVEQVQLVVDGVKLMVEMEKKLEKGESIDSMIPAQK

SEQ ID NO: 2227 - protein, 4922 aa, Oreochromis niloticus
WSISMLGQQDIQFLFWDDEVVLQSVATIQKEHRKFCLAAEGLGNRLCYLESTSEAKYVPPDICICNFVLEQSLSVRALQEMLANTGQNSEGSADHEKWRLIKKAGQGGGHRTLLYGHAILLRHSFSGMYLTCLKTSRSLTDKLSFDVGLQEDSIGESCWWTIHPASKQRSEGEKVRIGDDLILVSVSTERYLHLSISNGNIHVDASFMQTLWNVQPTCSSSNMAVGYLIGGHVMRLCHGHDESLTIPGADKNEEEQRIVNYEAGKGASKARSLWRVEPLRISWSGSHIRWGQPFRLRHLSTGHYLALTEDRGLVLQDRVKSDTTATAFCFRASKEKGDTGPKRDIDGMGVPEIKYGDSVCFIMHVATGLWLSYQAPDAKSSRLGPLKRRACLHSEGHMDDGLILQRCQHEESRAARIIRNTTFLFTNFIKALDSIAAGESTAVAGYVEEVLQTLNDLIEYFKQPDSELEHEEKQCLLRSLIKRQDLFKEEGMLSLLSKCIDRMNLYDSAAHFGEVAGEEAGAAWKDILNLLYELLAALIRGNRNNCTQFSRKLDWLVSKLERLESSSGILEVLHCILVESPEALNIIQKGHIKSIVSLLYKHGRNHKILDVLCSLCVCNGVAVRANQNLICDNLLPNRDLLLQTRLVNDVQSMRPNIFLGIAEGSAQYKKWYYELVIDQVDHFVTSEPTHLRVGWANTKGYAPYPGGGEGWGGNGVGDDLYSYSFDGLHLWSGRIPRAVASINQHLLNSDDVVSCCLDLGAPSMSFRINGQPVQGMFEDFNTDGFFFPVVSFSAGVKVRFLLGGRHGDFKFLPPAGYSPCYEALLPKEKMHVEPVKEYKRDHDGVRDLLGTTQFLSQASFIPTPVDTSQIVLPPHLENIRDKLAENIHELWGMNKIELGWTYGKVRDDNKRQHPCLVDFAKLPETERNYNLQMSSETLKTLLALGCHVAQVNIHAEDDLKKIKLPKNYMMSNGYKPAPLDLSDVRLNAGQEVLVDKLAENAHNVWAKDRIKQGWTYGIQQDLKSRRNPRLVPYALLDERTKKSNRDSLREAIRTMVGYGYEIDPPDQEVVHVLDDQSVETIRFFRVEQTYAVKTGKWYFEFEALSGGDMRVGWARPGCRPDVELGVDDQAFVFDGYRGRRMHAGSRYFGHPWKKGDVVGCMINMEDKSMIFTLNGELLITNKGSELCFTDFETEDGFIPVCSLSMSQIGRMNLGKDASTFKYYTMCGLQEGFEPFAVNMNREVTMWFSKRLPTFFNVPEEHPDIEVTRIDGTVDSPPCLKVTHKTYGTQNSNNDMVYCRLSMPVEFYSADKLLDESLKLRSDMEIVFYLNLYLKLKTKAHSVSVMFFVSAAILQKKMEVLTLEASQLITDSTVFPFSFNWQYYYSVRVFAGQDPASVWVGWVTPDYHYYSKNFSLSKTRTVTVTLGDERGRVHESVQRSNCYMVCVADAVTPSSSSRSSSDLEIGCLADLATGLVSFTANGKELPTSYQVEPNTKLFPAVFVLPTSANLFQFEFVKIKDAMPLSSAIFKSEHRNPVPQCPPRLDVQTIVAVLWSRMPNIFLNVETARVSERHGWVVQCLEPMQMMAVHIPEENRCLDIMELSEHEDLRKFHYHTLKLYCALCALGNTRVAHALCSHLDQSQLLYTIDNQYLSGMLREGFYNVLISIHLETAKEARLMMNNEFIIPVTDETRSIKLFPDESKQHSLPGVDLSTSLKPRVNFSPVGIINTKRQQYLYSPQIPLGILKEKAISMLTEAVQGGGTHIRDPVGGSLEYQFVPILKLIGTLLIMGVLTSDEVRLILLLIDPNVFGETKEGEEVKGDEVAMSGEKEEVSKNEEKAVEAGEEETKESKPQVKGLLEKSLPESVKRQMCELLHYFCDCELKHRIESIVSFSDSFVSKLQYNQKFRYNELMLALNMSAAVTAKKTKEFRSPPQEQINILLNFSAGEDCPCPEEIQDELNSFHEELRLHCGIPVEEEEEEQDTSIKGRLLALLYKIKGPPQKTEQEPTETEQAAPTNLKELISQTITSWAQESHIQDPELVRVMFSLLRRQYDGIGELLRAMKKSYTISAASVQDAINLLASLGQIRSLLSVRMGKEEEKLMIDGLGDIMNNKVFYQHPNLMRVLGMHETVMEVMVNVLGGDKSQEIAFPKMVASCCRFLCYFCRISRQNQKAMFDHLSYLLENSSVGLASEAMRGSTPLDVAASSVMDNNGLALALEEPDLEKVVTYLAGCGLQSCAMLVAKGYPDLGWNPIEGERYLSFLRFAVFCNGESVEENANVVVKLLIRRPECFGPALRGEGGQGLLAAMEEAIKISEDPALDLPKTPAGVTTGSGEEEGEVIHMGNAIMSFYSALIDLLGRCAPEMHLINAGKGEALRIRAILRSLVPTSDLVGVISIPLKMPVVNKDGTVTEPDMSACFCPDHKAPMVLFLDRVYGIEDQSFLLQMLEVGFLPDLRASASLDTEALSTTETALAMNRYIGSALLPLLTRCAALFGSTEHHAQLVDSTLQTIYRLSKGRSLTKAQRDAIEECLLAICKHLRPSMMQQLLRRLVFDVPVLNEYCKIPLRLLTNHYEQNWKYYCLPSGMGSFGTASEEELLLTKKLFWGIFDSLSHKKYDAELFKMAKSCLCAIAGALPPDFVDSSLGATLEKQASMDAQGNFDPKPISTANISLPEKLEYIANKYAEHSHDKWSSEKMSVGWKHGDTVDEQAKTHPLLKPYKSLSEKERETYRWPVRESLKSMLSMGWNIERTKEGEAMFQQRESEKQRKISESQINGFSPAPMDLHNVTLSRELQGMVEVVAENYHNIWAKKKKTELVSKGGGTHPLLVPYDTLTAKEKYRDREKAQELFKFLQISGYAITRGLKDMEQDSSSMEKRFSYKFLKRLLKNVDSAQEFIAHLEAMATSGKTDKSPHDQEIKFFAKVLLPLTDQTFKNHCLYFLSTPSQNLSSCGCASNKEKEMVTSLFCKLAALVRHRISLFGSDSAMMVSCLHILTHSLDTRTVMKTGSELVKVGLKTFFENAAEDLDKLLEMLKLGKFMQSRAQMKSVSQSINYVTVALLPILTALFEHIKTYEFGVDLLLDDVQLSCYRILTCLYSLGTGKNVFVERHLPALGESLATLVGAMPVAFLEPHLNAHNPLSVFNTKTPRERAILSMPDTVEEMCPEMPRLDKLLKDVNDVSESGARYSDMPQVIEVILPMLCNYLSYWWEKGPENSPPDTQCCTMVTSEHLSIILGNILKILNSNLGIDDAPWMKRIAVYSQPIICKAGADLLRTHFLPTLDKLKKKTVKVVAEEELLKADSKGDNQEAELLILDEFAVLCRDLYAFYPMLIRYVDNNRSRWLKEPDGDSTELFRMVAEIFILWCKSHNFKREEQNFVVQNEINNLGFLTGEGKTKMSKTGGDQERKHKRRRGEYYSIQTSLIVAALKKMLPIGLNMCTPGDQELISLAKIRYSLKDTDDEVKEHLRQNLHLQDKSDDPAVQWQMNLYKDVVVKIEEPANPENTVDRVQSISAAVFHLEQNKLNWGCRIIPVFKVEQPLRNKKCVWQKLLSKQRKRAVVACFRMAPLYNLPRHRAINFFIPAYERLWIEAEEYSFEEKLVQDLAKTPMKIVEEEEEEVAEIQPDPLHQLILHFSHNALTERSHLEEDPLYIAYADMMAKSCAEDEEEEEEEEGKEKTFEEKEMEKQKILYQQARLHARGAAEMVLQMISASKGRLGPMVTCTLKLGISILNGGNVQVQQKMLDYLKEKRDAGFFKSLSGLMQSCSVLDLNAFERQNKAEGLGMVTEEGSSSKVLQNDEFTKDLFRFLQLLCEGHNGDFQNFLRTQTGNTTTVNIIISTVDYLLRLQESISDFYWYYSGKEIIDETGKLNFSKALSVAKQIFNSLTEYIQGPCIGNQQSLAHSRLWDAVVGFLHVFANMQMKLSQDASQIELLKELMDLQKDMVVMLLSLLEGNVVNGTIGKQMVDTLVESSSNVEMILKFFDMFLKLKDLTTSDNFKEYDPECKGIISKKEFHKSMESQKQYIQSEIEFLLSCVEADENDMFNYKEFVERFHEPAKDIGFNVAVLLTNLSEHMPHDSRLATFLDLAESVLSYFEPYLGRIEIMGSAKRIERVYFEISESSREQWEKPQVKESKRQFIFDVVNEGGESEKMEMFVNFCEDTIFEMQLASQISEPEVVEQPEEDEEEDGHSILEELTAEEEHALESASAFTTACRSVSGKIAHVRQMFSIKNMRKKFKKLKKLSIKEIITGFFAFFWMLFTGFFKGIYSLIFGFFHVIWSSMFGGGLVEGAKNIKVTDILGNMPDPTQFGIHGDVIEGEKVEAIESLGNLDIAMAPTGDIVEVDMMMEMLNAPKKEGGKHVEPGLGDVSELSAEPSTDHKKQKAAAKKVETPENEPEKADTENQEKEDKPKEEAAKEPVTEEKPKTRSSQPKEPAPAFMSSIFAVLDVYLNKTVNYLARNFYNLRFLALFVCFAINFILLFYKVTQASVQVTGETDEETEGENRWGADEEDDEDTLFDMDEFVLQESTGYMLPTLRFLAIFHTVISLVCLVGYYCLKVPLVVFKREKEIARKLEFDGLYITEQPSDDDIKGQWDRLVINTPSFPNNYWDKFIKRKVINKYGDLYGAERIAELLGLDKSALDFDPTVETVEKEASLVSWLSSIDTKYHIWKLGVVLTDNSFLYLIWYTTMSIFGHFNNFFFAAHLLDIAMGFKTLRTILSSVTHNGKQLVLTVGLLAVVVYLYTVVAFNFFRKFYNKSEDEDEPDMKCDDMMTCYMFHMYVGVRAGGGIGDELEDPAGDPYELYRILFDITFFFFVIVILLAIIQGLIIDAFGELRDQQEQVKEDMETKCFICGIGNDYFDRTPHGFETHTLQEHNLANYLFFLMYLINKDETEHTGQESYVWKMYQERCWDFFPTGDCFRKQYEDQLG

SEQ ID NO: 2228 - protein, 363 aa, Oreochromis niloticus
MPHAYPFLTPEQKKELNDIALKIVAPGKGILAADESTGSVAKRFQSINAENTEENRRLYRQLLFTADNRISPCIGGVILFHETMYQKTDDGKPFPQYLKERDMVVGIKVDKGVVPLAGTNGETTTQGLDGLYERCAQYKKDGADFAKWRCVLKITPTTPSRLAIIENANVLARYASICQMHGIVPIVEPEILPDGDHDLKRCQYITEKVLAAVYKALSDHHVYLEGTLLKPNMVTAGHSCSHKYTNQEIAMATVTALRRTVPPAVPGITFLSGGQSEEEASVNLNAINQCPLHKPWALTFSYGRALQASALKAWGGKKENGKACQEEFVKRALANSQACVGKYVSSGVSAAGGESLYVANHAY

SEQ ID NO: 2229 - protein, 1120 aa, Oreochromis niloticus
MPEPVPEGKPAVDAPAEDGADSETDGDEPQSTELTGLFVEKPPNSVVAVAGTDVTFIAKVDSTSLTRKPTMKWLKGKWLDLGSKAGKHLQFKETYDRNTKIYTYEMKIIKVVPGDAGGYRCEVTSKDKCDSSTFEISVEAAHQDEQADILSAFKRADAGEDEGDLDFSALLKAAKKKKKPEKEEPEIDVWELLKSAHPSEYEKIAFKYGITDLRGMLKRLKKMKAEPIVHSEAFLKKLESCYSVDKGKKITLRCEVVDPNVQVKWLKNGQEIKPSAKYIMEASGNVRTLTINKATLADDAAYECVVGEDKSFTEVFVKEPPVTITKLMDDYHVVVGDRVEFEIEVSEEGAHVMWFFEDQEIHKDKDSKYRFKKDGKKHTLIIQEATLDDIGMYHAWTNGGHTKGELEVEEKELEVLQDIADLTVRATDQAMFKCEVSDDKVTGKWYKDGVEVLPSERIKMTHIGRFHRLIIDNVKPEDAGDYTFVPDGYALSLSAKLNFLEIKIDYVPRQEPPKIHLDTTGNMVSQNTIIVVAGNKLRLDVEITGEPAPTVVWSKGDKPITDTEGRVRVEARKDLSCFVIEGAERDDEGNYSITVTNPAGEDKAVLFLKIVDVPDPPENIKCTGVGEDCASIVWDPPKFDGGAPVKGYLMERKKKGSSRWTKLNFDVYESTTYEAKRMIEGVLYEMRVFAVNSIGMSQPSLSSKPFMPIAPTSEPTRLTVHDVTDSTCSLKWLAPEKIGAGGLDGYVIEYCKEGDTEWVVANQELCERQGYVVRGLPVGEKINFRVVAVNMAGRSPPALMSQPVTIREIVEHPKIRLPRDLRTKYIRRVGEKINLTIPFQGKPRPIATWFKDGKPLDEKIVNVRNSNVDSILFIRSAEREHSGTYELVLKIENMEDRASINIRIVDKPGPPLNVRATDIWGFNAALEWEPPKDDGNCDISGYTIQKADMKTKEWFTVYEHNRRTNCTVSDLVMGNEYMFRVYSENLCGLSEEPRMSKNTAVIAKTGLELKSKPYKEKDMCCSPKFTQPLVDRSVVAGYSTAISCAVKGFPKPKIVWMKNKMIIGEDPKYLMQNNQGVLTLNIRKPSTFDGGKYSCMAVNELGKDEVECTLNVRVYKEPEK

SEQ ID NO: 2230 - protein, 842 aa, Oreochromis niloticus
MSKPLSDHDRRKQISVRGLAGVENVSDLKQNFNRHLHFTLVKDRNVATRRDYYFALAHTVRDHLIGRWIRTQQYYYEKDPKRVYYLSLEFYMGRTLQNTMVNLGLENACDEAMYQLGLEMEELEDMEEDAGLGNGGLGRLAACFLDSMASLGLAAYGYGIRYEFGIFNQKIVNGWQVEEADDWLRYGNPWEKARPEYMRPVHFYGRTEHHPDGVKWVDTQVVLALPYDTPVPGYRNNIVNTMRLWSAKAPCDFNLKDFNVGGYIQAVLDRNLAENISRVLYPNDNFFEGKELRLKQEYFVVSATLQDIIRRFKVSKFGSREIARTDFSKLPDKVAIQLNDTHPAMAIPELMRVLVDEEKLNWETAWDICVRTCAYTNHTVLPEALERWPVELFAHLLPRHLEIVYEINRRHLERVAAKYPGDVDRLRRMSLIEEGGQKRINMAHLCIVGAHAVNGVAQIHSDILKATVFKDFYEMEPHKFQNKTNGITPRRWLVMCNPGLAEAIAERIGEDFIRDLDQLRNLVKFVNDEAFIRDIAKVKQENKMKFAVHLEEHYKVKINPNSMFDIQVKRIHEYKRQLLNCLHIITYYNRIKKDPNKQWTPRTVMIGGKAAPGYHTAKMIIRLITAIGEVVNNDPVVGDRLKVIFLENYRVTLAEKAIPAADLSEQISTAGTEASGTGNMKFMLNGALTIGTMDGANVEMAEEAGEGNLFIFGMRVDDVEALDNRGYHAEEYYNRLPELKQAIDQIAGGFFSPKQPDLFKEIVNMLMHHDRFKVFADYEDYIKCQEKVNALYKNPKEWTKKVIYNIAGCGKFSSDRTIAQYAREIWGVEPTLEKIPAPDDKH

SEQ ID NO: 2231 - protein, 333 aa, Oreochromis niloticus
MVKVGINGFGRIGRLVTRAGFHSKKVEIVAINDPFIDLEYMVYMFKYDSTHGRYKGEVKAEGDKLVIDGHKITVFHERDPANIKWGEAGAEYVVESTGVFTTIEKASTHLKGGAKRVIISAPSADAPMFVMGVNHEKYDNSLKVVSNASCTTNCLAPLAKVINDNFGIIEGLMSTVHAITATQKTVDGPSGKLWRDGRGASQNIIPASTGAAKAVGKVIPELNGKLTGMAFRVPTPNVSVVDLTVRLEKPAKYDDIKKVVKAAAEGPMKGILGYTEHQVVSTDFNGDCHSSIFDAGAGIALNDHFVKLVSWYDNEFGYSNRVCDLMAHMASKE

SEQ ID NO: 2232 - protein, 5072 aa, Oreochromis niloticus
MAEGGEGEEEIQFLRTDDQVVLQCTASVLKEQIKLCLSCEGFGNRLCFLETTSNAQNVPPDLAICTFILEQSLSVRALQEMLANTVEMTESSQGGGHRTLLYGHAILLRHHHSGMYLSCLTTSRSLTDKLAFDVGLQEDSTGEACWWTIHPASKQRSEGEKVRVGDDLILVSVSSERYLHLSYASGDLMVDASFMQTLWNMNPISSGCELAEGYLTGGHVLRLFHGHMDECLAIATPEEGEEKRRMAHYEGGTVCSQARSLWRLEPLRISWSGSHMKWGQSFRIRHITTGRYLCLDEEKGLLVVDPEKANTKLSAFCFRASKEKVDVAQKRDVEGMGIPEIKYGESMCFVQHVSTGLWLTYAALDAKAARLGMMKRKVILHQEGHMDDALTVSRSQTEESQAARMIYSTTGLFRQFINGLDSLSGKNKSLGTGSLPLESVILSLQDLIFYFRPPEEELEHEEKQTKLRSLRNRQNLFQEEGMITIVLECIDRLNVYNTAAHFSEFAGEEAAESWKEIVNLLYELLASLIRGNRSNCALFCDNLDWLVSKLDRLEASSGILEVLYCVLIESPEVLNIIQENHIKSIISLLDKHGRNHKVLDVLRSLCVCNGVAVRSNQNLITENLLPGRDLLLQTNIVNYVTSVRPNIFLGTCEGSTQYKKWYYEVMVDHVEAFVTAQASHLRVGWALTEGYSPYPGGGEGWGGNGVGDDLYSYGFDGLHLWSGTVARQVASPSAHTLAADDVVSCCLDLSVPSISFRINGHPVQGMFENFNVDGLFFPVISFSAGVKARFLLGGRHGDFKFMPPPGYAPCYEALLPRERMRIEHIKEYKHDFDGVRNLLGPTLSLTHTSFTPCPVDTIQIVLPPHLERIREKLAENIHELWAVTRIEQGWTYGIFRDDNKKLHPCLVDFQSLPEPEKNYNLQMSAETLKTLLALGCHVGMGDEKAEENLKKIKLPKTYVMSNGYKPAPLDLNHVKLTPNQNQLVEKLAENGHNVWARDRVRQGWTYSIVQDIVNKRNPRLVPYNLLDERTKKTNRDSVNNAVRTLIGYGYNIEPPDQESTGHGLENTRGDKVRIFRAEKSYAVTQGKWYFEFEAVTTGEMRVGWARPNVRSDTELGADELAYVFNGNKAQRWHIGNEPFGRQWQSGDVVGCMIDLTEMNIMFTLNGEMLISDSGSEMAFKDIEIGDGFIPVCTLGLSQVGRINLGQNVSSLRYFAICGLQEGFEPFAINMKRDITMWFSKSLPQFVPVPADHNHIEVSRVDGTVDSAPCLKLTHKTFGSQNANTDMMFLRLSMPVQFHETFKIPAGTTPLTRALTIPEEEVAVVEPDSEFEVLKKSASRKEQEEDKKDPSVPKEISVENEKDTMSEKGKKKGFFSKAKKAAMTPLAPPPAPPTVPRLVEDVVPDDRDDPEIIQSTTTYYYSVRIFAGQEPSGVWVGWVTPDYHMYDQNFDLSKVRSVTVTVGDDKGNIHDSMKHSNCYMVWGGDLVSNQQTRFSQEDMVIGCLVDLATGLMTFTANGKEINTFYQVEPNTKLFPAVFVQPFSQNMVQLELGKLKNIMPISAAMFRSERNNPVPQCPPRLDVQMLTPVIWSRMPNHFLKPEVGKVNERLGWMVECVEPLIMMALHIPEENRCIDILELSERQDLMKFHYHTLMLYCAVCALGNNRVAHALCSHVDESQLFYAIENTYLPGPLRSGYYDLLISIHLESAKRARLGTNREFIVPMTEETLSIKLYPDAIKAHSLPGVGLTTCLRPKLHFSSINFVGTDPDLYTISPVFPLQELKTKAISMLREAVLDGSQAMRDPVGGSVEFHFVPILKLISTLLIMGIFNDDDTKHILKMIDPNVFSGKEEEEAEEGGAAEGENEEKKEEESEEAAEDELEDEGVGDEEEEELKELEKPEGEEEEAEPKEEGEEGEKDKEEAKRGKVDGEKAEEEKESEAVEAEAQEEEEGLEEGLLQMTLPESVKLQMCTLLQYFCDCELRHRVEAIVAFSDQFVHDIKSNQRVRYNQLMRAFTMSAAETARKTREFRSPPQDQVLMLTNFKHQEDEDSPVPEDVRETLAEFHKDLLLHCGIHIEEEPEEEEVDTSLRGRLLSLVDKVKSLRKKKEEEEKPEVEEEPKPSTLQELISHTMIHWAQESFVQNPELVRLMFSLLHRQYDGLGELIRALPKAYAINAVSVQDTMELLECLGQIRSLLIVQMGPEEERLMIQSIGNIMNNKVFYQHPNLMRALGMHETVMEVMVNVLGGGGDSKEIRFPQMVTSCCRFLCYFCRISRQNQRSMFDHLSYLLQNSGIGLGMRGSTPLDVAAASCIDNNELALALQEQDLEMVVTYLAGCGLQMCPMLLSKGYPDIGWNPCGGERYLDFLRFAVFVNGESVEENATVVVRLLIRRPECFGPALRGEGGNGLLAAMEEAIKISEDPARDGPTVKKDRRFMFGGEEQHEENRVHLGNAIMSFYSALIDLLGRCAPEMHLIQAGKGEALRIRAILRSLVPIEDLVGVISLPVQIPAYGKDGQIIEPKMSASFVPDHKASMVLFLDRVYGIDNQDFLLHVLEVGFLPDMRAAASLDTVAFSTTEMALALNRYLCSAVLPLLTKCAPLFAGTDHRAIMIDSMLHTIYRLSRGRALTKAQRDVIEECLMSLCKYLRPSMLQHLLRRLVFDVPILNEYAKMPLKLLTNHYERCWKYYCLPNGWANFGVTSEEELHLSRKLFWGIFESLAHKKFDAELFKIAMPCLCAIAGAIPPDYVDASYSSHTEKKASVDAEGNFDPKPVETTNTIIPERLDPFVNKYAEHTHDKWAFEKIQNNWTYGEVLDENAKTHPMLRPYKTFSEKDKEIYRWPIKESIKAMLAWEWTIEKARDGEGEVEKKAAATTTTRKISQTAQATYDPSHGYSPQPIDISGMALSRELQSMAEQLAENYHNTWGRKKKLELQSKGGGTHPLLVPYDTLTAKEKARDREKAQDLLKFLQLNGYAVTSPRGLKDMEQDISSIEKRFAYGFLQKLLKWMDIAQEFIAHLEAVVSSGRVEKSPHEQEIKFFAKILLPLVNQYFKNHCLYFLSTPAKVLGSGGHSSNKEKEMIASIFCKLAALVRHRVSLFGTDAPAVVNCLHILSRSLDARTVMKSGPEIVKAGLRQFFESAADDIEKMVENLKLGKVSSRNQVKGVAQNINYTTTALLPVLTSLFDHIAQHQFGDDVMLDDLQISCYRLMCSIYSLGTVKTPHVEKQRPALGECLAHLAAAMPVAFLEPVLNEFNSFSVYTTKTPRERAILGLPNQVEELCPDIPELEILMKEIHDLAESGARYTEMPHVIEITLPMLCNYLPRWWERGPESFPEQDGQLCTAVTSEQLNQLLGSIMKIVVNNLGIDEASWMKRLAVFAQPIVSRAKPEMLKSHFIPTMEKLKKRAAKVVAEEDHLRMEGKTEVDSENGTIRDEFAVLCRDLYALYPLLIRYVDNNRARWLTCPDPDAEELFRMVGEVFIFWSKSHNFKREEQNFVVMNEINNMSFLTADSKSKMSKAGDGESGGSEQERTKKKRRGDRYSVQTSLIVAALKKMLPIGLNMCSPADQELINLAKIRYSLKDTDEEVREFLHNNLHLQGKVEDPAMRWQMSLYKEMSGKAEDADDPEKVVKRVQEVSAVLYHIEVTEHPFKSKKMVWHKLLSKQRRRAVVACFRMTPLYNITTHRVTNMFLDAYKRNWLETEGYSFEDKMIDDLSKAMEEEEEEEEETETKPDPLHQLILHFSRTALTEKLKLDVDHLYMSYADIMAKSCHIGEEDEGGEQEGEEPSFEVRQTEMEKEMEKQRLLYQQSRLHNRGAAEMVLQMISACKGEPGAMVSSTLKLGISILNGGNSDVQQRMLDYLKDKKDVGFFLSVQSLMQTCSVLDLNAFERQNKAEGLGMVSEEGTNEKVMADDEFTCDLFRFLQLLCEGHNNDFQNYLRTQTGSTTTINVIICTVDYLLRLQESISDFYWYYSGKDIIDEPGKRNFSKAMTVAKQVFNSLTEYIQGPCTGNQQSLAHSRLWDAVVGFLHVFAHMMMKLAQDSSQIGLLKELLDLQKDMVVMLLSLLEGNVVNGTIARQMVDMLVESSSNVEMILKFFDMFLKLKDIVASDAFRDYVTDPRGLISKKDFSKAMDSQKQYSPSEIQFLLSCSEADENEMINFEEFADRFQEPAKDIGFNIAVLLTNLSEHVPHDTRLQNFLEQAESVLNYFRPFLGRIEIMGASRKIERIYFEISEENRNQWEMPQVRESKRQFIFDVVNEGGESEKMEMFVNFCEDTIFEMNIAASISEPEGDGAEEEDDEEEEEGGGDEGESGEGDEGNGEGEAPESASAFAEFLKSVVNFFNMFTFRNLRRRYRKLRKMTVKDMIIGLVTFVYTVLMGILMFVYSICKGFFTLIWKALFGGGLVEGAKKMTVTEILASMPDPTQDEVHGDLPPEPGAREVQDADGVADLIDAVGGEEEEEDGEDREGGRLPGFNTPGGLGDMGETTPEEPPTPEGTPLLKRKLLAAAVGGQEEEEKGEHEEEAPQETEKADTENGEKTEKAEKAEPEPEVKEEEPEEQEEISVKTKVKKDKKSVKEGFKLWNELEVQRIKFMNYLSRNFYNLRFLALFIAFALNFILLFYKVSDTPPGEEEFEGSGLFEGSGIFEGSGAEEDGSGLDDGGDDDDEEGPLYYFLEESTGYMEPAMAFLGIVHTIISFLCIIGYNCLKVPLVIFKREKELARKLEFDGLYVTEQPEDDDIKGQWDRLVLNTPTFPNNYWDKFVKRKVLDKYGDIYGRERIAELLGMDLASLDVSAMSHGKKPEPDTSMFSWITSIDIKYQIWKFGVVFTDNTFLYLVWYMLMSLLGHYNNFFFAAHLLDIAMGVKTLRTILSSVTHNGKQLVMTVGLLAVVVYLYTVVAFNFFRKFYNKSEDEDEPDMKCDDMMTCYLFHMYVGVRAGGGIGDEIEDPAGDEYELYRVVFDITFFFFVIVILLAIIQGLIIDAFGELRDQQEQVREDMETKCFICGIGSDYFDTTPHGFETHTLEEHNLANYMFFLMYLINKDETEHTGQESYVWKMYQERCWDFFPAGDCFRKQYEDQLG

SEQ ID NO: 2233 - protein, 738 aa, Oreochromis niloticus
FLLLKLSVCITETDDKMRAFAEQVFASETKDETVRDEISMFDVAEDCPIIHHEMAHHLHTDDDEQKRKKRSRTMAVPTVASQAAATPVVSVEVDTPTYLEVPDFQRVAVIGDYAAGVTMDDFELACRGLYRALTIREKYMRLAFQRFPRTASQYLRQIEGESFRPEEQLEPVFTSPPKEGEDPFDVKNLPKNLGYVARMKDGVIYVYNDAAAADKHKPKDTPYPDLNTFIDDMNFLIALIAQGPTKTYTHRRLKFLMSKFNVHEMLNEMEEMKEVKKNPHRDFYNCRKVDTHIHAAACMNQKHLLRFIKKSYRVDAERVVHNLKGKEVTMKELFQSLNLHPYDLTVDSLDVHAGRQTFQRFDKFNAKYNPVGASELRDLYLKTENHINGEYFATIIKENQEVANDLEEAKYQYAEPRLSIYGCNANEWNKLSNWFVRHRVYSPNLKWMIQVPRIYDIFRGRNFVPHFGKMLENIFLPVFQATIDPQSSPELSIFLKHVTGFDSVDDESKHSGHMFSTKSPKPEEWDIAKNPSYTYYIYYMYANIAALNQLRKQRGMNTFMFRPHCGEAGAITHLLAAFMTADNISHGLNLKKSPVLQYLYVLSQIPIAMSPLSNNSLFLEYAKNPLLEFHKKGLVVSLSTDDPMQFHYTKEPLMEEYAIAAQVFKLSTCDMCEIARNSVLQSALSDEEKRHFLGKDYLKEGPEGNDIRKTNVPQIRMAYRYETLCYELNLIKEGLKSE

SEQ ID NO: 2234 - protein, 434 aa, Oreochromis niloticus
MSITKIHAREILDSRGNPTVEVDLWTAKGLFRAAVPSGASTGVHEALELRDGDKSRYLGKGTVKAVDHVNKEIAPKLIEKKFSVVEQEKIDKFMLELDGTENKSKFGANAILGVSLAVCKAGAAEKGVPLYRHIADLAGHKDVILPVPAFNVINGGSHAGNKLAMQEFMILPVGASNFHEAMRIGAEVYHNLKNVIKAKYGKDATNVGDEGGFAPNILENNEALELLKTAIEKAGYPDKIIIGMDVAASEFFRNGKYDLDFKSPDDPSRHITGEKLGDLYRSFIKNYPVQSIEDPFDQDDWEHWAKFTSSVDIQIVGDDLTVTNPKRIQQAVDKKACNCLLLKVNQIGSVTESIQACKLAQSSGWGVMVSHRSGETEDTFIADLVVGLCTGQIKTGAPCRSERLAKYNQLMRIEEELGDKAKFAGKDFRHPKIN

SEQ ID NO: 2235 - protein, 322 aa, Oreochromis niloticus
MTVGCVAGDEESYEVFKDLLDPVISDRHGGYKPTDKHKTDLNFENLKVQGGDDLDPNYVLSSRVRTGRSIKGFTLPPHNSRGERRAIQNLSIEGTALSSLEGEFKGKYYPLDGMTDAEQEQLIADHFLFDKPVSPLLTCAGMARDWPDARGIWCRHNDNKTFLVWVNEEDHLRVISMQKGGNMKEVFRRFCVGLQKVQIEEIFKKHNHGFMWNEHLGYILTCPSNLGTGLRGGVHVKLPKLSTHPKFEEILTRLRLQKRGTGAGGVDTASVGGVFDISNADRLGSSEVEQVQLVVDGVKLMVEMEKKLEKGESIDGMIPAQK

SEQ ID NO: 2236 - protein, 1485 aa, Oreochromis niloticus
MSASLQVTQKLQHQHQHQHEEKQQQQHHYESSYYLSSKSSVSKQSFSTVKTTSHRKKISVKTEKGQEVVKLSPLPKRAKRTYLAMDKDKEVIGYVIPVFRASHDVVRGLMEAQEEEVTEEGINYVAMRNLFVREAREAMEVKVEKKTRSKHVRESAVRLEMSRTMEEWLEFRKKMNPDSLTHRPEFIVKPRGQTVWEGKDVKLHCTVAGWPKPRIAWYKNNVLIDAKAHPEKYTAESNYNMHSLEIKNCDFFDTAKYHVSALNVKGETSAVASVVVKRFQEGVEPGPLDPKPHGFSPEHGVTFETTIIDKFEVAFGSEGETLSLGCTVIIYPTVKKYQPEVVWYRNSVPLKPSKWVHTHWSGERAVLTLVHLNKEDEGMYTLRVNTKSGYDTYAAYVFVRDADVEVEGVPVAPLDVRCHDANKDYVVVTWKQPAVEGSSSILGYYIDRCEVGTHHWAQCNEVPVKYARFPVTGLVEGRSYVFRVRAVNKAGVSRPSRISEAVVAMDPSDRARLRAGPSAPWTGMIKFTEEDPTVGVVPGEPTDVVVTEATKSYVVLAWKPPAQRGHEGVMYYIEKRISGTDTWQRVNTGMPVKSPRFALFDLAEGKSYSFRVRCCNSAGVGEASESTGEVIVGDKLDLPSAPGNPVATRNTDTSVVVFWGASKDVQHLVGYYIECSVVGTDVWMPCNNKPVKQTRFVCHGLITGANYVFKVKAVNAAGYSQSSPNSDAVVVQAAISVPGKPTGVTLLEAFKDYMVLGWNAPANNGGADIRGYFVDYRTVKGGVAGKWHEMNHQALTTTSYKAENLKERLFYQFQVRAVNMAGVSKPSLPSAPLECKEWTITVPGVPVGLHVLEIRDTSVVVLWEPPVFDGRSPVNGYYLDVKEASAGEECWKGVHEKVNKMKYMKVTGLKGGASYVFHVRAQNLVGVGKPSAVLGPILAQTRPGTKEIYVDVDDDGVISMVFECSEMMEGSEFVWSKNYKEITDTSRLTIISERGKSRAIFNSPSLEDLGTFSCVVTNTDGISSSYTLTEEGLKRLLDISHDHKFPVIPFKNEMAMELLEKGRVRFWTQVEKCTSDCQVEYVFNDVIISQGKKYTMNFDKSTGIIEMFMDSLEVTDEGTFTFNLVDGKAKGTTSLVLIGDEFRELQKKSEFARAEWVRKQGPHFVEYLDFSVTPDCDVLLKCKIGNVRPETEITWSKDCIEIAEDDEDAKKIERQDGELTFNIGKISKHDAGVYEVFLKDERGRDKSTFNLTDAGYQAVMNELFRVIANSSSEIKVLSTEHGIVLYSTVTYYHEDLRVGWLHKDGKIAASERVKSGVTGDQLWLKINEPTEKDKGKYSMDIFDGKDGVKRAFDLTGQAWQEAFEEFQRLKAAAIAERNRARVVGGLPDVVAIQEGKSLNLTGNVWGEPVPEVSWTKNEKQLVSDDHYKLKFEHNKFASITIAAVTTADSGKYALVVKNKYGTEAGEFTVSVYNPEEEESKEEKKD

SEQ ID NO: 2237 - protein, 173 aa, Oreochromis niloticus
IKQTHLRGRKRRRRHSQRQTSSADMERTFIAVKPDGVQRGLCGEIIKRFEHRGFRLVAAKFVQASEDHMKKHYLDLKDMPFYAGLCKYMSSGPILAMVWEGQNIVKLARMMLGETNPADSKPGSIRGDLCINIGRNIIHGSDTLENAKMEVDLWFKPEEFVTYTPCAQSWLYE

SEQ ID NO: 2238 - protein, 227 aa, Oreochromis niloticus
MSDTEEVGVEEEKPKFKPTAPKIPEGEKVDFDDIQKKRQNKDLMELQALIDAHFEHRKKEEEELIALKERIEKRRAERAEQQRVRAEKEKERQARREEERRIREEADAKKKADEDAKKKSALSSMGSQYSSHLQRADQKRGGKKETEREKKKKILAARRKPLNIDHLNEEKLKEKIKELHDWMAQLESEKFDHTERLKRQKYEVTTLRKRIEELSKFSKKGAARRRK

SEQ ID NO: 2239 - protein, 170 aa, Oreochromis niloticus
MAPKKAKRRQAAGDSGSSNVFSMFEQSQIQEYKEAFTIIDQNRDGIISKDDLRDVLASMGQLNVKNEELEAMIKEASGPINFTVFLTMFGEKLKGADPEDVILSAFKVLDPAATGTIKKEFLEELLTTQCDRFSKEEIKNMWAAFPPDVAGNVDYKNICYVITHGEEKEE

SEQ ID NO: 2240 - protein, 1262 aa, Oreochromis niloticus
HCTVSGWPDPRVVWYKNNVALDPLANPGKYKIESRYSVHSLEINKCDFDDTAQYRVSAMNAQGELSAFASVVVKRFKGEIDEFLPAPRRKPLESKICQTHIVDKFGVSFGREGETMSLGCTVIIYPALHRYQPEVEWYRDDVLLSPSKWTHMHWSGDRATLTLTHLNKEDEGLYTLRVTTKSGYETYSAYVFVRDADAEVEGAPAAPLDVRCLDANKDYIIVAWKQPAVDGGSSILGYFVDRCEVGTTHWIQCNDTPVKFARFPVTGLVEGRSYIFRVRAVNKSGISRPSRVSEPVAAMDPADRARMRGTSAPWTGQIIVTEEEPAGKGIVPGKPLDLQVTEATKNYVVLSWKPPGEKGLEGVMYYVEKCVSGTDSWQRVNTEIPVKSPRFALFDLAEGKAYRFRVRCCNSAGVGEPSDPTEATTVGDKLDIPSAPGKVIPTRNTDTSVVVSWEASRDAKELVGYYIEGSIVGSNVWEPCNNKPVNVTRFICHGLITGEKYVFRVRAVNAAGISQFSQESEAVEVKAAIASPAPPYGITVLECVRDSMVLAWKQPTFIGGADITGYFVDYREVIDGVPGKWHEANIKAVSERAYRVSDLKENKKYQFQVRAANMAGVGIPSLPSNTFLCEEWTIAVPGPPYDLQIREVRNDSLVLLWKPPVYQGRDPVNGFYVDIKEADAPEEAWRGVNTKALEKTYTKIKDLKEGEKYVFRVRAQNKAGVGKVSDVTEPVPALTKPGTKEIVVDVDDDGVISLNFECGNMTPDSKFVWSKNYEEITDTSRLSTETKGTKSKVVFNRPGEEDIGVYSCLVTHTDGASSSYTLSEEELKRLLEISHDHKFPIIPLKSDLAVELLEKGRVRFWLQAEKMSNNGKVDYVFNDNVVSQGEKYKMNFDKNTGVIEMTMESLTPADEGTYTFQLQDGKATNQSSLVLIGDVFKQLQKESEFQRKEYFRKQGPHFIEYLSWEVTPECCVVLKCKVGNMKKETSALWHKDRHQIKVDEHLGFAEGVLKLEIAQISKKDAGVYEVILKDDRGQDTSTLNLTDQGFKDLMNEVFSVIANSSTPLKITSTDEGIRLYTFVSYYNDLLQVTWHYKDSAIAFSDRIKSGVVGEQLWLQIKEPTEKDMGKYAIEFYDGKGGLRRTVDLSGQAFDDAFAEFQRLKAAAIAERNRARVAGGLPDVVTIQEGKALNLTCNISGNPVPEVTWLKNDREITSDEHCILKFESGKFASFTITGVNTSDSGKYSILVKNKYGTESGDFTVSVF

SEQ ID NO: 2241 - protein, 169 aa, Oreochromis niloticus
GPHCLGTSASHLLQLLLSKMTEFTPDQIEDFKEAFGLFDRVGDSQVAYNQVADIMRALGQNPTNKSVNKILGNPSADDLANKRLNFDAFLPMLKEVDAQPKGTYDDYVEGLRVFDKEGNGTVMGAELRIVLSTLGEKMNEQEIDALMAGQEDENGSVHYEAFVKHIMSV

SEQ ID NO: 2242 - protein, 305 aa, Oreochromis niloticus
MPLGTPAPLTKRKKPSKIITDLSHIPQDEYESEPEASEFDLGTKIRTPKDIMLEELSLLKNRGSKMFRMRQQRVEKFIYENNPDVFSSESMDNLQKFVPSLGGQVGGQIINLGGHFVSKESGRLNFVGLQTGGGAPVPPPKPGSKGAGGSGGAGGAGSAGGVGVGEKGGKGEGGGKHDGTKKQIHVKTYVSPWEKAMKGDETLLATLKTNMPHPNAKKELPQYKCFNRSAMPYGGFEKANQFLKFQLPEAEATKEEPEPAVVYHHDISCRPSFNRTPIGWVGSSEPSSIHMETDAVPFDGETDEL

SEQ ID NO: 2243 - protein, 475 aa, Oreochromis niloticus
MSKSYASSAQSASSYRRTFGSGVGSTPLSSMFSSSLGGAHSSASSRMSSRVYEVKSTGIPSYSSFKLSSGAGLGSSTAMRTYAGEKLDFNLADAMNQDFLNTRTNEKAELQHLNDRFASYIEKVRFLEQQNAALTVEIEKLRGREGPGRVAELYEEEMRELRRQIEALTNQRARVEVERDNLADDLQKLKLRLQEEIHQKEEAENNLSAFRADVDSATLARLDLERRIESLQEEIAFLKKIHEEEIRELQSQIQDTQVQIQMDMSKPDLTAALRDIRMQYEAIAAKNIAEAEEWYKSKVSDLNQAVNKNNDALRQAKQETMEFRHQIQSYTCEIDSLKGTNESLLRQMRDMEDRMAREATGYQDTITRLEEDIAKMKDDMARHLREYQDLLNVKMALDIEIATYRKLLEGEESRITTTIPVQSAYSSIGFRETSPESQHQRSSEVHSKKTVLIKTIETRDGEVVSESTQHQQDIM

SEQ ID NO: 2244 - protein, 1080 aa, Oreochromis niloticus
MLSFVDTRILLLLAVTSYLASCQCKGPKGPRGDRGPPGPNGKDGLPGPPGPAGPPGPPGLGGNFAAQYDGVKAPDPGPGPMGLMGPRGPPGPPGASGPQGHTGHAGEPGEPGQAGAVGPRGPPGPPGKAGEDGNNGRPGKPGDRGAPGPQGARGFPGTPGLPGMKGHRGYTGLDGRKGEPGAAGPKGEPGAHGAAGSPGLAGARGLPGERGRPGPAGPAGARGADGNAGPTGPAGPLGAAGPPGFPGGPGPKGETGPVGATGPSGPQGSRGEPGPNGAVGPVGPSGNPGANGLNGAKGAAGTPGVAGAPGFPGPRGGPGPQGPQGAAGPRGLAGDPGIQGVKGDSGPKGEPGHSGPQGPPGPQGEEGKRGPTGEIGATGLAGARGARGAPGSRGMPGAEGRTGPVGMPGARGATGAAGPRGPPGDAGRAGEPGAAGLRGLPGSPGSSGPPGKEGPAGPSGQDGRSGPPGPSGPRGLSGNIGFPGPKGPSGEPGKPGERGATGPTGLRGPPGPDGNNGATGATGVAGGPGEKGEQGPSGSPGFQGLPGPAGPAGEAGKPGDRGIPGEPGAAGNAGAKGERGNPGAAGSAGPQGPIGPRGPAGAPGPDGGKGEPGRLGPAGPPGARGAPGNIGLPGMTGPQGEAGREGSPGNDGPPGRPGAAGLKGDRGEPGSAGTTGLAGAPGPAGPTGAAGRPGNRGEAGPSGPSGAVGPAGARGASGPAGPRGEKGVAGDKGERGMKGLRGHPGLQGMPGPSGPPGDTGAAGAHGPSGPRGPAGPHGPVGKDGRPGAHGTMGAPGARGPNGYSGPVGPPGPPGLPGPPGPAGGGYDVSGGYDEYRADQPALRAKDYEVDATIKSLNTQIENLLTPEGSRKNPARTCRDIKLSHPDWSSGFYWIDPNQGCTNDAIKVFCDFTTRETCIYAHPESIARKNWYRSTENKKHVWFGETINGGTEFTYNDETLSPQSMATQLAFMRLLSNQASQNITYHCKNSVAYMDGESGSLKKAVVLQGSNDVELRAEGNSRFTFSVLEDGCTTHTGEWSKTVIEYRTNKPSRLPILDIAPLDIGGADQEFGLDIGPVCFK

SEQ ID NO: 2245 - protein, 193 aa, Oreochromis niloticus
MAPKKDAKAPAKKAEPAPAPAPAPAPAPAPAPAAPAVDLSAIKVEFSADQIEDYREAFGLFDRVGDNKVAYNQIADIMRALGQNPTNKEVNKLLGNPSADDMANKRVEFEGFLPMLQAIINSPNKAGFEDYVEGLRVFDKEGNGTVMGAELRIVLSTLGEKMTEAEIDALMAGQEDENGCVNYEAFVKHIMSV

SEQ ID NO: 2246 - protein, 281 aa, Oreochromis niloticus
MSTYTVSLNGPAPWGFRLQGGKDFNMPLTISRITPGSKAAGGSLTQGDIISAIDGVSTEGMTHLEAQNKIKSATTKLTLSMQKSRRPAPVPTATPRMDSPMPVIPHQKVIANTAANVEYTPSFNPIALKDSALSTHKPIEVKGPGGKATIVHAQYNTPISMYSQDAIMDAIAGQSQAKGHDSGVLPIKEPVVDCASPVYQAVIRPGEPQDMTDWARRAANLQSKSFRILAHITGTEYLQDPDEEALQKSREKFESEVKGPRFAKLKNWHHGLSAQILNVQE

SEQ ID NO: 2247 - protein, 778 aa, Oreochromis niloticus
MAQQSPTDPTKMGVGRAIAVLTSGGDAQGMNAAVRAVVRVGIYTGAKVFFVHEGYQGLVDGGDHIRPATWESVSMMLQLGGTVIGSARCQDFRTKEGRTKAACNLVKLGITNLCVIGGDGSLTGANQFRTEWSELLADLVKAGKITANEAKSASHLNIVGMVGSIDNDFCGTDMTIGTDSALHRIIEIVDAITTTAQSHQRTFILEVMGRHCGYLALVTALACGADWVFIPEMPPDDGWEEHLCRRLTEQRGRGSRLNIIIVAEGAMDRQGKPITCDHVKQLVSKKLGFDTRTTILGHVQRGGTPSAFDRILASRMGVESVMALLEATPETPACVVSLSGNMAVRLPLMECVQVTKDVTTAMAEGRYDDAVKLRGKSFENNWNTYKMLAHVRPPEAKSNINIAILNVGAPCSGMNAAVRSAVRTGLLQGHQMMAVHDGFDGLAHGVIEPIGWSGVAGWTGKGGSFLGTKRSLPQEFMEEISLSITKFNIHALIIIGGFEAFMGGLQLVQAREKYEELCIPLVVVPATVSNNVPGSDFSIGADTALNTITMTCDRIKQSAAGTKRRVFIIETMGGYCGYLATMAGLAGGADAAYIYEDPFNIHDLELNVEHLVEKMKTTVKRGLILRNEKCNANYTTDFIFNLYSEEGKGVFDCRKNVLGHMQQGGTPSPFDRNFGTKMGMKSVLWLTDKLKECYRHGRIFANSQDSACVLGMRKRALVFQPLAELAEQTDFDHRIPKTQWWLRLRPILKILAKYKVSLDTSEKTAMEHVIKKRGLVKQ

SEQ ID NO: 2248 - protein, 1291 aa, Oreochromis niloticus
MFSFVDLRLALLLSAAVLLVRAQGEDDRTGKSCTLDGQVFADRDVWKPEPCQICVCDSGTVMCDEVICEDTTDCPNPIIPHDECCPICPDDGFQEPQTEGTVGARGPKGDRGLPGPPGRDGMPGQPGLPGPPGPPGPPGLGGNFSPQMSGGYDEKSPAMPVPGPMGPMGPRGPPGPPGSSGPQGFTGPPGEAGEPGSPGPMGPRGPAGPPGKNGEDGESGKPGRPGERGPPGPQGARGFPGTPGLPGIKGHRGFSGLDGAKGDTGPAGPKGEAGTPGENGTPGAMGPRGLPGERGRAGATGAAGARGNDGAAGAAGPPGPTGPAGPPGFPGGPGAKGDAGAQGGRGPEGPAGARGEPGNPGPAGPAGPAGNPGSDGAPGAKGAPGAAGVAGAPGFPGPRGPSGPQGAAGAPGPKGNTGEAGKPGERGTMGPTGPAGAPGKDGDVGAQGPPGPAGPAGERGEQGPAGSPGFQGLPGPQGAVGETGKPGEQGVPGEAGAPGPAGARGDRGFPGERGAPGAIGPAGARGSPGASGNDGAKGDAGAPGTPGAQGPPGLQGMPGERGAAGLPGLRGNRGDQGPKGADGTPGKDGPRGLTGPIGLPGPAGSPGDKGEPGAQGPVGPSGARGPPGERGEAGPPGPAGFAGPPGADGQPGAKGEPGDNGAKGDSGPPGPAGPTGAPGPQGPVGNTGPKGARGPAGPPGATGFPGAAGRVGPPGPAGNAGPPGPPGPAGKEGPKGNRGETGPAGRPGELGAAGPPGPPGEKGSPGADGAPGSAGIPGPQGIAGQRGIVGLPGQRGERGFPGLAGPVGEPGKQGPSGPSGERGPPGPMGPPGLAGAPGEPGREGTPGNEGAAGRDGAPGPKGDRGESGPAGAPGAPGPPGAPGPVGPAGKTGDRGETGPAGPAGAAGPAGPRGPAGAPGLRGDKGETGEAGERGMKGHRGFTGMQGPPGPPGTSGESGPAGAAGPAGPRGPSGAAGAPGKDGVSGLPGPTGPPGPRGRSGEMGPAGPPGPPGPPGAPGAPGGGFDLGFMVQPQEKAPDPFRMYRADDANVLRDRDLEVDSTLKSLSQQIEQIRSPDGTRKNPARTCRDLKMCHPDWKSGEYWIDPDQGCTQDAIKVYCNMETGETCVSPTQREVAKKNWYISKNIKEKKHVWFGEAMNEGFQFEYGSEGSLPEDVNIQMTFLRLMSTEASQNITYHCKNSVAYMDAAAGNLKKALLLQGSNEIEIRAEGNSRFTYSVLEDGCTSHTGTWGKTVIDYKTSKTSRLPIIDIAPMDVGAPDQEFGFEVGPVCFL

SEQ ID NO: 2249 - protein, 1451 aa, Oreochromis niloticus
MFSFVDIRLALLLSATVLLARGQGEDDSKYHFQTLICTLDGQLYNDKDVWKPEPCQICVCDSGTVMCDEVICEDTSDCADPIIPDGECCPICPDGTDHQFRALSTPVGPTGPKGDPGLPGYPGANGIPGDPGPPGPPGPPGPPGLGGNFSPQYSDPSKSSGPPVPGPIGPMGPRGPPGPSGPPGPQGFTGPPGEPGEPGASGPLGSRGPSGPPGKNGDDGEAGKPGRPGERGPAGPQGGRGFPGTPGLPGIKGHRGFSGLDGAKGDSGPAGPKGEPGTSGENGIPGALGARGLPGERGRPGAPGPAGARGNDGNTGPAGPPGPTGPAGPPGFPGGAGAKGETGAPGGRGSEGPQGARGEPGNPGPAGPAGPAGAPGSDGSPGSKGAPGAAGIAGAPGFPGARGPAGAQGAVGAPGPKGNNGDPGPSGPKGEPGAKGEPGPAGIQGLPGPSGEEGKRGGRGEPGGAGPRGPPGERGAPGARGFPGADGGAGGKGAPGERGAPGPLGAQGVTGESGSPGAPGAPGLKGVTGSPGSPGPDGKAGPAGAPGQDGRPGPPGPGGSRGQPGIMGFPGPKGASGDSGKPGERGATGPAGAVGAPGKDGDVGAPGPSGPAGPAGEKGEQGPAGSPGFQGLPGPQGSTGETGKPGEQGAPGEAGPSGPAGPRGDRGFPGERGGPGIAGPTGPRGAPGPAGNDGPKGEPGAAGAPGGLGAPGMQGMPGERGAAGLPGARGDNGEPGGKGVDGAPGKDGPRGLTGPIGVPGPPGAQGEKGEAGAVGVAGPSGPRGSPGDRGEPGPAGAAGFAGPPGVDGQPGAKGESGDSGPKGDAGPPGPTGPAGASGPQGPAGAPGPKGARGSVGSPGATGFPGPAGRVGPPGPAGAGGAPGPGGPTGKDGARGARGETGPAGRPGEAGAAGPPGPSGEKGSAGSDGAPGAPGIPGPQGIAGQRGIVGLPGQRGERGFPGLPGPSGEPGKQGSSGPVGERGAPGPAGPPGLSGPTGEAGREGSPGHDGAPGRDGPSGPKGDRGETGLAGPPGPPGAPGAPGGVGPSGKTGDRGESGPSGPAGPAGPAGVRGPAGPAGAKGDRGEAGEAGERGHKGHRGFTGASGLPGPAGPPGERGPAGASGPAGPRGPSGSNGAPGKDGVNGIPGPIGPPGPRGRNGEMGPAGPPGPPGPAGPPGPPGSGFEFVSQPLQEKAPDPLRGGHYRADDPNVMRDRDMEVDTTLKTLTQKVEKIRSPDGTQKSPARMCRDLRMCHPEWKSGMYWIDPNQGSPLDAVKVHCNMETGETCVYPSESTIPMKNWYLSKNIREKKHVWFSESMTGGFQFQYGSDGADPEDVNIQMTFMRLMSNQASQNVTYHCKNSIAYMDSATGNLKKALLLQGSNDVEIRAEGNSRFTYSVSEDGCTSHTGTWGKTVIDYKTSKTSRLPIIDIAPMDVGAPDQEFGVQVGPVCFL

SEQ ID NO: 2250 - protein, 1565 aa, Oreochromis niloticus
MSKKSKVTDQTATGQAGIRKKSKVPGVMITQFMEELPEGMTTPDFTRKPIALTIQEGKFAFFKAKIVGTPTPTVTWSRANGEILFHPAVCQQKYDEATEEHTLEFPKVAPEDADTYKCFATNEYGRAVCTVVLNVIEVGFSKTKELQKAQIEETIDFRKHLKKRNPDGTREHKTMETEEKVWEILLSADKKDYERICAEYGITDFRGMLKKLNEMKKEREEEIAEFVTHISSLKPIEVKDDDYATIELDMDLKDPSSKIYLYKDGVMVPFSKEEGDDLKHSLKQVGKKYIFKIKKLGTEDAGLYSVDVEGVNVFSTDFKVPPVDFAVKIQEIKAEEREDALFQCVLTAPMNEIKWYGKSALLSNSEKHEITVSEDKLIHKLIVRDCMPLDAGIYAAVAGIKSCNAWLIVEADKDPASKGKKAARKTTMAGGGNEEELLKIAKEQQEKYQKELEEKLELAKKAHAEKEAAGAATQEDEEAAKKAAAEAKAKAKAAARAKRAAAGKDGAPRKSKKKGAGAGSGAASADGTVGAGGAAGVGGAASAGGADGAVGAGGAAGVGGAAGAGGAGGAAGDGGAAGVGGAVGAGGAAGVGGAVGAGGAAGVGGAFGPGGAAGAGGTSGPGGAGGAAGAAGIGIAAGATAVAGAGSTSGIGAGGAGGAGIGVDGGASAGGQEGGHGAAAIGKGGAQGAAGVGVGGVEGEAFEEEDEYDSFEDSDEEFEGEWGEEGYVGGGGEEGEGGEGGEGGEGGEGGGKGGKRRKRVRAGPLVPDTVIDPGVHFHAGLSDCKAVIGEAAELECKVSSEDCVGVWYKDGEEIKSSEGLTISKDGTFHRLKIHKVTEEFAGKYKFEADGRKTEAEITVEDPPRFNAEDLKAFKTPVTVKKGHKATFNLAFIGREPIKIQWYREGEELSEDANIKIEHSEGSSRLLLLKLQRKDSGEIKFKLKNEFGTVEALSQLVVLDKPTPPMGPLETVEASSSAVEFKWRPPKDSGGCKILNYILERQQVGRNTWKKLGPIGPEAKYRDTDVDHGRRYCYRLRVETEMGISELMETEDIQAGTKAYPGPPSAPKVVSAFKDCITLSWSPPADTGGTGILGYNLEKRKKGSNLWGPVNPPNEMIRGKQFAVKDVVEGMEYEFRVSAINNSGAGEFSSPSEFVFARDPKKPPGKVSDFKVTDSTYTTISLSWTKPKDIVGVADEAKGYFVEIRLAENTEWDRCNLNAITMTSYTVKGMKSMGMYWVRVIAINEGGHGDPQELDNYHISMPPPVRPRFTDAKIKSFMVVRAGNSARFNINFEASPWPDVIWLKDGVPVSKKVTISNAEGTSQILIPSAERSDTGVYTIIVKNVVGQETISIEIRVTDEPKPPGPVELDENVHGTVTISWTASPDEKRDDRLHYMVTKRDSSKRTWNTIADRIFNNRFTACNIMPGREYQFRVYAKNDMGSSKPSESPKWLIPAKKEKFTVKVPESKACNLLCPPKFIVPLKMHTAPEGYECYMTCAIKGDPTPHVTWLRDNVSLNTNTNYLISNTCGVCSLLILRVGSKDTGEYKVAAENSLGRAESATKLTVRE

SEQ ID NO: 2251 - protein, 332 aa, Oreochromis niloticus
MSTKEKLIGHVMKEEPVGSRCKVTVVGVGMVGMATAVSILLKDLCDELALVDVMEDKLKGEAMDLQHGSLFLKTHKIVADKDYSVTANSKVVVVTAGARQQEGESRLNLVQRNVNIFKFIIPNIVKYSPNCILMVVSNPVDILTYVAWKLSGFPRHRVIGSGTNLDSARFRHIMGEKLHLHPSSCHGWIIGEHGDSSVPVWSGVNVAGVSLQGLNPKMGAEGDPENWKAVHKMVVDGAYEVIKLKGYTSWAIGMSVADLVESIMKNLHKVHPVSTLVQGMHGVKDEVFLSIPCILGNSGLTDVIHMTLKPEEEKQLVKSAETLWGVQKELTL

SEQ ID NO: 2252 - protein, 493 aa, Oreochromis niloticus
MPSKPAPIKKAAKKEPAKKEEAKAPEPAPEPAPVEAPPAEPAPAEAAPAPAEGEAAPPAEAAEAPAPEEPKPPTPPPPKEPTSAPVDLFVEDKNDTSVTIIWSQPENIGPSGLDGYTIEVCKDGTEDWKAVNEELQKASRFVIKNQTTGDRLKIRVVAVNEGGRSPPVSLPEPVLVKEVADRPKVRLPRFLKQRYVANVGDKINLTVPFTGKPKPVVTWTKNGQPLDTKRVNIRSTERDSILFIRAAEREDSGVYEICVKVEDFEDKAQITLQIVELPGPPASVKIVDTWGFNVALEWTAPKDNGNTEITGYTVQKADKKTGDWFTVLEHYHRLNATISDLIMGNTYKFRVFAENKCGMSESAAVTKDAAKILKTGIDYKPPDYKEHDFSEAPKFTTSLADRATTVGYSTKLLCSVRGFPKPKIQWMKNQMIIGDDPKFRQICVQGICSLEIRKPGNFDGGVYSCRAKNDHGEATVSCKLEVKQAVIADADKK

SEQ ID NO: 2253 - protein, 530 aa, Oreochromis niloticus
MSKPKDTGSSIIHTQQLQAAVADTFIEHMCLLDIDSEPAVARNTGIICTIGPATRSVEKAKEMIKAGMNIARMNFSHGTHEYHAETIKNVREATESFVPGSVDYRPVAIALDTKGPEIRTGLIKGSGTAEVELKKGETIKLTLDDQYKDNCDEKILWLDYKNITKVVQVGSHIYVDDGLISLKVKEVGSNYLICDIENGGMLGSKKGVNLPGAAVDLPAVSEKDIQDLQFGVEQGVDMVFASFIRKAADVHAVRKVLGEKGKDIKIISKLENHEGVRRFDEILEASDGIMVARGDLGIEIPTEKVFIAQKMMTGKCNRIGKPIVCATQMLESMTKKPRPTRAEASDVANAVLDGNDCIMLSGETAKGDYPLEAVRTQHLIAREAEAAMFHRQVFEELRRLSHLTRDPTESVAIGAVEASFKCCASAIIVLTKTGRSAHMLSRYRPRAPIIALTRCGQAARQAHLYRGIYPVLYTKPANDVWAEDVDLRVNFAMEVGKHRKFFKTGDVAIVVTGWRPGSGYTNTMRVVLVP

SEQ ID NO: 2254 - protein, 171 aa, Oreochromis niloticus
MSEKKMTSSRRHHLKSLMLQIAANWIEKEKQEIAVSKQNYVAEKCPPPALSGDQATLMETCKKLHALIDKIDEERYDLQIKVGKTDKEIDDLKIKVVDLAGVKKPALKKVRMSADAMLKALLGSKHTVNLDLRANLKQVKKEVKEEPAEAVGDWRKNIEDKADRKKMFEAS

SEQ ID NO: 2255 - protein, 234 aa, Oreochromis niloticus
MSGEHRETQEVKGMNTYSVTLSGSPPWGFRLQGGKDFNMPLTVSRVQLTPGGKAAQAGIDVGDWVVAISDANAEEMTHVEAQNKIREASGSLTLTLSRFRPSKAGGDQKVQMEAHYKFRGETTFYDDIYQQSKYRHGLRVENIPCFIPNDRSKKRLIEDTEDWQPRTGTTQSRSFRILAQLTGTDFSTVQDPDDENMKRSRYREKFLTEIQSPRYARLRDWHHDRSARALNIKS

SEQ ID NO: 2256 - protein, 542 aa, Oreochromis niloticus
MVKITTVKTKPYTDQKPGTSGLRKRVTVFQQNQHYAENFIQSIISVIEPAERQTAALVVGGDGRFFMKDAIQLIVQISAANGINHLVIGHNGIILTASHNPGGPNGDFGIKYNISSGGPAPEGITNKIFEISKGLQEYHICPDLKVDLSKIGKQTFEVDTFKPFTVEIVDSVDDYAEMLRGIFDFAALKELLSGANHINVRLDAMHGVVGPYVKKIVCEELGSPANSAVNCVPQEDFGGHHPDPNLTYAADLVKTMKGGEYDFGAAFDGDGDRNMVLGKHGFFVNPSDSVAVIAANIKSIPYFQKTGVKGLARSMPTSGALDNVAKTLQMDLYETPTGWKFFGNLMDAGKLSLCGEESFGTGSDHIREKDGLWAVLAWLSILATRKQSVEEILKDHWQKFGRNFFTRYDYEEVDSDAANKMMKDLEATMSDASFKGKKFSSGDKTYEVAIADNFAYTDPVDGSVSKNQGLRIIFSDGSRIIFRLSGTGSAGATIRLYIDSYEKDAQKIYQDPQAILAPLVDIALKLSQLHERTGRTGPTVIT

SEQ ID NO: 2257 - protein, 247 aa, Oreochromis niloticus
MTRKFFVGGNWKMNGDKKSLGELIQTMNGAKVDPNVEVVCGAPSIYLDFVRSKLDPKFGVAAQNCYKVPKGAFTGEISPAMIKDCGVNWVILGHSERRHVFGESDELIGQKTAHALENGLGVIACIGEKLDEREGGITEKVVFAQTKVIADNVKDWSKVVLAYEPVWAIGTGKTASPQQAQEVHDKLREWLKTNVSEAVANSVRIIYGGSVTGGTCKELASQKDVDGFLVGGASLKPEFIDIINAKA

SEQ ID NO: 2258 - protein, 312 aa, Oreochromis niloticus
MTDKPGMTTGGGDDAGSIMALLERVAGLMDSVQVTQQRMEERQLELESTVKTIQADVVKLTNEHANTSSTVDRLLEKTRKVSRHIKDVRVRVENQNIRVKKVEATQGDLLAKNKFRVVIYQGDQEVKSVAPGNEPEEPSSSGARARAEVEPDKFELPPESDEEYMVVEEADSSAASRIKKTGLTRIESFKATFSKENMSKTRENLGTKVNKLGERIVTAERREKIRQSGERLKQSGEKLKDTITKSVPAKLNLKKERTVAEGQEGAEGVTEGALPVPPPKGRKTSPHAARPAEDEGRAEGSEVPMYDMKQLS

SEQ ID NO: 2259 - protein, 434 aa, Oreochromis niloticus
MKWTWVLVVVLLSFGSISLGKDSLDFPEYDGKDRVHDLNAKNYKSVMKKYDIMVVYYHDHPGSSRAAQRQFEIEELALELAAQVLDEFDDEDIGVGLIDAKHDKAVAKKLGLDESDSIFVFTEDEVIEYDGELAADTLVEFIYDVLEDPVEIIDNSKELKGFKNIEEDIKLVGYFKSHKSEHFEAFADAAEEFHPHILFYATFNPKVAKALDLKLNEVDFYEPFMDEPVVVPGKPYSEEELVKFIEDHDRPTLRKLQPHNMYEIWEDDVDGEHIIAFAEESDPDGFEFLEILKQVAEDNTDNPDLSIVWIDPDDFPLLLPHWEKTFGIDLSHPQIGVVEADDADSVWLDMDDGEDLPSADELEDWLEDVLSGEIDPDDDDDDDDDDDDDDDDDDDDDDDDDDDDDDDDDDDDDDDDDDDDDDDDDDDDDDDDDY

SEQ ID NO: 2260 - protein, 194 aa, Oreochromis niloticus
LISDKLKDAKIIFVVGGPGSGKGTQCEKIVAKYGYTHLSSGDLLRAEVASGSERGKQLQAIMQKGELVPLDTVLDMIKEAMIAKADVSKGYLIDGYPREVKQGEEFEKKIGKPCLLLYVDAKADTMVKRLLKRGETSGRSDDNEETIKKRLDLYYKATEPVIAFYESRGIVRKVDSELPVDDVFVQVSKAIDVL

SEQ ID NO: 2261 - protein, 264 aa, Oreochromis niloticus
MAAAHRLVIVRHGESAWNQENRFCGWFDADLSEKGLEEAKRGAQAIKEAGMKFDVCYTSVLKRAIKTLWTIMEGTDQMWLPVIRTWRLNERHYGGLTGLNKAETAEKHGEEQVKIWRRSFDIPPPPMDKDHPYHKIISESRRYKGLKPGELPTCESLKDTIARALPFWNEVIVPEIKAGKNVIIAAHGNSLRGIVKHLEGMSDAAIMELNLPTGIPIVYELDANLKPIKPMSFLGDEETVKKAMEAVAAQGKVKNSMQVWRGKA

SEQ ID NO: 2262 - protein, 299 aa, Oreochromis niloticus
MSDAVISFMKDFLAGGIAAAISKTAVAPIERVKLLLQVQHASKQITAETQYKGIIDCVVRIPKEQGFISFWRGNLANVIRYFPTQALNFAFKDKYKKIFLGGVDQKKQFWRYFAGNLASGGAAGATSLCFVYPLDFARTRLAADIGKGPAEREFTGLGNCIAKIFKTDGLRGLYLGFNVSVQGIIIYRAAYFGCFDTAKGMLPDPKNTHIIVSWMIAQTVTAAAGLVSYPFDTVRRRMMMQSGRKGADIMYKGTIDCWKKIIKDEGPKAFFKGAWSNVIRGMGGAFVLVLYDEFKKFTY

SEQ ID NO: 2263 - protein, 467 aa, Oreochromis niloticus
MTVGNMERAELFDAGSKGRGLRAAKELNTGEVIFSEPSFAAVVFDSLATQVCHSCFRHQANLHRCAQCKFAHYCDRTCQTACWNEHKQECGAIKKLGSAPSENIRLAARVLWRMHKDTGIASDSQLISVDQLQEHVADLAAEDFKQLRADVHKFLQYWSYGTRQHSVDYISHIFGIIKCNGFTLSDQRGLQAVGVGLFPNLCLVNHDCWPNCTVILNHGNQSAVSSALHSQRRIELRALGKIPEGEELTVSYVDFLNLSADRQKKLKERFHFDCTCEHCSKHIKDDLMTAVADSKPSADKVKEVTAFSKESLEKIEKSRVERDYNEVLKLCYECLQKQENVLADTNLYKLRVLSIASEVLSYQRSFAKAANYAHRMVEGYRKLYHPNNAQLGMAIMRAGVTHWHAGQIEEGHSLICQAYRILMVTHGPNHAITKDLEGMRTQTEMELKMFKQNKAAYQTMRDAALKH

SEQ ID NO: 2264 - protein, 163 aa, Oreochromis niloticus
STSMTDAQQEARSYLSEDMLAEFKAAFDMFDTDGGGDISTKELGTVMRMLGQNPTREELDEIIEEVDEDGSGTIDFEEFLVMMVRLMKEDQAGKSEEELADCFRVFDKNGDGYIDREEFALIIRSTGEAISEEEIDELLKDGDKNNDGMLDFDEFLKMMENVQ

SEQ ID NO: 2265 - protein, 354 aa, Oreochromis niloticus
MGCTLSTEDKAAVERSKMIDRNLRDDGEKAAREVKLLLLGAGESGKSTIVKQMKIIHEAGYSEEECKQYKAVVYSNTIQSIIAIIRAMGRLKIDFGDPARADDARQLFVLAGSAEEGFMTAELAGVIKRLWKDGGVQACFSRSREYQLNDSAAYYLNDLDRISQATYIPTQQDVLRTRVKTTGIVETHFTFKDLHFKMFDVGGQRSERKKWIHCFEGVTAIIFCVALSDYDLVLAEDEEMNRMHESMKLFDSICNNKWFTDTSIILFLNKKDLFEEKIKKSPLTICYPEYAGSNTYEEAAAYIQCQFEDLNKRKDTKEIYTHFTCATDTKNVQFVFDAVTDVIIKNNLKDCGLF

SEQ ID NO: 2266 - protein, 462 aa, Oreochromis niloticus
MGKEKLHINIVVIGHVDSGKSTTTGHLIYKCGGIDKRTIEKFEKEAAEMGKGSFKYAWVLDKLKAERERGITIDISLWKFETSKYYVTIIDAPGHRDFIKNMITGTSQADCAVLIVAAGVGEFEAGISKNGQTREHALLAYTLGAKQLIVGINKMDSTEPNYSQKRYEEIVKEVSTYIKKIGYNPDTVAFVPISGWNGDNMLEPSPNMTWFKGWKINRKEGNASGTTLLEALDAIQPPTRPTDKPLRLPLQDVYKIGGIGTVPVGRVETGLLKPGMVVTFAPVNVTTEVKSVEMHHEALSEALPGDNVGFNVKNVSVKDIRRGNVAGDSKNDPPQEAANFTAQVIILNHPGQISAGYAPVLDCHTAHIACKFAELKEKIDRRSGKKLEDNPKSLKSGDAAIVDMIPGKPMCVESFSEYPPLGRFAVRDMRQTVAVGVIKGVEKKVSTTGKVTKSAQKAQRNK

SEQ ID NO: 2267 - protein, 805 aa, Oreochromis niloticus
SLHWNPPLNDGGATVSHYIIEKRETSRVTWTGVEAHVEALSYKVTKLVPGKEYVFRIAAVNKYGVGEFLESDPLIAQNPFTPPSAPSTPIATAVTGDSVTLTWERPETDGGSEIDGFIVEKLDKEGVRWTKCNKRRLNDLRFRCTGLTEGHYYQFRILAENAAGVGAPSDPSEYIKVCEATYPPGPPTNPKMTDYSSSTVSLTWSKPIYDGGATISGYVVEMKEATDDEWITCTQSAGVEDTNYTVKRLRENAEYNFRIRAINAAGVGDHVDLPGSVVAAEKVEAPEIELDAALRKIVSVRVCSTLHLFVTIRGRPEPEVKWSKEGDTLSERAQIEVTSSYTVLLIENVNRNDTGKYVLTASNCCGSKSAFINVKVLDSPSAPTNLEVKDVKRDSVSISWEPPLIDGGAKISHYVVEKREETRKAFTSVFSNCMRNSYKIDNLQEGCFYYFRVLAVNEFGTGLPAETTEAIKVSEVPLPPGKITLNDVTCSSARLSWEKPAHDGGSKITCYIVEMQAKGDDTWTKCSESKALDAIIDGLTKGKEYFFRVCAVNEKGKSEPKCLLAPVIVKDTSTEPMISLLSNTFSVKAGNDLKIDVPFKGVPPPTATWKKDGNALKETSRVNVSTSDTSSQIIIKDATRIDVGVYEVTLTNSVGTTSAQIFVNVFERPGPPADLSVDDVSADFVSLSWQPPHYTGGCQITNYVVEKRDTGSTLWQNVSATVARTSIKISRLTQGTEYQFRVATENRYGKSQFTESEPVVAQYPFKPPGSPPNLHVVQASKSVMVIAWSKPESDGGSPIIGYHIE

SEQ ID NO: 2268 - protein, 814 aa, Oreochromis niloticus
MAEHHPVSENKHKSSLNSGVAYSGNGRSSTAVAERGNSAGAGGGGGLSGGLSQPAGWQSLLSFTILFLAWLAGFSSRLFAVIRFESIIHEFDPWFNYRSTHHLTTNGFYEFLNWFDERAWYPLGRIVGGTVYPGLMVTAGLIHYVLNLLHITVHIRDVCVFLAPVFSGLTSISTFLLTRELWNQGAGLLAACFIAIVPGYISRSVAGSFDNEGIAIFALQFTYYLWVKSVKTGSVFWTIGCCLSYFYMVSAWGGYVFIINLIPLHVFVLLVMQRFSRRVYIAYSTFYIIGLVLSMQIPFVGFQPIRTSEHMAAAGVFVLLQVYAFLQYLKDRLTRQEFQTLFFLGVSLAAGVVFLSVIYLTYTGYIAPWSGRFYSLWDTGYAKIHIPIIASVSEHQPTTWVSFFFDLHILVCTFPAGLWFCIKNINDERVFVALYAISAVYFAGVMVRLMLTLTPVVCMLSAIAFSSVFEHYLGDEMKRQSPPAEDSSDEDDRKNAGNLYDKAGKVRKHVSEQEKAEEGLGPNIKSIVTMLMLMLLMMFAVHCTWVTSNAYSSPSVVLASYNHDGSRNILDDFREAYYWLRQNTDEHARVMSWWDYGYQIAGMANRTTLVDNNTWNNSHIALVGKAMSSNETAAYEIMRSLDVDYVLIIFGGVIGYSGDDINKFLWMVRIAEGEHPRDIRESDYFTPQGEFRVDKAGSPTLLNCLMYKMSYYRFGEMQLDFRTPPGFDRTRNAEIGNKDIKLKHLEEAFTSEHWLVRIYKVKKLENRDRVEHKLRSTDANRQKYSSKKTAKRKRGYVKNKLSLKKGKKLTKKSL

SEQ ID NO: 2269 - protein, 1518 aa, Oreochromis niloticus
HLKQIRVLMLNDKQNLERTLFRLEQGFELQFRLGPSLQGKKVMVHTNYPLEGQLFDRNNFRVLPWTYPTGKEEDSDKFCSLDLKLAGSYQYYFGRDSERIGGGYIVVDPVLRVGADDHILPLDCITIQTYLSKCLGHLDDWPDRLRVAKESGYNMIHFTPLQTLGESRSCYSLADQLSVNPEFSPAGRSYDWTDVGALVEKLKTEWDMLCITDVVYNHTAANSGWIREHPECGYNLVNSPHLRPAWVLDRALWHLTTRVAEGRYKAKGLPADITTESHLNAVRSVVWQDVFPQIKLWEFYQVKVDSAVEEFRTLLQNGTKPDHSKTGGKTGLRIIQDPQYRRYGNTVDMDSALETFVPHSFSPQHIEECCSWLNQKLTDLNAEQYHIVHQHQEQAVNCLIGNIVYERLAEHGPKLGPVTRKNPMVTRYFTFPYQDMTLDQEMQLLDQPDKLCHFLAHNGWVMGDDPLRNFAEPGSNVYIRRELICWGDSVKLRYGNTPDDCPYLWYHMKKYTQITAKYFHGVRLDNCHSTPLHVAEFMLDVARTVRPDLYVVAELFTGSEELDNIFVTKLGITSLIREAMSAGDSHEEGRLVYRYGGEPVGAFVQPSLRPLTPSIAHAMFLDVTHDNECPIQLRSAFDALPSSAIVAMACCATGSTRGYDELVPHQISVVKEERFYPKWNPSAVPSSSGEVSSCTGIIAGKRAVNKLHQVCPTPPVQVYVDQVDADIVAVTRHCPSTHQSVVTVSRTAFWDPKTHQYSTSVPPMFIPGKIEEVVLEARMVERSAGKYKKDENYINGMPEYTVEIKEHISLDESTVMKKAGVTSKGRSEFVHEITFQKLTPGSIIAFRVSLDPKAQKMVGLLRYYLSQFSPKYRRGSVADENPPDALKKPLAQLMSKLTLADMNVLLFRCDTEEKEEGGGCYSIPGWETLKYAGLQGLMSVFADVRPNNDLGHPLCANLREGDWLIDFVANRLMHREGPLAEVGHWLVAMFNFLKHIPRYLIPCYFDAILVSTYTTALDATYKLMSSFVQNGSTFVRHLALGSVQMCSVGRFPALPPVSAQLDDVPYRISPITGQKEQYCVSLAAGLPHFSAGIFRCWGRDTFIALRGLLLLTGRHVEARNIILAFAGTLRHGLIPNLLGEGRCARYNCRDAVWWWLQCIQDYTTQVPRGHEILSCPVTRMYPTDDCEPCKPGGVQEQPLYDVIHEALRRHLEGISFRERNAGPKIDMNMRDEGFSVVARVDPATGFVSGGNRFNCGTWMDKMGESERARNKGMPATPRDGAAVEIVGLSKSAVRWVVELHAKGLFPYDGVKLHRDGKEVFISYSQWNKQLNQSFEAGFWVSGDPDDPNEKHPELVHKKGIYKDSYGSSSPWCDYQLRPNFTVAMVVVSQPQPTPRFPLGMKTLDPDDLVYCGVYDNALDNDNYNVARGFNYHQGPEWLWPVGYFLRAKLYFAKMLGEDTYAKTVTLVKNVLSQHYTHLERSPWKGLPELTNENGQHCPFSCETQAWSLATVLEVLYDL

SEQ ID NO: 2270 - protein, 2705 aa, Oreochromis niloticus
MMSTNYGDDQLPPQYYQATDFGEEEDDEMPATEKDLAEDAPWKKIQQNTFTRWCNEHLKCVNKTVTDLQKDFSDGLKLISLLEVLSQKKMYRKHHNRPNFRQMKLENVSVALEFLDREHIKLVSIDSKAIVDGNLKLILGLIWTLILHYSISMPMWDDEDDEEAKKLTPKQRLLGWIQNKVPQLPINNFNRDWRDGKALGALVDNCAPGLCPDWADWDPNKPVQNAREAMQQADDWLGVPQVIAPEEIVDPDVDEHSVMTYLSQFPKAKLKPGAPLKPRQLFPNKAKAYGPGIEPHGNKVLQPAVFTVETLEAGSGEVLVYVEDPEGHKEEAKVKPNNDKNRTYTVTYVPKVEGVHKVKVLFAGQDIDKSPYTVNVAKALGDPSKVQARGPGLEPTGNVANKPTYFDIYTAGAGNGDVSVVIVDPQGKKDTVELILENKGDSVFRCTYRPVLEGPHKIHVLFAGQEIPKSPFTVNIAEAINPNACRATGRGLQPTGVRVKEVADFKVFTKGAGSGALSVSVKGPTGAEEQVKVRDVGNGVYECEYYPLKPGKYTVTITWGGQPIPRSPFEVQVGAEAGFQKVRAWGPGLKTGMVGKSADFVVEAIGTEVGTLGFSIEGPSQAKIECDDKGDGSCDVRYWPTEPGDYAVHVICDDEDIKDSPFMAHILPAANDVFPEKVKAYGPGLKPTGVIVNKPAEFTVDARMAGKGQLKIYAQDAEGSTIDIKITDRGDGTFHCVYTPVKPIKHTIIITWGEVNVPSSPFRVLVGEGSHPDRVKVYGPGVEKTGLKANEPTYFTVDCSEAGQGDISIGIKCAPGVVGPAEADIDFDIIKNDNDTFTVKYTPPGPGRYTIMVLFADQEIPVSPFKVKVDPSHDAGKVRAEGPGLNKTGVEVGTPTHFNIYTKGAGKAKPEVHFAASGPGEAIRDFEIIDNHDYSYTVKYTALQQGNMTISVTHGGDPIPKSPFHITVSPAMDIGKVKVEGLDTKVEVGKDQEFTVNTKDAGGQGNVGVKMTSPSGRPIPCKLESDKAKGAHSVKYIPPEEGQYKVDVSYDGNPVMGSPFGVEAVLPADPSKVRAFGPGLKGGVVGKPAPFTIDTKGAGAGGLGLTVEGPCEAKIECQDNGDGTCSVAYLPTEPGEYAINILFAEQHIPGSPFKAAVRPAFDPSKVTASGPGLERAKAGEPATFTVDCTRAGDGELTIEIVSETGVKAEVHIQKTAEGTFSVTYIPPFHGTHTITIKYGGHVIPHFPKVLQVEPSVDTTGVHVYGPGVEPRGVLREVTTHFIVDARALNKVGGNHVKVHIINPSGTNTDTYITDKGDGTYRVEYTAFEDGMHLIEVLYDDVPVPKSPFRVSVVEGCDPTRVRAFGPGLEGGITNKPNCFTVETRGAGTGGLGLTIEGASEAKISCKDNKDGSCSVEYVPFTPGDYDVNINYGGHPIPGSPFRVPVKDPVDPSKVKCSGPGLGAGVRAHVPQTFTVDCTKAGQAPLDVKLYGPTGTVEPVGVKNNGDGTHTVHYTPAQDGPYTVAVKYADQEVPHSPFKVMSQPGHDASKVRASGPGLDTKGVPASLPVEFTIDARDAGEGLLTVQILDPEGKPKNATIQDNRDGTYTVSYVPDSTGPYTITIKYGGDEIPYSPYRIQSLPTGDASKCRVTVSIGGHGVSSLQKLQTSEDTVITVDAKAAGKGKVTCKVLTPQGMEVDMDVVENHDGTFDIYYTAPEPGKYVITIRFGGQNIPKSPFHVMATNEPVVPRDTVDPLFRPVNFLVPFTPQQGEITGEVRMPSGKTARPHITDNKDGTITIKYQPTEKGLHEMDIKYDGNHIPGSPLQFFVDAVNSGVVTAYGPGLSYGMVNKAATFTVVTKNAGEGGLSLAVEGPSKAEITCKDNKDGTCTVSYLPTAPGDYNIIVKFDNKHIPGSPFTAKITGDDSITRTSQLNVGTAADVSLKIAETDLSSLTASIRAPSGNEEPCLLKRLPNRHLGISFTPKEVGEHEVSVRKNGMHVANSPFKIMVGQSEIGEASRVKAFGKGLVEAHTFEMAEFFVDTRNAGYGGLALSIEGPSKVDINCEDVEDGTCRVTYCPTEPGSYTVNIKFAEKHIPGSPFTVKVTGEGRIKESITRKRQASSIASVGSTCGLNLKIPGNWFQMVSAQERLTRTFTRSSHTYTRTERTEISKIRGGETKREVRVEESTQVGGRGSPFRDVFGDFLGRESLSSFAGITARPEVESGSQAMTAQVTSPSGKTVDADIVDGGSSTYSVRFIPQEIGPHTVNVKYRGQHVPGSPFQFTVGPMGEGGAHKVRAGGPGLERGVAGAPSEFSIWTREAGAGGLSIAVEGPSKAEISFEDRKDGSCGVSYIVKEPGDYEVSIKFNNEHIPDSPFIVPIATLSDEARRLTVTSLQEKDLKVNQEASFMVQRNGARGVVDAKVHTPSGSSEECYVTELDSDKSAIRFIPRENGVHSIDVKFNGCHIPGSPFKVRVGDPGLIGDPGMVTAHGPGLQGGTTGVPSEFVVKTCNAGSGTLSVNIDGPSKVKMDCRECPEGYKITYTPMAPGNYLITIKYGGPQHIVGSPFKAKITGTRLSGGHSLHETSSVLVETVTKTSKVGGAYSSSSSTTSSKMTSDASKVVCRGTGLSKALVGQKNNFTVDCSKAGTNMLMVGVHGPHAPCEEVYVKHMGNKLYNVTYTVKDKGSYTVIVKWGDDNVPGSPYKVAVP

SEQ ID NO: 2271 - protein, 7000 aa, Oreochromis niloticus
MAQYAPQAYALSDEQEYLQAYEDVLEKYKADERDRVQKKTFTKWINQHLVKVRKHINDLYEDLRDGHNLISLLEVLSGDTLPRERGRMRFHRLQNVQIALDYLKRRQVKLVNIRNDDITDGNPKLTLGLIWTIILHFQISEIHVTGESEDMTAKERLLLWSKQMTEGYVGVRCENFTTSWRDGRLFNALIHKYRPDLVDMSRVSTQTNRSNLEDAFCVAEQLGVARLLDPEDVDVQSPDEKSVITYVSTLYDAFPKVPDGVEGVSPNDVDIKWVEYQNMIKYLSQWIKHNVAIMSSRSFPNNPVELKALYTQYLQFKEHEIPQKENEKTKIKNLYKMLEMWIEFGRLQLPPGHHPNDVEKEWGKLIVAMLEREKSLRPEVERLEMLQQIANRVQRDCVNGEDKLALARTALQSDAKRLESGIQFLNEAEIAGYLLECENILRQQVVDIQILLDGKFPFADQLVQRVSKLRDDLLALRAECSSVYSKGRTLTTEQTKMMISGITQSLNSGFSQSINTNLTPALTPALTPGGVGTPGSTFTSSLTPCLTPSLTPALTPSLQPASIQSYMGSGGGMGPSSLRHLKNMQIRKPLLKSSLADPSLTEEEVNMKFVQDLLNWVEEMQMELERSDWGSDMPSVKMNLDNHKNVHRVIEEFQMSLKEAKLSEIQMTMPLKLSYSDKLNKLEKQYEQLLSSSRERQSHLESLHDFVSQATQELIWLNEKEEEEVAFDWSDRNINISKKRDYHTDLMRELDEKEEAIKSVQDKAERLMLKNHPARLTIEAYKAAMQTQWSWILQLCSCVEQHLKENAIYFEFFSDAKESMDYLKNLQDSIQRKYSCDRTSTLHRLEDLIQESMDEKEQLLQYRSTVAGLVGRAKNIVQLKPRNPENSLRSSIPVKAICDYRQIEITIYKEDECVLANNSHRAKWKVINPAGNEAMVPSVCFTVPPPNKEAVDMASRTEQLYQNVLALWHHSHVNMKSVVSWHYLMADIQAIRNWNVASIKTMLPGEHQQVLSNLQSHFDEFLEDSEESEVFTVADCAQLERDVAACKEYYQELLRSAEREEHEESVYNHYISEIRNFRMHLEAHEEHLIRQIRSPLERDDLEQSLQRITEHERKTAELNKLKEDLDAMKDKCELFLRQAAGSPSVATLSSELTVLIQSMSQVYSMSSIYMDKLKTVSLVVKHSQSAEALVKAYESKLYEEDAMNPDVKSIENVISTLKHWRTEIDERQEVFHDMEDELQKARLISDRMFKAHNERDFDLDWHKEKADQLSERWQNIHSQIDSRLRDLDGISKSLKHYRDSYSSLDEWVRDMEAAQLKAQEHKPEDSKALAELLNKQKILVAEIEQKQSSIDECQKYSEQYSSAVKDYELQLMTFRAMVDSQHKSPLKKRRMQSCSDAIQQEFMDLRTRYTALVTLMTQYVKFASETLKRTEDEERSVDEEKREHGDKVNKLLQWMSNVKQTVSNGGDALKDSNANTDASNKPQVSVEEMVTKKEQIAEALRSTQTMLNKHSDKMTEEERKKAQEQLQSLTQAYNELSQQCSDQTPSADELKPVKPEYAVNMLIAPSCGLIFHLFQIGTGMSGLIDQRGLVNLQGALLTSNLSEPQLHLGCDDAIEENRIYTSTLNHLPVLNDSSKCIQSSHVSSVSLSDIAAAREGSMCEDMIIKIIEASQVSDEVKMCYTGDTMTLEKAFQCGLIPASVYVNLLQRKKSHQDMITPSTAESLSFLEPEEEGEACEVNKLIFKGLSRKRSETSERNISSVTSGGFSNQEIMVRLLGAQGDLEGQNETEVSDGNFQNAGGGLKVDAAIQCDLMSSSSTLIVLGNQQQFMGLALPHSGEIQTVSTSHESDCQSTSSEFTCRLFTNRGKIAAFYIPENSEVIDITTAIQNGWIDSHTAEVLKSIEIPDVLPDVDHLSEKFSSWLTYKKLAVDGWPHDGSEVNLPSPTEAKQLFISYLMMNSYIDPKSEQRVLILDDQLNKMAQAFLEDRLFYLNDDEGLTDLTLDAENPFEDADSEMSLHINDESEDLIKNTEDVFDRRDFVSQTGGRITFDENTQHTFEPHNFVSSGNGRITFDEKSNKNDKASKHDHARDLLVSSDIDIDTRGVEVENVFENGTESEKEAGDYAREDLDIPGSLHVSVPHTFCSGESRNISSPSVMIDSESSFRSCHQVPPHYKAKCFETTTSVHIEQPQFLSSEDSVEGGNERKSAIELLKTQMEEEGILDVTSGKCYNLQEALNKGLVDDKMVLELHDSHRSIGDSLLLELVKDSDSQGNFYPEENRVYSLSEDQDLGLIHAAEIHKAENTQQVISRNAAVTVLDLAKEEANNKEGESENRNPELACKAVGSVETMTNKVHLSLPSESGNMPQMISPSLWNQVTAERTNHIEKLPLGAEDSESHTLMDSELTGKISSINTDSKSQTQSATFAYHSSKSDSTPSDEDIFSDGYDTSVRNQTFIQSETGTSVSFCSALSLEARVEDESGVRSTLGSEPAPSVDYTSLGDLVEGAVISVSRGFTDGGAGDSERPSLEKQNDDILTIDGEQISIAFCQRDQSLIAAACERPPQQQSSSSELPAIYSSITATNTILHSNNDIEDSALTPKDLFGLAPGGAGDPERLFQERGNNDILTIDAVSLCQGAQSLSSPVCEGPHQQSSSSELPAVYSSTTATNTIDHSYSDLVLTPKDLLGFTCGLTSDAERLSQNSSITATNTINHSNNDIEDSALTHKDLLGSPPGGAGDPERLSQERENNDILTVDAEQIPVSLSQRDRSLSAAVCEKPPQQQSSSSELPAVYSSITATNTISHSNNETEESVLTPKDLLGSSHLDQRDRNLSAAVCEKPPQQQSSSSEIYSVNRDITTSTINQRSTHGGGGDAERLSPEKQNDDIFNIDAEQISASLCQSGAPVCKRPAQELSSSSEIPAVLTATDTVNHSSNDVEDLVMTPKDLLESALGVTDINFGQPGSRIEVCVSVDTHTVTDFLSESSIIPVVSSSGPSVFSNPGKTYADDQGEDITHNDKSSGLERAQAQDSQHALAIDKSSFHESSTSQGLTQSSHPDHLMNLLKQNSLSLDSEDTRKAKLICPEERGGQETEQSDAPNIQLQLLQVFKTVSTSQDLSVLKEVMDTLSSALGCESQQEQWHTLESIKEESSEGEDEESELFSIHDYLECVGRLQDHSDALEDARKDLTIPIPTDNSMEELQNQIEECQSLQSQLSSLADVLTVDMEKAKQLINSADEDVPQQIHHDLASIYLELEPNFTAVSQMCAERSNSLIQAMETGKVHLESTYQQHLSDLNTLAGLIQTNSKMLGVDLNTCDLDTLKHLSQQNKDMEDHLQKEARLKLEDVTFDIQCFISEHTQFLSPAKSSYLLKFLSTTQRAFRDQIERLVTQKSALDVLLDARERESMAESLLEKQKEFTDKLSDMCDNLTLTENRLIGHKQQAENAESITDLQQYQQEDQALQKDVLTNASALNDVISSTNKFLQENRSKMTPDQIAAIESKLEEAKSKAKLINQRAEDSRKDLEKAVTTAIQQESEKAAAVEQLEESKSKIEGLLDWISNVGNKNKSSLDQTDHVSQENGNLPEEPSAKGLITEDDDANGNALQTTDKDFGRETNGENNESPNLDKQYQRLKAHHQEILSQQQDLIMATQSAQAMLDKQANVLSPQEKEALQKNIQELKERYETSLTQAEQQMKQVQCVQEELKKFQDDCEEFENWLNQAEEEILELGAPASSLNILSDNLQRQKSFSEDVISHKGDLRFITISGQKVLDVAKAFGSADPAAKNPLLHVDTSGTCSAVKDKLDSAASRYKTLHSQCNLLGNNLKDVVDKYKKYDDSSTGLLKWLNSSEEEARKQQSEAIAADPQTLQKQLEDTKVLQGQMMGHQTAIDSLRKTAESLITSEGDLLSNPDEIQETVDDIVERYDNLSKSVSDRNEKLQITLTRSMSVQDGLDEMMGWMEGVEASVEEKREITLDSASLGGILSKEAALEQDIASRQSSISAMKAKVKKFVETADPSAAALLQSKMDSLSQRFSDACDQHRQKIATVEKLKEKVEQFENVAEKVQQFVVKRSQDLHETDGPGKTFNELSQLMQNTKAEMAEYAGDLEKLQTLSKELSEISPDGNKAQIQSKLDNLSNVFSTFKDTIKEKEEELSSCQDQLGEFRSAASALTKWLEEANDKVPADQPSSSEKTLESNLQIVTGLLDEWTSKGPAVQDLNTKGSTLCNLITFLTSPAKTKTPNKSGKPLTNGDGPASHTYLTNKELMVIQQNMSSINEGYTDLGETLKNRSAQLSSLLQEVKEAQKETDDMMLWLKDMKKTAQSWNSAATEKDSVKTQLEQQKAFEDNMKQKQEALQKLREKLLDLIKTHPNSPEAAKWKQMLAEIDAAWADISGSVEERKQHLEQSNKNLDIFQTTEQQLGQWLSEKELMMSVLGPLSIDPNMLKMQKQQVQILQNEFKSRKPQYEQLEEAASAILSSSGDQDPSSGKLVKEQLAAVTQKWAGLTGQLDQRDSHIDQAVVKTGKFQELLRSLSNTATQLESQLTNHQGLSTQPDAVKKQLEDAQNISAQLREEKKKLKEAEAINEELTAMVTEDYLKADLARQLESVCKPFKQLEEKAAKRIEQLNSTFASSQQFHQTSKDLQSWLGEKLQDQSKPKPISAKVEVLQQTVEEHSKLQKALSEHEKAFNTIIGEGEMLLHNIDGAEKLALQGQLTTLSSNWEEVKKSSAEQADKLQTALMRSLKYQEHAEKLNSWIQECEANEGRVKLTVDPAAVETSISQLKALQKDVDKHRGLVEQLNAAADSLLEVANTDTDAIKEEKASTGKRVDNIVESLQSKRESLEKISHTVKEFNDACKEAKTQLEGAKKQVDAYETQGVQAHSNKSLTNMKAQHKSLEAVQNQVEHMKALAKDLVVDVPDAEGVTDLLLQADSIEKDYGNLNKKLEETCQALEGKLQGIGQFQNNIREMFAQFTELDDELDSMSPVDLNLDTLKEQQDSIQSFVAKLRELMANTANAGDSCKKMLESEPSPDLLGLKRDLDALSKQCGKLLDRAKGREVQVQSTLTKLEELYGKVNQMEDKLCRAVDKEASQEPVGMETEVLNQQLEAFKAFQKEDIDPLQNQLQDINSLGQGLIQNAAKGTSTKKLEDDLEGVNSKWNTLNKKIAERSAQLHEALLHCGQFQDALESLLSWLTDTEELVANQKPPSAEFKVVKAQIQEQKLLQRLLDDRKPTVELIKKEGGKVAELAESVDKEKVAKEIECLGQRWDTLLKKAENRHKQLESILVVTQQFHETLEPLSEWLSATEKHLTNSEPIGTETSKLEDQISQHKALQSDIGLRKKNVDQAISNGVELLKQTTGDEVIVIQGKLDGIKTKYAEINSMSDSVLKTLEQVLSLSSKLQHTHTDLSSWLEKAEAEIKSFAHQEPVGEQLIHSQSRQKAMLKEIKDQKPVLDQLNELSSSLLDLVPWHTRESLDKLVSEDNERYRAAYDTLTQKVDQINADILKSQQFEQAADNELSWLTDAERKLLSMGEIRLEQDQTTAQLQAQKIFSMDIMRHKDAVDEIVKTGKAIMTSKNPEEKEILKAKTQTLLEKYGVVSQLNSERCLQLERAQSLATQFWETYEELGPWLQETLSTFSQLPPPAIEYDTLRQQQEDLRQMRELIAEHKPHIDKMNKTGPQLLELSPVEGEPIREKYTATDQLYTKLKADVKQRAATLDEAISKSTQFHDKIDPMLESLERIAERLHQPPSISVEVDKIKEQITENKTVSVDLEKLQPSYETLKQRGEEMIARSEGTDKDLSAKVQAVQDKLDRMVFLWNDIQALVEERETKLLDVMDLADKFWCDHTALIVTIKDSHDLLRELEEPGVDPSVVKQQQEFVEGFKEEIDGLQEELDGVRNQGAELMTACGEPDKPVIKKSLDEVNTAWENLNKTWKERGERLEEAMQAAVQFQDGLQGMFDWVDILESKLDSMSPVGTDLETVKQQIVELKEFKGEAYQLQIEMERLNHQAGLLLKKVTEEADRSAIQEPMSELKMLWDNLDEKIISRQHKLEGGLLALGQFQHALDELLAWMSHTEELLNEQKNAGGDPKAIEIELAKHNVLQIDVLAHKSTVETVNKAGNDLVQSSAGEEASSLQSKLENLNQRWKAILEKMGQRKQQLESSLLQAQGFHGEIEDMQQWLKDTERQLLASKAVGGLPDTAREQLIAHLELCSAFEAKEELYRELQNKGHQLLTMMPESPDSNTEQDLANLKEKWEAVQAKVAERKVKLEEALTVATDFHNSLQDFINWLTQAEQTLNTVSPASLILETIMFQIDEHKMFVTEVNSHREHIIELDKTGTHLKYFSQKQDVVLIKNLLLSVQGRWEKLVQRSVERGRLLDDARKRAKQFHENFNKLMEWLDESEKTLDSEVEIANDPDKIKTQLAQHKEFQKALGSKHSVYDTTTRTGRALKDKTSLQDDRQKLDDMLSELRDKWDTVCGKSVERQNKLEEALLFSGQFTDALQALIDWLYRVEPQLAEDQPVHGDIDLVLNLIDNHKVFQKELGKRTVSVQALKRSARELIENTHDDSSWVKVQMQELSTRWETVCNLSVSKQARLEQALGQAEEFHSAVHILLEWLAEAEQSLRFHGSLPDDEEALRALIEQHKVFMKKLEEKRVALNKAASMGEAILSICHPDSITTIKHWNTIIKARFEEVQAWARQHQQRLATALTELLATQELLENLLTWLQWAETNLNDKDKEPLPQEIEEVKNLIAEHQAFMEEMTRKQPDVDKITKTHKRKAAAEPQIQSQIPVLDKGRAGRKRSPTQAMYASSTQAPIETKNPRVNLLVTKWQHVWLLALDRRRKLNDALDRLEELKEFANFDFDVWRKRYMRWMNHKKSRVMDFFRRIDKDQDGKVTRQEFIEGILSSKFPTSRLEMSAVADIFDRDGDGYIDYYEFVAALHPNKDAYKPLTDADKIEDEVTRQVAKCKCPKRFQVEQIGANKYRFYLGNQFGDSQQLRLVRILRSTVMVRVGGG

SEQ ID NO: 2272 - protein, 375 aa, Ovis aries; identical to SEQ ID NO: 763

SEQ ID NO: 2273 - protein, 842 aa, Ovis aries
MSRPLTDQEKRKQISVRGLAGVENVTELKKNFNRHLHFTLVKDRNVATPRDYYFALAYTVRDHLVGRWIRTQQHYYEKDPKRIYYLSLEFYIGRTLQNTMVNLALENACDEATYQLGLDMEELEEIEEDAGLGNGGLGRLAACFLDSMATLGLAAYGYGIRYEFGIFNQKISGGWQMEEADDWLRYGNPWEKARPEFTLPVHFYGRVEHTSQGAKWVDTQVVLAMPYDTPVPGYRNNVVNTMRLWSAKAPNDFNLKDFNVGGYIQAVLDRNLAENISRVLYPNDNFFEGKELRLKQEYFVVAATLQDIIRRFKSSKFGCLDPVRTNFDAFPDKVAIQLNDTHPSLAIPELMRILVDQERLEWEKAWEVTVKTCAYTNHTVLPEALERWPVHLIETLLPRHLQIIYEINQRFLNRVAAAFPGDVDRLRRMSLVEEGAVKRINMAHLCIAGSHAVNGVARIHSEILKKTIFKDFYELEPHKFQNKTNGITPRRWLVMCNPGLAEVIAERIGEEYIADLDQLRKLLSYVDDESFIRDVAKVKQENKLKFSAYLEKEYKVHINPNSLFDIQVKRIHEYKRQLLNCLHVITLYNRIKKEPNKFFVPRTVMIGGKAAPGYHMAKMIIRLITAIGDVVNHDPVVGDRLRVIFLENYRVSLAEKVIPAADLSEQISTAGTEASGTGNMKFMLNGALTIGTMDGANVEMAEEAGEENFFIFGMRVEDVERLDQKGYNAQEYYDRIPELRHIIDQLSSGFFSPKQPDLFKDIVNMLMHHDRFKVFADYEEYVKCQERVSALYKNPREWTRMVIRNIATSGKFSSDRTIAQYAREIWGVEPTRQRMPAPDEKI

SEQ ID NO: 2274 - protein, 607 aa, Ovis aries
MKWVTFISLLLLFSSAYSRGVFRRDTHKSEIAHRFNDLGEENFQGLVLIAFSQYLQQCPFDEHVKLVKELTEFAKTCVADESHAGCDKSLHTLFGDELCKVATLRETYGDMADCCEKQEPERNECFLNHKDDSPDLPKLKPEPDTLCAEFKADEKKFWGKYLYEVARRHPYFYAPELLYYANKYNGVFQECCQAEDKGACLLPKIDAMREKVLASSARQRLRCASIQKFGERALKAWSVARLSQKFPKADFTDVTKIVTDLTKVHKECCHGDLLECADDRADLAKYICDHQDALSSKLKECCDKPVLEKSHCIAEVDKDAVPENLPPLTADFAEDKEVCKNYQEAKDVFLGSFLYEYSRRHPEYAVSVLLRLAKEYEATLEDCCAKEDPHACYATVFDKLKHLVDEPQNLIKKNCELFEKHGEYGFQNALIVRYTRKAPQVSTPTLVEISRSLGKVGTKCCAKPESERMPCTEDYLSLILNRLCVLHEKTPVSEKVTKCCTESLVNRRPCFSDLTLDETYVPKPFDEKFFTFHADICTLPDTEKQIKKQTALVELLKHKPKATDEQLKTVMENFVAFVDKCCAADDKEGCFVLEGPKLVASTQAALA

SEQ ID NO: 2275 - protein, 298 aa, Ovis aries
  MOD_RES (253)..(253): Any amino acid
MSDQALSFLKDFLAGGVAAAISKTAVAPIERVKLLLQVQHASKQISAEKQYKGIIDCVVRIPKEQGFLSFWRGNLANVIRYFPTQALNFAFKDKYKQIFLGGVDRHKQFWRYFAGNLASGGAAGATSLCFVYPLDFARTRLAADVGKGAAQREFTGLGNCITKIFKSDGLRGLYQGFNVSVQGIIIYRAAYFGVYDTAKGMLPDPKNVHIIVSWMIAQTVTAVAGLVSYPFDTVRRRMMMQSGRKGADIMYTXTVDCWRKIAKDEGPKAFFKGAWSNVLRGTGGAFVLVLYDEIKKFV

SEQ ID NO: 2276 - protein, 333 aa, Ovis aries
MVKVGVNGFGRIGRLVTRAAFNTGKVDIVAINDPFIDLHYMVYMFQYDSTHGKFHGTVKAENGKLVINGKAITIFQERDPANIKWGDAGAEYVVESTGVFTTMEKAGAHLKGGAKRVIISAPSADAPMFVMGVNHEKYNNTLKIVSNASCTTNCLAPLAKVIHDHFGIVEGLMTTVHAITATQKTVDGPSGKLWRDGRGAAQNIIPASTGAAKAVGKVIPELNGKLTGMAFRVPTPNVSVVDLTCRLEKPAKYDEIKKVVKQASEGPLKGILGYTEDQVVSCDFNSDTHSSTFDAGAGIALNDHFVKLISWYDNEFGYSNRVVDLMVHMASKE

SEQ ID NO: 2277 - protein, 296 aa, Ovis aries
MASHRHSGPSSYKVGTMAEKFNCHYCRDNLQGKKYVQKDGHHCCLKCFDKFCANTCVECRKPIGADSKEVHYKNRYWHDTCFRCSKCLQPLASETFVAKDNKILCNKCTTREDNPKCKGCLKPIVAGDQNVEYKGTVWHKDCFTCSNCKQVIGTGSFFPKGEDFYCVTCHETKFAKHCVKCNKAITSGGITYQDQPWHADCFVCVTCSKKLAGQRFTAVEDQYYCVDCYKNFVAKKCAGCKNPITGFGKGSSVVAYEGQSWHDYCFHCKKCSVNLANKRFVFHQEQVYCPDCAKKL

SEQ ID NO: 2278 - protein, 361 aa, Ovis aries
MYSSVVHLARANPFNAPHLQLVHDGLAGPRSDPAGPPGPPRRSRNLAAAAVEEYSCEYGSAKFYALCGFGGVLSCGLTHTAVVPLDLVKCRMQVDPQKYKGIFNGFSVTLKEDGFRGLAKGWAPTFIGYSMQGLCKFGFYEVFKVLYSNMLGEENAYLWRTSLYLAASASAEFFADIALAPMEAAKVRIQTQPGYANTLRDAAPKMYKEEGLKAFYKGVAPLWMRQIPYTMMKFACFERTVEALYKFVVPKPRSECSKPEQLVVTFVAGYIAGVFCAIVSHPADSVVSVLNKEKGSSASQVLKRLGFRGVWKGLFARIIMIGTLTALQWFIYDSVKVYFRLPRPPPPEMPESLKKKLGYTQ

SEQ ID NO: 2279 - protein, 170 aa, Ovis aries
MAPKKAKRRAAAEGGSSNVFSMFDQTQIQEFKEAFTVIDQNRDGIIDKEDLRDTFAAMGRLNVKNEELDAMMKEASGPINFTVFLTMFGEKLKGADPEDVITGAFKVLDPEGKGTIKKQFLEELLTTQCDRFSQEEIRNMWAAFPPDVGGNVYYKNICYVITHGDAKDQE

SEQ ID NO: 2280 - protein, 139 aa, Ovis aries
EENRRFYRQLLLTADDRVNPCIGGVILFHETLYQKADDGRPFPQVIKAKGGVVGIKVDKGVVPLAGTNGETTTQGLDGLSERCAQYKKDGADFAKWRCVLKIGEHTPSSLAIMENANVLARYASICQQNGIVPIVEPEI

SEQ ID NO: 2281 - protein, 102 aa, Ovis aries
MVDAEMAAFGEAAPYLRKSEKERLEAQTRPFDLKKDVFVPDDKEEFVKATILSREGGKVTAETEHGKTVTVKEDQVLQQNPPKFDKIEDMAMLTFLHEPAVL

SEQ ID NO: 2282 - protein, 284 aa, Ovis aries; identical to SEQ ID NO: 905

SEQ ID NO: 2283 - protein, 121 aa, Ovis aries
ATLKDQLIQNLLKEEHVPQNKITVVGVGAVGMACAISILMKDLADEIALVDVMEDKLKGEMMDLQHGSLFLRTPKIVSGKDYNVTANSRLVIITAGARQQEGESRLNLVQRNVNIFKFIIP

SEQ ID NO: 2284 - protein, 103 aa, Ovis aries
MSSDQEMAIFGEAAPYLRKSEKERIEAQNKPFDAKTSVFVADPKESFVKATVQSREGGKVTAKTEAGATVTVKEDQVFPMNPPKFDKIEDMAMMTHLHEPGVL

SEQ ID NO: 2285 - protein, 103 aa, Ovis aries
MSSDQEMAVFGEAAPYLRKSEKERIEAQNKPFDAKTSVFVAEPKESFVKGTIQSREGGKVTVKTEGGATLTVKEDQVFPMNPPKFDKIEDMAMMTHLHEPAVL

SEQ ID NO: 2286 - protein, 110 aa, Ovis aries
HAGNKLAMQEFMILPVGASSFREAMRIGAEVYHHLKGVIKAKYGKDATNVGDEGGFAPNILENNEALELLKTAIQAAGYPDKVVIGMDVAASEFYRNGKYDLDFKSPDDP

SEQ ID NO: 2287 - protein, 142 aa, Ovis aries
MVLSAADKSNVKAAWGKVGGNAGAYGAEALERMFLSFPTTKTYFPHFDLSHGSAQVKGHGEKVAAALTKAVGHLDDLPGTLSDLSDLHAHKLRVDPVNFKLLSHSLLVTLACHLPNDFTPAVHASLDKFLANVSTVLTSKYR

SEQ ID NO: 2288 - protein, 145 aa, Ovis aries
MLTAEEKAAVTGFWGKVKVDEVGAEALGRLLVVYPWTQRFFEHFGDLSNADAVMNNPKVKAHGKRVLDSFSNGMKHLDDLKGTFAQLSELHCDKLHVDPENFRLLGNVLVVVLARHHGNEFTPVLQADFQKVVAGVANALAHRYH

SEQ ID NO: 2289 - protein, 136 aa, Ovis aries
LFNTNATIVATLTAACAQHCPEAMICIISNPVNSTIPITAEVFKKHGVYDPNKIFGVTTLDIVRANAFVAELKDLDPARVNVPVIGGHAGKTIIPLISQCTPKVELPQDQLATLTGRIQEAGTEVVKAKAGAGSAT

SEQ ID NO: 2290 - protein, 166 aa, Ovis aries
MSPKKAKKRAEGANSNVFSMFEQTQIQEFKEAFTIMDQNRDGFIDKNDLRDTFAALGRVNVKNEEIDEMLKEAPGPINFTVFLQMFGEKLKGADPEETILNAFKVFDPEGKGVLKADYVKEMLTTQTERFSKDEIEQMFAAFPPDVTGNLDYKNLVHIITHGEEKD

SEQ ID NO: 2291 - protein, 199 aa, Ovis aries; identical to SEQ ID NO: 494

SEQ ID NO: 2292 - protein, 39 aa, Ovis aries
ILGQNGISDVVKVTLTHEEEACLKKSADTLWGIQKELQF

SEQ ID NO: 2293 - protein, 68 aa, Ovis aries
  MOD_RES (42)..(42): Any amino acid
  MOD_RES (57)..(57): Any amino acid
PAWYSIDSRVRGTSLVVKGLKENVEYHFRVSAENQFGISKPXKSEEPVIPKTPLSKXSSNHNTVNFLS

SEQ ID NO: 2294 - protein, 143 aa, Ovis aries
TAEFKEAFQLFDRTGDGKILYSQCGDVMRALGQNPTNAEVLKVLGNPKSDEMNVKVLDFEHFLPMLQTVAKNKDQGTYEDYVEGLRVFDKEGNGTVMGAEIRHVLVTLGEKMTEEEVEMLVAGHEDSNGCINYEELVRMVLNG

SEQ ID NO: 2295 - protein, 194 aa, Ovis aries
MEEKLKKTKIIFVVGGPGSGKGTQCEKIVQKYGYTHLSTGDLLRAEVSSGSARGKMLSEIMEKGQLVPLETVLDMLRDAMVAKVDTSKGFLIDGYPREVQQGEEFERRIGQPTLLLYVDAGPETMTKRLLKRGETSGRVDDNEETIKKRLETYYKATEPVIAFYEKRGIVRKVNAEGSVDNVFSQVCTHLDALK

SEQ ID NO: 2296 - protein, 314 aa, Ovis aries
MAATASPGASGMDGKPRTSPKSVKFLFGGLAGMGATVFVQPLDLVKNRMQLSGEGAKTREYKTSFHALTSILRAEGLRGIYTGLSAGLLRQATYTTTRLGIYTVLFERLTGTDGTPPGFLLKAVIGMTAGATGAFVGTPAEVALIRMTADGRLPVDQRRGYKNVFNALFRIVQEEGVLTLWRGCIPTMARAVVVNAAQLASYSQSKQFLLDSGYFSDNILCHFCASMISGLVTTAASMPVDIVKTRIQNMRMIDGKPEYKNGLDVLVKVVRYEGFFSLWKGFTPYYARLGPHTVLTFIFLEQMNKAYKRLFLSG

SEQ ID NO: 2297 - protein, 641 aa, Ovis aries
MAKNMAIGIDLGTTYSCVGVFQHGKVEIIANDQGNRTTPSYVAFTDTERLIGDAAKNQVALNPQNTVFDAKRLIGRKFGDPVVQSDMKHWPFRVINDGDKPKVQVSYKGETKAFYPEEISSMVLTKMKEIAEAYLGHPVTNAVITVPAYFNDSQRQATKDAGVIAGLNVLRIINEPTAAAIAYGLHRTGKGERNVLIFDLGGGTFDVSILTIDDGIFEVKATAGDTHLGGEDFDNRLVNHFVEEFKRKHKKDISQNKRAVRRLRTACERAKRTLSSSTQASLEIDSLFEGIDFYTSITRARFEELCSDLFRSTLEPVEKALRDAKLDKAQIHDLVLVGGSTRIPKVQKLLQDFFNGRDLNKSINPDEAVAYGAAVQAAILMGDKSENVQDLLLLDVAPLSLGLETAGGVMTALIKRNSTIPTKQTQIFTTYSDNQPGVLIQVYEGERAMTRDNNLLGRFELSGIPPAPRGVPQIEVTFDIDANGILNVTATDKSTGKANKITITNDKGRLSKEEIERMVQEAEKYKAEDEVQRERVSAKNALESYAFNMKSAVEDEGLKGKISEADKKKVLDKCQEVISWLDANTLAEKDEFEHKRKELEQVCNPIISRLYQGAGGPGAGGFGAQAPKGGSGSGPTIEEVD

SEQ ID NO: 2298 - protein, 131 aa, Ovis aries
QSGRKSTGGKAPRKQLATKAARKSAPSTGGVKKPHRYRPGTVALREIRRYQKSTELLIRKLPFQRLVREIAQDFKTDLRFQSAAIGALQEASEAYLVGLFEDTNLCAIHAKRVTIMPKDIQLARRIRGERA

SEQ ID NO: 2299 - protein, 316 aa, Ovis aries
GLISLVVKKIGPKGLETEVENGGVLGSRKGVNLPGIEVDLPGLSEQDVQDLRFGVEQGVDIIFASFVRKASDVAAVRAALGPEGQGIKIVSKIENHEGVKKFDEILAVSDGIMVARGDLGIEIPAEKVFLAQKMMIGRCNLAGKPVVCATQMLESMITKPRPTRAETSDVANAVLDGADCIMLSGETAKGSFPVEAVKMQHAIAREAEAAVYHRQLFEELRRAAPLSRDPTEVTAIGAVEAAFKCGAGAIIVLTTTGRSAQLLSRYRPRAAVIAVTRSAQAARQAHLCRGVFPVLYREPPEDIWADDVDRRVQFGI

SEQ ID NO: 2300 - protein, 447 aa, Ovis aries
MAVAAAAARVWRPSRGLGRAGLPLLRLLGARGLARSHTHRWQQQRHFSSLDDKPQFPGASAEFIDKLEFIQPNVISGIPIYRVMDRQGQIINPSEDPHLPQEKVLKFYKSMTLLNTMDRILYESQRQGRISFYMTNYGEEGTHVGSAAALDDTDLVFGQYREAGVLMYRDYPLELFMAQCYGNVSDLGKGRQMPVHYGCRERHFVTISSPLATQIPQAVGAAYAAKRANANRVVICYFGEGAASEGDAHAGFNFAATLECPIIFFCRNNGYAISTPTSEQYRGDGIAARGPGYGILSIRVDGNDVFAVYNATKEARRRAVAENQPFLIEAMTYRIGHHSTSDDSSAYRSVDEVNYWDKQDHPISRLRHHLQSRGWWDDEQEKAWRKQSRKKVMEAFEQAERKLKPNPNLIFSDVYQEMPAQLRKQQESLARHLQTYGEHYPLDHFEK

SEQ ID NO: 2301 - protein, 108 aa, Ovis aries
YALKSMTEAEQQQLIDDHFLFDKPVSPLLLASGMARDWPDARGIWHNDNKTFLVWINEEDHLRVISMQKGGNMKEVFTRFCNGLTQIETLFKSKNYEFMWNPHLGYIL

SEQ ID NO: 2302 - protein, 147 aa, Ovis aries
KFSRDVFLPKPTWGNHTPIFRDAGMQLQSYRYYDPKTCGFDFTGAIEDISKIPAQSVILLHACAHNPTGVDPRPEQWKEMATVVKKNNLFAFFDMAYQGFASGDGNKDAWAVRHFIEQGINVCLCQSYAKNMGLYGERVGAFTVVCK

SEQ ID NO: 2303 - protein, 175 aa, Ovis aries
MDIAIHHPWIRRPFFPFHSPSRLFDQFFGEHLLESDLFPASTSLSPFYLRPPSFLRAPSWIDTGLSEVRLEKDRFSVNLDVKHFSPEELKVKVLGDVIEVHGKHEERQDEHGFISREFHRKYRIPADVDPLTITSSLSSDGVLTMNGPRKQASGPERTIPITREEKPAVTAAPKK

SEQ ID NO: 2304 - protein, 227 aa, Ovis aries; identical to SEQ ID NO: 486

SEQ ID NO: 2305 - protein, 245 aa, Ovis aries
MDKNELVQKAKLAEQAERYDDMAACMKSVTEQGAELSNEERNLLSVAYKNVVGARRSSWRVVSSIEQKTEGAEKKQQMAREYREKIETELRDICNDVLSLLEKFLIPNRSQPESKVFYLKMKGDYYRYLAEVAAGDDKKGIVDQSQQAYQEAFEISKKEMQPTHPIRLGLALNFSVFYYEILNSPEKACSLAKTAFDEAIAELDTLSEESYKDSTLIMQLLRDNLTLWTSDTQGDEAEAGEGGEN

SEQ ID NO: 2306 - protein, 1481 aa, Ovis aries
MQRSPLEKASVVSKLFFSWTRPILKKGYRQRLELSDIYHISSSDSADNLSEKLEREWDRELASKKNPKLINALRRCFFWRFMFYGIILYLGEVTKAVQPLLLGRIIASYDPDNKVERSIAIYLGIGLCLLFIVRTLLLHPAIFGLHHIGMQMRIAMFSLIYKKTLKLSSRVLDKISIGQLVSLLSNNLNKFDEGLALAHFVWIAPLQVTLLMGLLWDLLQAFTFCGLAFLVVLALLQAGLGKMMMKYRDQRAGKINERLVITSEMIENIQSVKAYCWEEAMEKIIENLRQTELKLTRKAAYVRYLNSSAFFFSGFFVVFLSVLPYALLKGIILRKIFTTISFCIVLRMAVTRQFPWAVQTWYDSLGAINKIQDFLQKQEYKTLEYNLTTTDVVMENVTAFWEEGFSKLFEKAKENNNNRKISNCDTSLFFSNLLLGTPVLKDISFKIERGQLLAVAGSTGAGKTSLLMMIMGELEPSEGKIKHSGRISFCSQYSWIMPGTIKDNIIFGVSYDEYRYRSVIKACQLEEDISKFSEKDNIVLGEGGITLSGGQRARISLARAVYKDADLYLLDSPFGYLDVLTEKEIFESCVCKLMANKTRILVTSKMEHLKKADKILILHEGSVYFYGTFSELQNQRPDFSSKLMGCDTFDQFTAERRNSIITETLRRFSLEGDTSVSWNETKKPSFKQTGEFGEKRKNSILNSINSIRKFSVVQKTSLQMNGIDGASDEPLERRLSLVPHSEPGEGILPRSNAVNSGPTFLGGRRQSVLNLMTCSSVNQGQSIHRKTATSTRKMSLAPQASLAEIDIYSRRLSQDTGLEISEEINEEDLRDCFFDDVENIPAVTTWNTYLRYITVHKSLMFVLIWCLVVFLVEVAASLVVLCLFPKILLQDKGNSTKNASNSYAVIITSTSSYYIFYIYVGVADTLLALGLFRGLPLVHTLITVSKTLHHKMLQSVLQAPMSTLNTLKTGGILNRFSKDIAVLDDLLPLTIFDFIQLLLIVIGAVVVVSVLQPYIFLATVPVIAAFILLRGYFLHTSQQLKQLESEGRSPIFTHLVTSLKGLWTLRAFGRQPYFETLFHKALNLHTANWFLYLSTLRWFQMRIEMIFVIFFIAVTFISILTTGEGEGRVGIILTLAMNIMGTLQWAVNSSIDVDSLMRSVSRVFKFIDMPTEDGKPNNSFRPSKDSQPSKVMIIENQHVKKDDIWPSGGQMTVKDLTAKYIDGGNAILENISFSISPGQRVGLLGRTGSGKSTLLLAFLRLLNTKGEIQIDGVSWDSITLQQWRKAFGVIPQKVFIFSGTFRKNLDPYEQWSDQEIWKVADEVGLRSVIEQFPGKLDFVLVDGGCVLSHGHKQLMCLARSVLSKAKILLLDEPSAHLDPITYQIIRRTLKQAFADCTVILSEHRIEAMLECQRFLVIEENKVRQYDSIQRMLSEKSLFRQAISPADRLKLLPHRNSSRQRSRANIAALKEETEEEVQETKL

SEQ ID NO: 2307 - protein, 3127 aa, Ovis aries
MATLEKLMKAFESLKSFQQQQQQQQQQPPPPPPQPPQPPPPPQAQPPPQPPPPPPPPPVGPAAAEEPLHRPKKELSATKKDRVNHCLTICENIVAQSLRNSPEFQKLLGIAMELFLLCSDDAESDVRMVADECLNKVIKALMDSNLPRLQLELYKEIKKNGAPRSLRAALWRFAELAHLVRPQKCRPYLVNLLPCLTRTSKRPEESVQETLAAAIPKIMASFGNFANDNEIKVLLKAFIANLKSSSPTVRRTAAGSVVSICQHSRRTQYFYSWLLSVLLGLLVPVEEEHPTLLILGVLLALRSLVPLLQQQVKDTSLKGSFGVTRKETEVSPSTEQLVQVYELTLHYTQHQDHNVVTGALELLQQLLRTPPPELLRALTTAGGVRQLAAAKDEPGGRSRSGSIVELIAGGGSSCSPVLSRKQKGKVLFGEAAPLEDDSESRSEGSSPAFSASAKGEAGGELAASSGVSTPGSTSSAADSAGHGIITEQPRSQHTRQTDSVDLAACDLTSAATDGDEEDILSRSSSQMSAVPSDPAMDLNDGTQASSPISDSSQTTTEGPDSAVTPSDSSEIVLDGPDSQYPGMPAGQMQDEDGDATAVLPDDAEAFRNSSIALQQAHLLKSMGHSRQASDSSVDKFVSREEAAEPGDPESKPWRVKGDIGQSTDEDSAPLVHCVRLLSASFLLTGEKNALVPDRDVRVSVKALALSCVGAAVALHPESFFSKLYRAPLDTVEFPEEQYVSDVLNYIDHGDPQVRGATAILCGTLVCSVLGRCRFHVAGWMGAVRARTGNTFSLADCIPLLQKTLKDESSVTCKLACAAVRLCVMSLCSSSYSAWGLQLITDLLALRSSSYWLVRTELLETVAEIDFRLVSFLEAKAESLHRGAHHYTGRLKLQERVLSNVVIHLLGDEDPRVRHVAAASLMRLVPKLFYKCDRGQADPVVVVARDQSSVYLALLMHEPQPPSHLSVSAATRIYRGYNLLPSITDVTLENNLSRVIAAVSHELIMSTTRALTFGCCEALCLLSTAFPVCIWSLGWHCGVPPLSASDESRKSCTVGMVTMILTLLSSAWFPLDLSAHQDALILAGNLLAASAPRSPRSSWASEDEASTAASKQEEAWPALGDRTLVPMVEQLFSHLLKVINICAHVLDDVAPGPAVKAALPSLTNPPSLSPIRRKGKEKEPGEQASVPVSPKKGGESSPASRPPETSGPVATNKSSSLGSFCHLPSYLKLHDVLKATHANYKVTLDLQSSSEKVGGFLRSALDVLSQILELATLQDIGKCVEEILGYLKSCFSREPMMATVCVQQLLKTLFGTNLASQLDGLSSHASKSQGRAQRLGSSSARPGLYHYCFMAPYTLFTQALADASLRNAAQAEQDQDTAGWFDVLQKVSTQLKTNLTSVSKNRADKNAIHNHIRLFEPLVIKALKQYTTTTSVRLQKQVLALLAQLVQLRVNYCLLDSDQVFIGFVLKQFEYIEVGQFRESEAIIPNIFFFLVLLSYERYHSKQIIGIPKIIQLCDGIMASGRKAVTHAIPALQPIVHDLFVLRGTNKADAGRELETQKEVVVSMLLRLIQYHQVLEMFTLVLRQCHKESEDRWKRLSRQVADVILPMLAKQQVHIDSHEALGVLNTLFEILAPSSLRPVDMLLRSMFVTPDTLAVVSTVQLWVSGILAILRVLISQSTEDIVLSRIQELSFSPNLVSCSTISRLRDGDSASAPEELSEGRQTKNLPEETFARFLLQLVGILLEDIVTKQLRVEVSEQQHTFYCQELGTLLMCLIHIFKSGTFRRITAAASRLLRDGADGGFYSLESLNARVRSVIPTHPALVLLWCQILLLVGHTDYRWWAEVQQTPKRRSLSSTKSLSPETSGEDEDPDVASKLGMCNREIVRRGALILFCDYVCQNLHDSEHLTWLIVNHIQDLISLSHEPPVQDFISAVHRNSAASGLFIQAIQSRCENLSTPTMLKRTLQCLEGIHLSQSGAVLTLYVDKLLCTPLRALARVVETLACRRVEMLLAANLQSSTAQLPAEELIRIQEHLQSSGLAQRHQRLYSLLDRLRLATAPGSHGPTPPVTSHPLDGDGPLALEAVNPDKDWYVQLVQAQCWTRSDSALLEGAELVSRIPAGDLGAFVMHSEFNLSLLAPCLGLGMREISGGQRSPLFEAARMATLDRVTVVVQQLPAVHQAFQPFLPPQPATYWSKLDDLFGDAALYRTLTTLARALAQYLLVFSRLPSHLQLPPEKERDTVKFVVMTLEALSWHLTHARVPLSLDLQAGLDCCCLALQLPGLWSLLAAPNMVTHACSLIHCVRFILEAIVVQPGDQLLSPESRTSAPRSAREDGVDSDTQTPQYIAAACGMVAEMVECLPSVLALGHKRNSHTPAFLTPVLRNIIISLARLPLVNSYTRVPPLVWKLGWSPKPGGDFGTVFPEIPVEFLQEKEVFKEFIYRINTLGWTSRTQFEETWATLLGVLVTQPLVMEQEESPQEEDVERTQIHVLAVQAITSLVLSAMTVPVAGNPAVSCLEQQPRNKPLKALDTRFGRKLSVIRGIVEQEIQAMVSRRENAATHHLYQAWDPVPSLAPATTGALISHDKLLLQLNPERELGDMSYKLGQVSIHSVWLGNSITPLREEEWDEEEEEAEAPAPSSPPTSPLNSRKHRAGVDIHSCSQFLLELYSRWILPSSSARRTPVTLISEVVRSLLVVSDLFTERNQFEMMYLTLTELRKAHPSEDEILLQYLVPATCKAAAVLGMDKAVAEPVSRLLESALRSSHLPSTMGALHGVLYVLECDLLDDTAKQLIPVVSDYLLSSLQGRAHCVNVHSQQHVLVMCATAFYLIENYPLDVGPEFSASIIQMCGVMLSGSEEATPSVVYHCVLRGLERLLLSEQLSRLDAESLVKLSVDRVNVHSPHRAMAALGLMLTCMYTGKEKVSPGRASEPSPAAPDSESVIVAMERVSVLFDRIRKGFPCEARVVARVLPQFLDDFFPPQDVMNKVIGEFLSSQQPYPQLMATVVYQVFQALHSAGQSSTVRDWVMLSLSNFTQRSPVAMATWSLSCFFVSASTSPWVSAILPHVVSRMGKLEQVDVNLFCLVAADFYRHQIEEELDRRAFQSVFEVVAVPGNPYHHLLACLRSVHKAATC

SEQ ID NO: 2308 - protein, 358 aa, Persea americana
  MOD_RES (94)..(94): Any amino acid
MSAFCGKYQDELIANAAYIGTPGKGILAADESTGTIGKRLASINVENVESNRQALRELLFCTPGALECLSGVILFEETLYQKTASGKPFVDVLXERGVLPGIKVDKGTVELAGTNGENTTQGLDGLAQRCQQYYSAGARFAKWRAVLKISPNEPSQLAINENANGLARYAIICQENGLVPIVEPEILVDGSHDIDRCADVTERVLAACYKALNDHHVLLEGTLLKPNMVTPGSDAKKVTPEVIAEYTVRALQRTTPAAVPAIVFLSGGQSEEEATLNLNAMNKLKGKKPWTLSFSFGRALQQSTLKTWAGKEENVKKAQSAFLSRCKANSEATLGTYKGDAAKGEGVSESLHVKDYKY

SEQ ID NO: 2309 - protein, 462 aa, Persea americana
MALTRLLLPISILWFCFYSSHTILQKDPLLICVNGDPGFDQRAYPTYFGPILDEFSSIMGFEPSILSLERFNPVGGPETSPDTDISVDDFGARGDGTDDTKAFEKAWKDACSSGSVLIVPENKNYLLKQITFSGPCKSDLRVKIRGTIEASSDQSDWVGHNRKRWIEFEDISNLTLEGGGTSNGNGETWWDSSCKRKKSLPCKSAPTALTFRSCKNLIVSDLSIKDSQKMHLSFDKCQDVIASNLMVTAPEHSPNTDGIHITGTQRIHVMNSVIGTGDDCISIESGSKMVIATNITCGPGHGISIGSLGDRNSEAHVSGVLVDGGNLFDTTNGLRIKTWQGGSGSAKNIKFQNIVMHNVTNPIIIDQYYCDSKDPCPEQESAVKVSNVAYMNIRGTSASEVAVKFDCSKSSPCQGYIVGNINLVGNGGKETTMSCSNIVQGLLREGLSTFLFMKRRVHECSY

SEQ ID NO: 2310 - protein, 320 aa, Persea americana
MDSFPVINMEKLEGQERAATMKLINDACENWGFFELVNHSIPVELMDEVERLTKEHYKKCMEQRFKELMASKVEGAVVDANDMDWESTFFIRHLPVSNLSEIPDLTDEHRKVMKEFAEKLEKLAEQVLDLLCENLGLEKGYLKMAFAGTTTGLPTFGTKVSNYPPCPRPELFKGLRAHTDAGGLILLFQDDRVAGLQLLKDGEWVDVPPMNHSIVINLGDQVEVITNGKYKSVMHRVVAQTDGNRMSLASFYNPGSDAVIFPAPALVEKEAEEKKEVYPKFVFEDYMNLYAGLKFQAKEPRFEVMKMKAVETANLSPITT

SEQ ID NO: 2311 - protein, 502 aa, Persea americana
MAILVSLLFLAIALTFFLLKLNEKREKKPNLPPSPPNLPIIGNLHQLGNLPHRSLRSLANELGPLILLHLGHIPTLIVSTAEIAEEILKTHDLIFASRPSTTAARRIFYDCTDVAFSPYGEYWRQVRKICVLELLSIKRVNSYRSIREEEVGLMMERISQSCSTGEAVNLSELLLLLSSGTITRVAFGKKYEGEEERKNKFADLATELTTLMGAFFVGDYFPSFAWVDVLTGMDARLKRNHGELDAFVDHVIDDHLLSRKANGSDGVEQKDLVDVLLHLQKDSSLGVHLNRNNLKAVILDMFSGGTDTTAVTLEWAMAELIKHPDVMEKAQQEVRRVVGKKAKVEEEDLHQLHYLKLIIKETLRLHPVAPLLVPRESTRDVVIRGYHIPAKTRVFINAWAIGRDPKSWENAEEFLPERFVNNSVDFKGQDFQLIPFGAGRRGCPGIAFGISSVEISLANLLYWFNWELPGDLTKEDLDMSEAVGITVHMKFPLQLVAKRHLS

SEQ ID NO: 2312 - protein, 100 aa, Persea americana
PLLGGVRDVPDHNSAETEELARFAVQEHNKKANTRLEFSRVVKAKEQVVAGTMYYITLEVVEAGQKKIYEAKVWVKLWENFKELQEFKPVGDSSSTSSDA

SEQ ID NO: 2313 - protein, 396 aa, Persea americana
MALKLSPVMFQSQKLPFLASYPPSNLRSPRVFMASTLRSSTKEVDNIKKPFSPPREVHVQVTHSMPPQKIEIFKSLEDWAEENILVHLKPVEKCWQPQDFLPEPESEGFLESVEELRKRAKEIPDEYFVCLVGDMITEEALPTYQTMLNTLDGVRDETGASPTSWAIWTRAWTAEENRHGDLLNKYLYLSGRVDMRQIEKTIQYLIGSGMDPRTENSPYLGFVYTSFQERATFISHGNTARHAKEYGDDKLAKICGTIAADEKRHETAYTKIVEKLFEIDPDGTVLAFCDMMKKKISMPAHLMYDGQDDDLFGHFSSVAQRLGVYTAKDYADILEFLVRRWDVEHLTGLSPEGKTAQEFICKLAPRIRSLEERARSRAKEGPTIPFSWIFNREVKL

SEQ ID NO: 2314 - protein, 779 aa, Persea americana
  MOD_RES (260)..(260): Any amino acid
  MOD_RES (370)..(370): Any amino acid
  MOD_RES (377)..(377): Any amino acid
  MOD_RES (379)..(379): Any amino acid
  MOD_RES (652)..(652): Any amino acid
MTVTPKISINDGNLVVHGKTILTGVPDNIVLTPRTGDGLVAGCFIGATASESESIHVFPMGTLEGLRFTCCFRFKLWWMTQRMGMCGKDVPLETQFMLIESKDGAAAIDDDEEEAPTIYTVFLPLLEGQFRAVLQGNESNQIEICLESGDCAVRTNQGMYLVYMHAGTNPFQVINQAVKAVEKHLYSFQHLEKKKIPSFLDWFGWCTWDAFFTDVTDEGVEEGLKSLSGGGTPPRFLIIDDGWQQIGSEETKDDSNCVVXEGAQFASRLTGIKENDKFQKNGKSEHVPGLKLVVDDAKQHHNVKFVYVWHALAGYWGGVKPPAAGMEHYDTALAYPVQSPGVMGNQPDIVMDSLSVHGLGLVHPRKVFNXYNELHAXLXSCGVNGVKVDVQNIIETLGAGHGGRVSLTRSYIQALEGSIARNFPDNGCIACMCHNTDSIYSAKQTAVVRASDDFYPRDPASHTIHVSSVANNSLFLGEFMQPDWDMFHSLHPAAEYHGAARAVGGCPIYVSDKPGHHNFELLKKLVLPDGSVLRARLPGRPTRDSLFVDPARDGVSLLKIWNMNKCLGVVGVFNCQGAGWCKITKKTRIHDAAPGTLSGSIRAHDVEFINQLAGQDWNGEVIVFTYGSGEVVRLPKCASIPVTLEVLEYELXHICPVKEITSNISFAPIGLLDMFNSGGAVEQFDVRMDSNNAEPPLFDGKVASKLSSSLSNNQSPSATVVLRVRGCGRFGAYSSQRPLKCTVDLVETEFNYDSVTGLVTLIIPVPDQEMYKWSVEFQL

SEQ ID NO: 2315 - protein, 326 aa, Persea americana
MVYCTASLPLLLLLLVGLLAGEAFAEQCGRQAGGALCPGGLCCSQFGWCGSTSDYCGPTCQSQCGGVTPSPGGGVASLISQSVFNQMLKHRNDAACQAKGFYTYNAFIAAANSFNGFASVGDTATRKREIAAFLAQTSHETTGGWATAPDGPYAWGYCFLKEQGNPPDYCVPTAQWPCAPGKKYYGRGPIQISYNYNYGPAGRAIGYDLINNPDAVATDPVISFKTALWFWMTPQSPKPSCHNVITGRWTPSAADRAAGRLPGYGVITNIINGGIECGKGFNDKVADRIGFYKRYCDLLGVSYGSNLDCYNQRSFGVSTNPLAASS

SEQ ID NO: 2316 - protein, 181 aa, Persea americana
VNMATGDHKKEPFISLNPFGQVPALEDGDLKLFESRAITNYISHEYAGKGTDLICKDSKKMAIVAVWMEVEAHHFDPEASKLVWELFYKPIYGLTTDPAAVTALSEKLAKVLDVYEGPLAHSKYLGGDCFHFADLHHLPCLNYLMTTQVKELFDSRLHVSAWCQDILARPAWAKVVEMQKK

SEQ ID NO: 2317 - protein, 433 aa, Vaccinium corymbosum
MVHSFKYILIGGGVSAGYAAREFVKQGVHPGELAIISKEAVAPYERPALSKAYLFPESPARLPGFHTCVGSGGERLLPEWYSEKGIQLYLSTEIVSADLAAKFLKSANGEHFEYHILIIATGSSVIRLTDFGVQGADAKHIYYLREIDDADKLYEAIKQKKNGKVVIVGGGYIGLELSAVMKLNNLDVCMVYPEPWCMPRLFTAGIAAFYEGYYAHKGIKIIKGTVAVGFTSDANGEVKEVKLKDGRVLESDIVVVGVGGRPLIGLFKGQVEEEKGGIKTDSFFKSSVPDVYAVGDVATFPMKIYNEMRRVEHVDHARKSAEHAVKAIFAADEGTSVEEYDYLPFFYSRSFNLSWQFYGDNVGETVLFGDSSPTSENPKFGTYWIKDGKIVGAFLESGTPEENKAIANLSRVQPPADSLDQLAKEGITFACKI

SEQ ID NO: 2318 - protein, 108 aa, Vaccinium corymbosum; identical to SEQ ID NO: 585

SEQ ID NO: 2319 - protein, 479 aa, Brassica oleracea
MSPQTETKASVGFKAGVKEYKLNYYTPEYETKDTDILAAFRVTPQPGVPPEEAGAAVAAESSTGTWTTVWTDGLTSLDRYKGRCYHIEPVPGEETQFIAYVAYPLDLFEEGSVTNMFTSIVGNVFGFKALAALRLEDLRIPPAYTKTFQGPPHGIQVERDKLNKYGRPLLGCTIKPKLGLSAKNYGRAVYECLRGGLDFTKDDENVNSQPFMRWRDRFLFCAEAIYKSQAETGEIKGHYLNATAGTCEEMMKRAIFARELGVPIVMHDYLTGGFTANTSLAHYCRDNGLLLHIHRAMHAVIDRQKNHGMHFRVLAKALRLSGGDHVHAGTVVGKLEGDRESTLGFVDLLRDDYVEKDRSRGIFFTQDWVSLPGVLPVASGGIHVWHMPALTEIFGDDSVLQFGGGTLGHPWGNAPGAVANRVALEACVQARNEGRDLAVEGNEIIREACKWSPELAAACEVWKEITFNFPTIDKLDGQD

SEQ ID NO: 2320 - protein, 466 aa, Brassica oleracea
  var. alboglabra
MALIVEKTSSGREYKVKDMSQADFGRLELELAEVEMPGLMACRTEFGPAQPFKGARITGSLHMTIQTAVLIETLTALGAEVRWCSCNIFSTQDHAAAAIARDSAAVFAWKGETLQEYWWCTERALDWGPGGGPDLIVDDGGDATLLIHEGVKAEEIFEKTGQVPDPTSTDNPEFQIVLSIIKEGLQVDPKKYHKMKERLVGVSEETTTGVKRLYQMQESGALLFPAINVNDSVTKSKFDNLYGCRHSLPDGLMRATDVMIAGKVAVICGYGDVGKGCAAAMKTAGARVIVTEIDPICALQAMMEGLQVLTLEDVVSEADIFVTTTGNKDIIMVDHMRKMKNNAIVCNIGHFDNEIDMQGLETFPGVKRITIKPQTDRWVFPDTKSGIIVLAEGRLMNLGCATGHPSFVMSYPFTNQVIAQLELWNEKSSGKYEKKVYVLPKHLDEKVAALHLGKLGAKLTKLTKDI

SEQ ID NO: 2321 - protein, 347 aa, Brassica oleracea
MGRKKLELSERHSVAMAASLQSAATFFQSAKISTAPSRGSAHLRSAQTVGKSFGLETSSARLTCSYQSDIKDFAGKCSDAVKIAGFALATSALVVSGASAEGAPKRLTYDEIQSKTYMEVKGTGTANQCPTIDGGSETFSFKPGKYAGKKFCFEPTSFTVKAESVSKNAPPEFQNTKLMTRLTCTLDEIEGPFEVSSDGSVNFKEEDGIDYAAVTVQLPGGERVPFLFTVKQLDASGKPDNFTGKFLVPSYRGPSFLDPKGRGGSTGYDNAVALPAGGRGDEEELSKENVKNTAASVGEITLKVTKSKPETGEVIGVFQSLQPSDTDLGAKVPKDVKIQGVWYGQLE

SEQ ID NO: 2322 - protein, 250 aa, Brassica oleracea
MAKTSLPLAASFLLLLISSAAAADAGRLFLTVVNHCPFTVWPAIQPNAGHPVLEKGGFALPTNTHRSFFPPSTHWSGRIWGRTGCSHYNGKFSCVTGDCGHRLECNGLGGATPASLAQFDLHHGGHQDLSSYGVSLVDGFNVPMTVTPHEGRGVCPVVGCREDLLKTCPAHLQLRSHGGHVVACKSGCEAFRTDELCCRNHYNSPQTCRASSHSLFFKHACPSTMTFAHDSPSLMHDCSSPRELKVIFCH

SEQ ID NO: 2323 - protein, 250 aa, Brassica oleracea
  var. italica
MTKNYPAVSEEYQKAIEKCKRKLRGLIAEKNCAPIMVRLAWHSAGTFDCASRTGGPFGTMRFDDELAHGANNGLHIALRLLEPIREQFPTISHADFHQLAGVVAVEVTGGPEIPFHPGREDKPQPPPEGRLPDATKGCDHLRQVFLKQMGLTDQDIVALSGAHTLGRCHKDRSGFEGAWTSNPLIFDNSYFKELLSGEKEGLFQLPSDKALLDDPVFRPLVEKYAADEEAFFTDYAEAHLKLSELGFADA

SEQ ID NO: 2324 - protein, 354 aa, Brassica oleracea
FEKPSAIQQRGIIPFCKGLDVIQQAQSGTGKTATFCSGVLQQLDYTLVQCQALVLAPTRELAQQIEKVMRALGDYLGVKVHACVGGTSVREDQRILQSGVHVVVGTPGRVFDMLRRQSLRADAIKMFVLDEADEMLSRGFKDQIYDIFQLLPSKVQVGVFSATMPPEALEITRKFMNKPVRILVKRDELTLEGIKQFYVNVDKEEWKLETLCDLYETLAITQSVIFVNTRRKVDWLTDKMRSRDHTVSATHGDMDQNTRDIIMREFRSGSSRVLITTDLLARGIDVQQVSLVINFDLPTQPENYLHRIGRSGRFGRKGVAINFMTTDDERMLSDIQKFYNVVVEELPSNVADLL

SEQ ID NO: 2325 - protein, 446 aa, Brassica oleracea
  var. botrytis
MREILHIQGGQCGKQIGSKFWEVVCDEHGPTGRYTGNSYLQLERVNVYYNEASCGRYVPRAILMDLEPGTMDSVRTGPYGQIFRPDNFVFGQSGAGNNWAKGHYTEGAELIDAVLDVVRKEAENCDCLQGFQVCHSLGGGTGSGMGTLLISKIREEYPDRMMLTFSVFPSPKVSDTVVEPYNATLSVHQLVENADECMVLDNEALYDICFRTLKLTTPSFGDLNHLISATMSGVTCCLRFPGQLNSDLRKLAVNLIPFPRLHFFMVGFAPLTSRGSQQYRALTVPELTQQMWDSKNMMCAADPRHGRYLTASAMFRGKMSTKEVDEQMINVQNKNSSYFVEWIPNNVKSSVCDIAPRGLSMASTFIGNSTSIQEMFRRVSEQFTAMFRRKAFLHWYTGEGMDEMEFTEAESNMNDFVSEYQQYQDATADEEGEYEEEEEEEVEYQD

SEQ ID NO: 2326 - protein, 891 aa, Brassica oleracea
  var. gemmifera
MFCKEASSSLQTLNIAKSLSSEFTKPSALINPLSAGHRYKLCPRPNLRGRCTVTASKFDIDWIAKERVKKIKVKGIITAKQGLLPSVGFTDLLGVSLLVELISAETDPQTLMEKDPVKDHARRLVIDAHGEDQYECVFDMPKDFGAVGAIRVLNEAHREIFLKEMKLELPDGPVTFTCNSWLASKSDDPTKRTFFSNKSYLPLQTPEPLKQLRKEELETLQGKNRERNGELKKFERVYDYDVYNDVGDPDKDPKLSRPVLGGLSHPYPRRCKTGRKPSRKYPSIETRKGDFYVPRDEEWSTVKGTAFTGTTILAALPAVFPQIEAALVDPNMPFPHFKSIEDLFEEGIELPKNAGIFPLIPRVVKAVAEADDILQFDSPILLDKDRFSWIRDDEFARQTLAGLNPLCIGLVQEWPLKSKLDPAVYGDPNSLITSEIVEREIKGVMSFDEALENKRLFMLDYHDLLLPYVNKVRELDDSTLYASRTLFFLNDDSTLRPVAIELTRPQDVNRPQWSQVFTPGYDATSCWLWNLAKTHAITHDAGYHQLISHWLRTHCCMEPYIIAANRQLSAMHPIYRLLHPHFRYTLEINARARQSLVNAGGIIETCFWPGKYSLELSSDVYAKLWRFDREGLPADLISRGLAVEDETAEHGLRLTIPDYPFANDGLMLWDALKEWITECVKHYYPDAALIMCDEELQAWWSEVRNIGHGDKKDEPWWPVLRTQDDLIGVVTTIAWVASGHHAAVNFGQYGYGGYFPNRPTTTRIRMPVEEPTEEELKEFYEEPEKVLLKTFPSQKQATQVMVTLDLLSTHSPDEEYLGEEPEASWVDDPVIFAAYERFKGRLKHLEDVIDERNVNVSLKNRAGAGVVKYELLKPISQPGVTGMGVPYSVSI

SEQ ID NO: 2327 - protein, 218 aa, Brassica oleracea
MKTFFLVTLLLAAAVCTHGREQVKDSNGNPVKRGAKYFIQPAKSNGGGLVPAAINILPFCPLGITQTLLPYQPGLPVSFGYEPVIVGTDYIYTSTTINIEFRSEIWPVCNELSKLWAVDVSSSAAKEPAIIIGGERTAPNSLFKIEEATGAHTYKLTTSSGTVGTIPGPWLGAPQLIATNDDAKTLFVKFVKVDDDATKATTSTSRVEKLGLRMFPFY

SEQ ID NO: 2328 - protein, 202 aa, Brassica oleracea
DQVVYILDQVRAMETEMLQRIQQQGLNITPRILILTRLLPDAVGTTCGERLERVDGSEYCDILRVPFRTEKGIVRKWISRFEVWPYLETYTEDAAVELAKELRGKPDLIIGNYSDGNLVASLLAHKLGVTQCTIAHALEKTKYPDSDIYWKKLDDKYHFSCQFTADLFAMNHTDFIITSTLPEIAGSKDTVGQYESHTAFTL

SEQ ID NO: 2329 - protein, 226 aa, Brassica oleracea
  var. botrytis
MMSSFPLVSFLITLMLAAAVCTHGENRVNDTDGNPLRTTAQYLILPLSPRSNGGGLLPVPVKLQPLCPLGISQSSVKALPGLPVSFSYPYAIMDTYVNEMEAINIEFKSDAWPGCEEFSKYWEVDESSSASEEPAILVGGKKHERNSWFKIERKEPFYGGIAYKLTTLTGTIGTVPGPWENAPQLVLTDDTAKTFLVKFHKVHGDTTATTSTSRQEKLGLRMFPFY

SEQ ID NO: 2330 - protein, 282 aa, Brassica oleracea
  var. gemmifera
MAENADLVEWPKKDKRRFLHVVYRVGDLDRTIQFYTECFGMKVLRKRDVPEEKYSNAFLGFGPETSNFVVELTYNYGVSSYDIGTGFGHFAISTQDVSKMVEAVRAKGGNVTREPGPVKGGGSVIAFVKDPDGYTFELIQRGPTPEPLCQVMLRVGDLDRAVKFMEKALGMRLLRRIERPEYNTIGMMGYAEEYESIVLELTYNYGVTEYTKGNAYAQIAIGTDDVYKSAEVVKIVNQELGGKITREAGPLPGLGTKIVSFLDPDGWKQVLVDNEDFLKELE

SEQ ID NO: 2331 - protein, 95 aa, Brassica oleracea; identical to SEQ ID NO: 560

SEQ ID NO: 2332 - protein, 152 aa, Brassica oleracea
  var. capitata
MAKGVAVLNSSEGVKGTIFFTHEGNGATTVTGTVSGLRPGLHGFHVHALGDNTNGCMSTGPHFNPDGKTHGAPEDANRHAGDLGNIIVGDDGTATFTITDSQIPLSGPNSIVGRAIVVHADPDDLGKGGHELSLSTGNAGGRVACGIIGLQG

SEQ ID NO: 2333 - protein, 168 aa, Brassica oleracea
MLVYTDLLTGDELLSDSFPYKEIENGILWEVEGKWTTKGCVEVNIGANPSAEEGGEDEGVDDSVEKVVDIVDTFRLQEQPTYDKKGFIAYIKKYIKLLTPKLTPEQQEEFKKGIEGATKFLLPKLKDFQFFVGEGMHDDSTIVFAYYKEGATNPTFLYFAHGLKEVKC

SEQ ID NO: 2334 - protein, 322 aa, Brassica oleracea
  var. acephala
GHASTSTSPVFVQAPSEKGFSSFAIDFLMGGVSAAVSKTAAAPIERVKLLIQNQDEMLKAGRLSEPYKGIGDCFGRTIKDEGFGSLWRGNTANVIRYFPTQALNFVFKDYFKRLFNFKKDRDGYWKWFAGNLGSGGAAGASSLLFVYSLDYARTRLANDSKAAKKGGERQFNGLVDVYKKTLKSDGIAGLYRGFNISCVGIIVYRGLYFGLYDSLKPLLPADLQDSFFASFALGWLITNGAGLASYPIDTVRRRMMMTSGEAVKYKSSMDAFQQILKKEGPKSLFKGAGANILRAIAGAGVLSGYDKLQLLLLGKKYGSESG

SEQ ID NO: 2335 - protein, 536 aa, Brassica oleracea
MDASMITNPKSIVSLPSLFMGRSGGSIRSSQCNVTMGQAVSFPSQKTKTLKVSRNVKRRSGGGGAFAATCSSGDKILVANRGEIAVRVIRTAHEMGIPCVAVYSTIDKDALHVKLADEAVCIGEAPSNQSYLLIPNVLSAAISRGCTMLHPGYGFLAENALFVEMCREHRINFIGPNPDSIRVMGDKSTARETMKNAGVPTVPGSDGLLQSTEEGVRLANEIGYPVMIKATAGGGGRGMRLANEPSEFVKLLQQAKSEAAAAFGNDGVYLEKYVQNPRHIEFQILADKFGNVVHFGECDCSIQRRNQKLLEEAPSPALTPELRKAMGDAAVAAAASIGYIGVGTVEFLLDERGSFYFMEMNTRIQVEHPVTEMIYSVDLIEEQIRVAMGEKLRYTQDEIVLRGHSIECRINAEDPFKGFRPGPGRITSYLPSGGPFVRMDSHVYPDYVVPPSYDSLLGKLIVWAPTRERAIERMKRALNDTIITGVPTTIEYHKLILEVEDFKNGKVDTAFIPKHEEELAEPHEIVPVKDLTNVAA

SEQ ID NO: 2336 - protein, 316 aa, Brassica oleracea
  var. capitata
MASLKVPSNVPLPEDDAEQLHKAFSGWGTNEKLIISILAHRNSAQRSLIRSVYAATYNEDLLKALDKELSSDFERAVMLWTLDPAERDAYLAKESTKMFTKNNWVLVEIACTRSAVELFKVKQAYQARYKKSLEEDVAQHTSGDLRKLLLPLVSTFRYEGDDVNMMLARSEAKLLHEKVSEKAFNDDDFIRILTTRSKAQLGATLNHYNNEHGNSINKNLKEGSDDEYLKLLRAAITCLTYPEKHFEKVLRLAINKMGTDEWGLTRVVTTRTEVDMERIKEEYQRRNSVPLDRAVAKDTSGDYEDMLVALLGHGDV

SEQ ID NO: 2337 - protein, 343 aa, Brassica oleracea
  var. italica
MAPSVQGEWIKVEQKGGQTPGPRSSHGIAVVGDKLYSFGGELTPNISIDKDLYVFDFNTHTWSISPSKGVAPDVKALGTRMVSVGTKLYLFGGRDENKKFDDFYSYDTVTNEWTKLTILDQEGGPEARTYHSMASDENHVYVFGGVSKGGTNKTPFRFRTIEAYNIADGKWSQLPDPGEQFPRFERRGGAGFVVVQGKIWVVYGFATSPDPNGKNDYESDQVQFYDPATQKWTEVETKGDKPSARSVFGHAVVGKYILIFGGETWPDPKAHLGPGTLSDEGFALDTETLVWERFGGGAEPGQLGWPGYTTATVYGKKGLLMHGGKRPTNNRTDELYFYAVNSA

SEQ ID NO: 2338 - protein, 434 aa, Brassica oleracea
MAEKSFKYIILGGGVSAGYAAKEFANQGVKPGELAVISKEAVAPYERPALSKGYLFPEGAARLPGFHCCVGSGGEKLLPESYKQKGIELILSTEIVKADLAAKTLVSAAGDVFKYETLIIATGSTVLRLTDFGVKGADSTNILYLREIDDADKVVEAIKAKKGGKAVVVGGGYIGLELSSALRINDFDVTMVFPEPWCMPRLFTADIAAFYETYYTNKGVKIIKGTVASGFTAHPNGEVNEVQLKDGRSLEADIVIVGVGAKPLTSLFKGQVEEDKGGIKTDAFFKTSVPDVYAVGDVATFPLKMYGDMRRVEHVDHSRKSAEQAVKAIKAAEGGGTVEEYDYLPFFYSRSFDLSWQFYGDNVGDSVLFGDSNPSNPKPRFGAYWIQDGKVVGAFMEGGCGDENKALAKVAKARPVAESLDELAKQGISFAAKI

SEQ ID NO: 2339 - protein, 810 aa, Brassica oleracea
  var. capitata
MAQHLLHGTLHATIYEVDDLHTGGLRSGFFGKILANVEETIGVGKGETQLYATIDLQRARVGRTRKIKDEAKNPKWYESFHIYCAHLASDIIFTVKDDNPIGATLIGRAYVPVDQVIHGEEVDQWVEILDNDRNPIHGGSKIHVKLQYFGVEADRNWNQGIKSAKFPGVPYTFFSQRQGCKVSLYQDAHIPDNFVPRIPLAGGKNYEPQRCWEDIFDAISNAQHMIYITGWSVYTEIALVRDSRRPKPGGDVTVGELLKKKASEGVRVLLLVWDDRTSVDVLKKDGLMATHDEETENFFRGSDVHCILCPRNPDDGGSIVQNLQVSAMFTHHQKIVVVDSEMPSRGGSQMRRIVSFVGGIDLCDGRYDTPFHSLFRTLDTVHHDDFHQPNFTGAAITKGGPREPWHDIHSRLEGPIAWDVLYNFEQRWSKQGGKDILVKLRELSDIIITPSPVMFQEDHDVWNVQLFRSIDGGAAAGFPESPEAAAEAGLVSGKDNIIDRSIQDAYIHAIRRAKDFIYIENQYFLGSSFAWAADGITPEDINALHLIPKELSLKIVSKIEKGEKFRVYVVVPMWPEGLPESASVQAILDWQRRTMQMMYKDIVQALRAQGLEEDPRNYLTFFCLGNREVKKEGEYEPAERPDADSSYMKAQEARRFMIYVHTKMMIVDDEYIIIGSANINQRSMDGARDSEIAMGGYQPHHLSHRQPARGQIHGFRMSLWYEHLGMLDETFLDPSSVECIEKVNRISDKYWDLYSSESLEHDLPGHLLRYPVDVDGEGDVTEFPGFEFFPDTKARILGTKSDYLPPILTT

SEQ ID NO: 2340 - protein, 506 aa, Chlorella vulgaris
MVKIRPDEISSIIKQQIEQYQQEVKAVNVGTVFQVGDGIARIYGLDKVMAGELVEFEDGTVGIALNLEAKNVGAVLMGEGTRVQEGSSVRATGKIAQIPVGDGYLGRVVNSLARPIDGKGEIATKENRLIESPAPGIISRRSVHEPLQTGIVAIDAMIPIGRGQRELIIGDRQTGKTAIAVDTILNQKGKDVVCVYVAIGQKASSIAQVVNTLQERGAMDYTIIVAATADSPATLQYLSPYTGAALAEYFMYTGRHTLVIYDDLTKQAQAYREMSLLLRRPPGREAYPGDVFYLHSRLLERAAKLNDKLGSGSMTALPVVETQEGDVSAYIPTNVISITDGQIFLSADIFNAGIRPAINVGISVSRVGSAAQPKAMKQVAGKLKLELAQFAELEAFSQFASDLDQATQNQLARGQRLRELLKQSQSSPLSLEDQVASIYAGTNGYLDVLPADRVRAFLVGLRQYLATNKAKYGEILRSTNALTDEAQTLLKEALKEYTEEFLASAK

SEQ ID NO: 2341 - protein, 508 aa, Chlorella vulgaris
MGLPWYRVHTVVLNDPGRLIAVHLMHTSLVSGWAGSMAFYELAVFDPSDPVLNPMWRQGMFVLPFMTRLGITQSWGGWTISGETAANPGVWSYEGVAAAHIVLSGLLFAASIWHWVYWDLELFRDPRTSNPALDLPKIFGIHLFLSGVLCFGFGAFHVTGIFGPGIWVSDPYGITGTVQAVAPSWDATGFDPYNPGGISAHHIAAGILGVLAGLFHLCVRPPQRLYNGLRMGNIETVLSSSIAAVFWAAFVVSGTMWYGSAATPIELFGPTRYQWDLGFFQQEIERRVQTNLSEGKSASQAWAEIPEKLAFYDYIGNNPAKGGLFRAGAMNSGDGIAVGWLGHAVFKEKQGNELFVRRMPTFFETFPVVLVDKDGVVRADVPFRRSESKYSIEQVGVSVTFYGGELDGVTFNDPATVKKYARRAQLGEIFEFDRATLQSDGVFRASPRGWFTFAHLCFALLFFFGHIWHGARTIFRDVFAGIDADLDEQVEFGAFLKLGDTSTRRQSV

SEQ ID NO: 2342 - protein, 473 aa, Chlorella vulgaris
MKNLYSLRRFYHVETLFNGSLVVGGRDQESTGFAWWAGNARLINLSGKLLGAHVAHAGLIVFWAGAMNLFEVAHFVPEKPMYEQGLILLPHLATLGYGVGPGGEVIDTYPYFVSGVLHLISSAVLGFGGVYHSLVGPETLEESFPFFGYVWKDKNKMTTILGIHLIVLGFGAWLLVWKAMYFGGIYDTWAPGGGDVRIISNPTVSPGVIFSYILKSPFGGDGWIVSVDNMEDVIGGHIWIGTLCIFGGIWHILTKPWAWARRAFVWSGEAYLSYSLGAIALMGFTACCMSWFNTTAYPSEFYGPTGPEASQSQTFTFLVRDQRLGANVASAQGPTGLGKYLMRSPTGEIIFGGETMRFWDFRGPWLEPLRGPNGLDLNKLKNDIQPWQERRAAEYMTHAPLGSLNSVGGVATEINAVNYVSPRSWLATSHFCLGFFFFVGHLWHAGRARAAAAGFEKGIDRDNEPVLSMRPLD

SEQ ID NO: 2343 - protein, 352 aa, Chlorella vulgaris
MTIAIGKTQEKRGLFDVVDDWLRRDRFVFVGWSGLLLFPTAYLALGGWFTGTTFVTSWYTHGLATSYLEGCNFLTAAVSTPANSMGHSLLFLWGPEAQGDFTRWCQLGGLWTFVALHGSFALIGFMLRQFEIARSVKIRPYNAIAFSAPISVFVSVFLIYPLGQSGWFFAPSFGVAAIFRFILFFQGFHNWTLNPFHMMGVAGVLGAALLCAIHGATVENTLFEDGDGANTFRAFNPTQAEETYSMVTANRFWSQIFGVAFSNKRWLHFFMLFVPVTGLWMSAIGVVGLALNLRAYDFVSQEIRAAEDPEFETFYTKNILLNEGIRAWMAAQDQPHEKLVFPEEVLPRGNAL

SEQ ID NO: 2344 - protein, 751 aa, Chlorella vulgaris
MTISPPEREAKKVKIVVDRNPVATNFEKWAKPGHFSRTLSKGPTTTTWIWNLHADAHDFDTQTSDLEEISRKVFSAHFGQLGIIFIWLSGMYFHGARFSNYEAWLTDPTHIKPSAQVVWPIVGQEILNADVGGGFQGLQITSGFFQLWRASGITSELQLYTTAIGGLVMAAAMFFAGWFHYHKAAPKLEWFQNVESMLNHHLAGLLGLGSLAWAGHQIHVSLPINKLLDAGVDPKEIPLPHEFLFNPELMAQLYPSFAKGLAPFFTLDWAQYSDFLTFQGGLNPVTGGLWLTDTVHHHLAIAVLFLVAGHQYRTNWGIGSSLKEILEAHKGPFTGEGHKGLYEILTTSWHAQLAINLALFGSLSIIVSHHMYAMPPYPYLATDYGTQLSLFTHHMWIGGFCIVGAGAHAGIFMVRDYDPTNNYNNLLDRVLRHRDAMISHLNWVCIFLGFHSFGLYIHNDTMSALGRPQDMFSDTAIQLQPVFAQWVQNTHFLAPGFTAPNALASTSPSWGGDVVAVGGKVAMMPISLGTADFMVHHIHAFTIHVTVLILLKGVLYARSSRLIPDKANLGFRFPCDGPGRGGTCQVSAWDHVFLGLFWMYNSISIVIFHFSWKMQSDVWGTVSANGVSHITGGNFAQSANTINGWLRDFLWAQSSQVIQSYGSALSAYGLIFLGAHFVWAFSLMFLFSGRGYWQELIESIVWAHNKLKVAPAIQPRALSITQGRAVGVAHYLLGGIATTWSFFLARILAVG

SEQ ID NO: 2345 - protein, 734 aa, Chlorella vulgaris
MATKFPKFSQALAQDPTTRRLWFGIATAHDFESHDGMTEERLYQKIFASHFGQLAIIFLWTSGNLFHVAWQGNFEQWVQDPLHIRPIAHAIWDPHFGQAAVEAFTRGGASGPVNISTSGVYQWWYTIGIRTNQELYVGSIFLLVLAGLFLFAGWLHLQPSFQPALSWFKNAESRLNHHLAGLFGVSSLAWTGHLVHVAIPESRGQHVGWDNFLTVLPHPAGLTPFFTGNWAAYAENPDSLSQLFGTGEGSGTAILTFLGGFHPQTQSLWLTDMAHHHLAIAVVFILAGHMYRTIFGIGHSMREILEAQTPPSGRLGAGHKGLYDTVNNSLHFQLGLALASVGTICSLVAQHMYSLPPYAFLAQDFTTQASLYTHHQYIAGFIMCGAFAHGAIFFVRDYDPEANRGNVLARVLDHKEAIISHLSWVSLFLGFHTLGLYVHNDVVQAFGTPEKQILIEPVFAQWIQAAHGKTVYGFDFLLSSATSAPSLAGQSLWLPGWLQGINSDTNSLFLTIGPGDFLVHHAIALGLHTTTLILVKGALDARGSKLMPDKKDFGYSFPCDGPGRGGTCDISAWDAFYLAVFWMLNTIGWVTFYFHWKHLGIWQGNVNQFNESSTYLMGWLRDYLWLNSSQLINGYNPFGMNSLSVWAWMFLFGHLIYATGFMFLISWRGYWQELIETLAWAHERTPLANLVRWRDKPVALSIVQARLVGLTHFSVGYVLTYAAFLIASTSGKFG

SEQ ID NO: 2346 - protein, 259 aa, Gadus morhua
RNGLMVAEIEELRAALEQTERGRKVAEQELLDASERVGLLHSQNTSLLNSKKKLESDLVQVQGEVDDSVQEARDAEEKAKKAITDAAMMAEELKKEQDTSSHLERMKKNLEVTVKDLQHRLDEAENLAMKGGKKQLQKLEARVRDLESEVDNEQRRGAEAIKGVRKYERRVKELTYQTEEDKKNGCRLQDLVDKLQMKVKAYKRQSEETEEQANSYLSKCRKVQHELEEAEERADIAETQVNKLRAKTRDSGKGKETAE

SEQ ID NO: 2347 - protein, 229 aa, Gadus morhua; identical to SEQ ID NO: 509

SEQ ID NO: 2348 - protein, 258 aa, Gadus morhua
AYVLSSRVRTGRSIKGFTLPPHNSRGERRTIEKLSIEALATLSGEFKGKYYPLNGMTDKEQDQLINDHFLFDKPVSPLLTCAGMARDWPDARGIWHNDAKTFLVWVNEEDHLRVISMQQGGNMKEVFRRFCTGLLKIEETFKKHNHGFMWNEHLGYVLTCPSNLGTGLRGGVHVKLPKLSTHAKFEEILTRLRLQKRGTGGVDTASVGGVFDISNADRLGSSEVDQVQMVVDGVKLMVAMEKKPEKSESIDDMIPAQK

SEQ ID NO: 2349 - protein, 333 aa, Gadus morhua
MVKVGINGFGRIGRLVTRAGFQSKKVEIVAINDPFIDLEYMVYMFKYDSTHGRFHGEVKIEGDKLVIDGHKISVFHERDPANIKWGDAGAQYVVESTGVFTTIEKASAHLKGGAKRVIISAPSADAPMFVMGVNHEKYENSLQVVSNASCTTNCLAPLAKVIHDNFGIVEGLMSTVHAITATQKTVDGPSGKLWRDGRGASQNIIPASTGAAKAVGKVIPELNGKITGMAFRVPTPNVSVVDLTVRLEKPAKYDDIKKVIKAASEGPMKGILGYTEDQVVSTDFNGDIRSSIFDAGAGIALNDHFVKLVTWYDNEFGYSNRVIDLMAHMSCKE

SEQ ID NO: 2350 - protein, 239 aa, Gadus morhua
CVAGDEESYEVFKDLLDPIISDRHSGYKPTDKHRTDLNFENLKGGDDLDPAYVLSSRVRTGRSIKGFTLPPHNSRGERRTIEKLSIEALATLSGEFKGKYYPLNGMTDKEQDQLINDHFLFDKPVSPLLTCAGMARDWPDARGIWHNDAKTFLVWVNEEDHLRVISMQQGGNMKEVFRRFCTGLLKIEETFKKHNHGFMWNEHLGYVLTCPSNLGTGLRGGVHVKLPKLSTHAKFEEIL

SEQ ID NO: 2351 - protein, 218 aa, Gadus morhua
LVIWIYHIFYQMMTNHKPEIIEMTLITTNPYDFPMCSQGQITVASIDDKEELDATDAAIDILGFSHDEKLGIYKFTGAVLHHGNMKFKQKQREEQAEPDGNEEADKIAYLLGLNSADMLKALCYPRVKVGNEYVTKGQTVTQVQNSVSALAKSIYEKMFLWMVIRINEMLDTKQARQYFIGVLDIAGFEIFNFNSMEQLCINFTNGKLQQFFNHHMLI

SEQ ID NO: 2352 - protein, 132 aa, Gadus morhua
LQRIKQKLEKEKSEYKMEIDDLSSNMEAVAKAKGNLEKMCRTLEDQLSEIKAKSDENSRQLNDMNAQRARLQSENGEFSRQLEEKEALVSQLTRGKQAFTQQIEDLKRHVEEEVKAKNALAHAVQSARHDCD

SEQ ID NO: 2353 - protein, 294 aa, Gadus morhua
LMGYVVEIRVKGTAKKDEGWKRCNVAAQLVVCHFTVSSLEKKLEYEFRVSAQNQVGMSLPCNLEGAVMPREILESPDIDLDANLKQGLTVRAGCPIRLCATIRGRPPPTVTWRRMGIDNVVRKGHVDIIDTMTFLVIPDSTRDDSGKYCLTLQNAAGEKAVFVNVKVLDTPGPVVNIEATDIRQTSANLSWSPPEVDGGSEVTHYIIEKRAIDRKTWAVVKGEVEIDKIPFKVGGLTTGTDYYFRVTAVNQYGPGVPKVSSTSYLASDPTSKPDPCEKIEVLEITKNSATVGWV

SEQ ID NO: 2354 - protein, 171 aa, Gadus morhua
MSDKKMTSSRRHHLKSLILSIAAGWLAQEKKDDIAAKEAHMAENCPAPNLSGDQAALSETCKKIAAHLDRLDEERYDAAAKVGKADIEIEDLKMQVVDLAGVKKPALKKVRMSADAMLKALTGLQTHSNMDLRASLKQVKKEVKEEPAEAAGDWRKNIEDKADRKKMFETT

SEQ ID NO: 2355 - protein, 109 aa, Gadus morhua
MAFAGILADADCAAAVKACEAAESFSYKAFFAKCGLSGKSADDIKKAFFVIDQDKSGFIEEDELKLFLQVFKAGARALTDAETKAFLKAGDSDGDGAIGVEEWAVLVKA

SEQ ID NO: 2356 - protein, 237 aa, Gadus morhua
TVSPPSNSSGYIMTKDESITPEIEWYAHQASTLRAGENIKLSCRITGRPIPQVTWYKDGKEIDKRTMIDMEIATNIGSSSLFVRDTDRNHRGIYTVEAKNSSGAKRADVNVRVQDTPGPVEGPIRFTGITAEKCTVWWNPPENDGCAGITHYVVEKRETSRISWATVTSKCEACSFNAANLIKGNEYQFRISAVNKYGVGKPLDSNPIVAQMQYTVPEAPGTPDSTHLTGDSITLCW

SEQ ID NO: 2357 - protein, 461 aa, Gadus morhua
MGKEKTHINIVVIGHVDSGKSTTTGHLIYKCGGIDKRTIEKFEKEAAEMGKGSFKYAWVLDKLKAERERGITIDIALWKFESGKYYVTIIDAPGHRDFIKNMVTGTSQADCAVLIVAGGVGEFEAGISSNGQTREHALLAFTLGVKQLIVGINKMDNTEPPYSQSRYEEITKEVSQYIKKIGYNPAAVPFVPISGWHGDNMLEASSKMAWFKGWKVERKDGNASGTTLLEALDAILPPSRPTDKALRLPLQDVYKIGGIGTVPVGRVETGILKPNMVVTFAPANVTTEVKSVEMHHESLTEALPGDNVGFNVKNVSIKDIRRGNVAGDSKNDPPMQADSFNAQVIILNHPGTISQGYAPVLDCHTAHIACKFNELKEKIDRRSGKKIEDLPKSVKSGDAAIVNMIPSKPMCVESFQSYPPLGRFAVRDMRQTVAVGVIKSVDKKIGGSAKVTKSAKVATKK

SEQ ID NO: 2358 - protein, 141 aa, Gadus morhua
GTRLHQTNTMKFAALALALLLAVGSHAAAMQSDAPSQLAHIRSAVGMYLDQVKDSAARSLDHLDGTEYESYKAQLATSLDSLQASIKTAQAGAEPYTDAAVAQVMEATTEVRASIMADIETLRTGPGPKREALKKVVDGHI

SEQ ID NO: 2359 - protein, 642 aa, Gadus morhua
GIKEADATECILAIKAGEADAITLDGGEIYTAGQHPYDLQPIISEKYGSGSSCYYAVAVVKKDTGFSFKQLRGKKSCHTGIGKTAGWNIPIGTLLTTGQLVWSGQEDLPVESVSTFFSKSCVPGAGGLVGGKLCTLCPSDCSKSATNPYFGYAGAFKCLKDDAGDVAFINHLTVPASEKANYELLCLDGTRAPIDSYKTCNLARVPAHAVVSRVDPELAERIFTALTTVTGFSFFSSAGFGAANLMFKDTTQSLVRLPDGSNSFLYLGAKYMASIQSLKKESDQPITPAIKWCAVGHAEKKKCDSWSSFSVSDGVKSVACQISLTVEGCFQRIMRQEADAMSVDGGQVYTAGKCQLIPAMVEQYNQSLCSSAGTPQATYFAVAVVKKGSGVTWDNLRGKRSCHTGLGRTAGWNIPMGLVHSIHGSCDFGGFFPSGCAPGSEPSSTFCRQCAGSGSGVEDGSKCSASSVEKYYGYAGAFRCLVDGAGDVAFIKHTIVADNSDGQGPAWATALKSSDYQLICPGGVGRAEISDFASCNLAAVPSHAVVTRQDIRDDVVKMLLDQQRKFGIDGSDPLFRIYESKDGNNLLFKDSTKCLKEIPSLTTADAFLGTGYVNAIMSLRQCPETASELEKTCISSSCSTAE

SEQ ID NO: 2360 - protein, 138 aa, Palmaria palmata
MRLTQGAFSFLPDLTDDQISKQVSYAMGKGWSVNIEYTDDPHPRNSYWELWGLPLFDIPDAPTVMYEISSCRKAHPGVYIKVNAFDNTRGVESCSLSFIINRPASEPGFGLLRTEDIGRNQKYAIHSYATEKPEGSRY

SEQ ID NO: 2361 - protein, 177 aa, Palmaria palmata
MLDAFSRVVVNSDAKAAYVGGSDLQALKKFITDGNKRLDSVSFVVSNASCIVSDAVSGMICENPGLIAPGGNCYTNRRMAACLRDGEIILRYASYALLAGDPSVLEDRCLNGLKETYIALGVPTNSSVRAVSIMKASATAFVSGTASDRKMACPDGDCSALASELGSYCDRVAAAIS

SEQ ID NO: 2362 - protein, 164 aa, Palmaria palmata
MKSVMTTTISAADAAGRFPSSSDLESVQGNIQRAAARLEAAEKLASNHEAVVKEGGDACFAKYSYLKNPGEAGDSQEKVNKCYRDVDHYMRLVNYSLVVGGTGPLDEWAIAGAREVYRTLNLPSASYVAAFAFTRDRLCVPRDMSAQAGGEYVAALDYIVNALT

SEQ ID NO: 2363 - protein, 172 aa, Palmaria palmata
MLDAFAKVVAQADARGEFLSNTQLDALSTMVNEGKKRLDVVNKINANASAIVTNSARALFAEQPQLVQPGGNAYTSRRMAACLRDMEIVLRYVSYSMVAGDSSVLDDRCLNGLRETYQALGTPGTSVAVAIQKMKEASVALANDLNNVPLGDCSALTAELGSYFDRAAIAVV

SEQ ID NO: 2364 - protein, 488 aa, Palmaria palmata
MSQSVEQRTRIKNERYESGVIPYAKMGYWDPEHVILETDVLALFRVTPQPGVDPIEASAAIAGESSTATWTVVWTDLLTACDLYRAKCYKVDAVPNTSDQYFAYIAYDIDLFEEGSIANLTASIIGNVFGFKAVKALRLEDMRLPVAYLKTFQGPATGTVVERERMDKFGRPFLGATVKPKLGLSGKNYGRVVYEGLKGGLDFLKDDENINSQPFMRYSERYLYSMEGVNRAQAAAGEIKGHYLNVTAATMENMYERAEFAQQLGSVICMIDLVIGYSAIQSMAIWARKTDMILHLHRAGNSTYSRQKIHGMNFRVICKWMRMAGVDHIHAGTVVGKLEGDPVMIQGFYNTLLESHLEANLPQGIFFEQDWASLRKCTPVASGGIHCGQMHQLLDYLGDDVVLQFGGGTIGHPDGIQAGATANRVALESMVIARNEGRDFVAEGPQILRDAAKTCGPLQTALDLWKDISFNYTSTDTADFVETPTANV

SEQ ID NO: 2365 - protein, 162 aa, Palmaria palmata
MKTPITEAIASADSQGRFLSNAELQSINGRYERASSSLEAAASLTNSAQRLITGAAQAVYTKFPFTTQMPGPTYASSAIGKAKCARDIGYYLRMTTYCLVVGATGPMDEYLVAGLEEINRSFELSPSWYIEALQYIKSSHGLSGQVGNEANTYVDYAINTLS

SEQ ID NO: 2366 - protein, 360 aa, Palmaria palmata
MTATLERRESASLWERFCTWITSTENRLYIGWFGVVMIPTLLTATSVFIIAFVAAPPVDIDGIREPVAGSLLYGNNIISGAIIPSSAAIGIHFYPIWEAASLDEWLYNGGPYQLIVLHFLLGVCCYIGREWELSYRLGMRPWISVAFTAPVAAAAAVFLVYPIGQGSFSDGMPLGISGTFNFMLVFQAEHNILMHPFHQLGVAGVFGGSLFSAMHGSLVTSSLIRETTENESANYGYKFGQEEETYNIVAAHGYFGRLIFQYASFNNSRALHFFLGAWPVVGIWLTSMSVSTMALNLNGFNFNQSVVDSQGRVINTWADILNRANLGMEVMHERNAHNFPLDLASGDSCPVALVAPSING

SEQ ID NO: 2367 - protein, 422 aa, Palmaria palmata
WFKNNESRLNHHLSGLFGLSSLAWTGHLVHVAIPESRGQHVGWDNFTTTLPHPSGLQPFFTGNWSVYANSPDTVNHLFGTDSGAGTAILTFLGGFHPQSQSLWLTDMAHHHLAIAVLFIVAGHMYKTNWGIGHNLKDILEAHRPPSGRLGAGHKGLFETITNSLHMQLGLALASLGVITSLVAQHMYAMPPYAFMAKDFTTQAALYTHHQYIAGFLMVGAFAHGAIFFVRDYDPQQNEGNVLARMLEHKEAIISHLSWVSLFLGFHTLGLYIHNDTVIAFGNPEKQILIEPVFAQWIQASSGKALYGFNVLLSSSSSAATEAGSGVWLPGWLEAINSGKNSLFLTIGPGDFLVHHAIALGLHTTTLILVKGALDARGSKLMPDKKDFGYSFPCDGPGRGGTCDISAWDAFYLSVFWMLNTIG

SEQ ID NO: 2368 - protein, 496 aa, Palmaria palmata
IFSAHFGQLSIIFLWLSGMYFHGARFSNYVAWLNNPTTIKPSAQVVWPIVGQEILNGDVGGGFQGVQVTSGWFQMWRASGITTEYQLYATAIGGLVMSALMIFAGWFHYHKSAPKLEWFQNVESMMNHHLAGLLGLGCLGWAGHQIHISLPINKLLDSGISPQELPLPHEFLLNKELMVQLYPSFSKGILPFFTLDWNAYSDFLTFKGGLNPVTGGLWLTDTAHHHLALAVLFLVAGHMYRTNWGIGHSMKEILEAHKGPFTGEGHKGLYEILTTSWHAQLAINLAMIGSLSIIVAHHMYAMPPYPFIATDYPTQLSLFTHHMWIGGFCIVGAGAHASIFMVRDYNPAQNYNNLLDRVIRHRDAIISHLNWVCIFLGFHSFGLYIHNDTMRALGRSQDMFSDTAIQLQPIFAQWVQNIHTLAPGNTAPNALTTASYAFGGDVVAVGNKVAMMPISLGTADFMVHHIHAFTIHVSVLILVKGFLFARNSRLIPDKSS

SEQ ID NO: 2369 - protein, 189 aa, Actinidia deliciosa
ISSCNGPCRDLNDCDGQLICIKGKCNDDPQVGTHICRGTTHSHQPGGCKPSGTLTCRGKSYPTYDCSPPVTSSTPAKLTNNDFSEGGDDGGPSECDESYHNNNERIVALSTGWYNGGSRCGKMIRITASNGKSVSAKVVDECDSRHGCDKEHAGQPPCRNNIVDGSNAVWSALGLDKNVGVVDITWSMA

SEQ ID NO: 2370 - protein, 225 aa, Actinidia deliciosa
MSTFKSLSLSALLFIAFLFTCARGATFNIINNCPFTVWAAAVPGGGKRLDRGQNWIINPGAGTKGARVWPRTGCNFDGAGRGKCQTGDCNGLLQCQAFGQPPNTLAEYALNQFNNLDFFDISLVDGFNVAMEFSPTSGGCTRGIKCTADINGQCPNELRAPGGCNNPCTVFKTDQYCCNSGNCGLTNFSKFFKDRCPDAYSYPKDDQTSTFTCPAGTNYKVVFCP

SEQ ID NO: 2371 - protein, 380 aa, Actinidia deliciosa
MGLPKSFVSMSLLFFSTLLILSLAFNAKNLTQRTNDEVKAMYESWLIKYGKSYNSLGEWERRFEIFKETLRFIDEHNADTNRSYKVGLNQFADLTDEEFRSTYLGFTSGSNKTKVSNRYEPRVGQVLPSYVDWRSAGAVVDIKSQGECGGCWAFSAIATVEGINKIVTGVLISLSEQELIDCGRTQNTRGCNGGYITDGFQFIINNGGINTEENYPYTAQDGECNLDLQNEKYVTIDTYENVPYNNEWALQTAVTYQPVSVALDAAGDAFKHYSSGIFTGPCGTAIDHAVTIVGYGTEGGIDYWIVKNSWDTTWGEEGYMRILRNVGGAGTCGIATMPSYPVKYNNQNHPKPYSSLINPPAFSMSKDGPVGVDDGQRYSA

SEQ ID NO: 2372 - protein, 116 aa, Actinidia deliciosa
MVPKPLSLLLFLLLALSAAVVGGRKLVAAGGWRPIESLNSAEVQDVAQFAVSEHNKQANDELQYQSVVRGYTQVVAGTNYRLVIAAKDGAVVGNYEAVVWDKPWMHFRNLTSFRKV

SEQ ID NO: 2373 - protein, 150 aa, Actinidia deliciosa
MDLSGKMVKQVEILSDGIVFYEIFRYRLYLISEMSPVNIQGVDLLEGNWGTVGSVIFFKYTIDGKEKTAKDIVEAIDEETKSVTFKIVEGDLMELYKTFIIIVQVDTKGEHNSVTWTFHYEKLKEDVEEPNTLMNFCIEITKDIETYHLK

SEQ ID NO: 2374 - protein, 321 aa, Actinidia deliciosa
TAVTDIVPDVVVAKDGSGNFTTVGAAVAAAKDSSTARFVIYIKEGAYFEYVDVDKKKTNLMFIGDGIGKTWIKGNRSVVDGWTTFRSSTVAVVGTGFIARGISFENYAGPSKHQAVALRSGADFSAFYQCSFVGYQDTLYVHSLRQFYSECDVYGTIDFIFGNAAAVLQKCNLYARKPNENQKNIFTAQGRDDPNQNTGISILNCKVAAAADLIPVLSSFKTYLGRPWKEYSRTVFLLSQMESLIDPAGWLEWSGDFALTTLYYREYKNTGPGSNTTARVTWPGYAVTTNETEVIQFTVGNFIQGSQWLTSYNIPVYLNLT

SEQ ID NO: 2375 - protein, 378 aa, Actinidia deliciosa
MGSPKSIISKSLLFFSTLLILSSAIDIENSVQRTNDQVMAMYESWLVEHGKSYNSLDEKEMRFEIFKENLRIIDDHNADANRSYSLGLNRFADLTDEEYRSTYLGLKRGPKTDVSNQYMPKVGDALPDYVDWRTVGAVVGVKNQGLCSSCWAFSAVAAVEGINKIVTGNLISLSEQELVDCGRTQITKGCNRGLMTDAFKFIINNGGINTENNYPYTAKDGQCNLSLKNQKYVTIDSYKNVPSNNEMALKKAVAYQPVSVGVESEGGKFKLYTSGIFTGSCGTAVDHGVTIVGYGTERGMDYWIVKNSWGTNWGESGYIRIQRNIGGAGKCGIAKMPSYPVKYTSNPLKPYPYVTNPHTLSMSKDNPLGVNDGQRSSA

SEQ ID NO: 2376 - protein, 317 aa, Actinidia deliciosa
MSITLSRPSLSRPSLSRHPSLTLHSSLSHAPPHHRPVAFLRHPTLRYHHHGRLLSVASAILQDTAIRQDTYIWTPVPISRVLPAAAESLFKVIVDLSRSPDLVYNFVSPGQYVQIRIPEAIVNPPPRPAYFYIASPPSLVKKNLEFEFLIRSVPGTTSEVLCSLKEGDVVDLTQIIGRGFDIEQILPPEDYPTVLISVTGYGMSAGRSFIEEGFGANKRSDVRLYYGAENLETMGYQERFKDWEASGVRVIPVLSRPPPNWNGAVGYVQDVYLKDKPIADPRTTGAVLIGNPNMVEETRGILVAQGVSREKILVTQD

SEQ ID NO: 2377 - protein, 479 aa, Chenopodium quinoa
MAKSTTTLFLLSCSIALVLLNGCMGQGRMREMQGNECQIDRLTALEPTHRIQAEGGLTEVWDTQDQQFQCSGVSVIRRTIEPNGLLLPSFTSGPELIYIEQGNGISGLMIPGCPETFESMSQESWREGMERGMRGGRFQDQHQKIRHLRQGHIFAMPAGVAHWAYNSGNEPLVAVILIDTSNHANQLDKDYPKRFYLAGKPQQEHSRHHHRGGESQRGEHGSDGNVFSGLDTKSVAQSFGVSEDIAEKLQAKQDERGNIVLVQEGLHVIKPPSSRSYDDEREQRHRSPRSNGLEETICSARLSENIDDPSKADVYSPEAGRLTTLNSFNLPILSNLRLSAEKGVLYRNAIMAPHYNLNAHSIIYGVRGRGRIQIVNAQGNSVFDDELRQGQLVVVPQNFAVVKQAGEEGFEWIAFKTCENALFQTLAGRTSAIRAMPVEVISNIYQISREQAYRLKFSRSETTLFRPENQGRQRREMAA

SEQ ID NO: 2378 - protein, 480 aa, Chenopodium quinoa
MAKSTTTLFLLSCSIALVLLNGCMGQGRMREMQGNECQIDRLTALEPTNRIQAEGGLTEVWDTQDQQFQCSGVSVIRRTIEPNGLLLPSFTSGPELIYIEQGNGISGLMIPGCPETFESMSQELWREGMERGMRGGRFQDQHQKIRHLRQGHIFAMPAGVAHWAYNTGNEPLVAVILIDTSNHANQLDKDYPKRFYLAGKPQQEHSRHQHRGGESQRGERGSGGNVFSGLGTKTIAQSFGVSEDIAEKLQAEQDERGNIVLVQEGLHVIKPPSSRSYDDEREQRRHRSPRSNGLEETICSARLSENIDEPSKADVYSPEAGRLTTLNSFNLPILSNLRLSAEKGVLYRNAIMAPHYNLNAHSIIYGVRGRGRIQIVNAQGNSVFDDELRQGQLVVVPQNFAVVKQAGEEGFEWIAFKTCENALFQTLAGRTSAIRAMPLEVISNIYQISREQAYRLKFSRSETTLFRPENQGRQRRDLAA

SEQ ID NO: 2379 - protein, 198 aa, Thunnus thynnus
MAPKKDAKAPAKKAEPAKKAEPAPAPAPAPEPAPAPAAPAAVDLSAVKVEFSADQIEDYKEAFGLFDRVGDNKVAYNQIADIMRALGQNPTNKDVAKLLGMPSAEDMTNKRVEFEGFLPMLQTIINSPNKAGYEDYVEGLRVFDKEGNGTVMGAELRIVLSTLGEKMTEAEIDALMQGQEDESGCVNYEAFVKHIMSV

SEQ ID NO: 2380 - protein, 170 aa, Thunnus thynnus
MAPKKAKRRAAAGEGGSSNVFSMFEQSQIQEYKEAFTIIDQNRDGIISKDDLRDVLASMGQLNVKNEELEAMIKEASGPINFTVFLTMFGEKLKGADPEDVILSAFKVLDPDATGTIKKEFLEELLTTQCDRFTPEEIKNMWAAFPPDVAGNVDYKNICYVITHGEEKEE

SEQ ID NO: 2381 - protein, 284 aa, Thunnus thynnus
MDAIKKKMQMLKLDKENALDRAEQAESDKKASEERSKQLEDDLVGLQKKLKGTEDELDKYSEALKDAQEKLELAEKKATDAEGEVASLNRRIQLVEEELDRAQERLATALTKLEEAEKAADESERGMKVIENRAMKDEEKMELQEIQLKEAKHIAEEADRKYEEVARKLVIIEGDLERTEERAELSEGKCSELEEELKTVTNNLKSLEAQAEKYSQKEDKYEEEIKVLTDKLKEAETRAEFAERSVAKLEKTIDDLEDELYAQKLKYKAISEELDHALNDMTSI

SEQ ID NO: 2382 - protein, 270 aa, Thunnus thynnus
  MOD_RES (270)..(270): Any amino acid
LWKFETSKYYVTIIDAPGHRDFIKNMITGTSQADCAVLIVAAGVGEFEAGISKNGQTREHALLAFTLGVKQLIVGVNKMDSTEPPYSQARFEEITKEVSTYIKKIGYNPATVAFVPISGWHGDNMLEGSSKMSWFKGWKIERKEGNASGTTLLEALDAIVPPSRPTDKPLRLPLQDVYKIGGIGTVPVGRVETGLLKPGMVVTFAPPNLTTEVKSVEMHHESLPEAVPGDNVGFNVKNVSVKEIRRGYVAGDSKNDPPKAADSFNAQGHX

SEQ ID NO: 2383 - protein, 145 aa, Odocoileus virginianus; identical to SEQ ID NO: 571

SEQ ID NO: 2384 - protein, 1638 aa, Meleagris gallopavo
MASSDAEMAVFGEAAPYLRKSEKRIEAQNKPFDAKSSVFVAHPKESFVKGTIIQSKESGKVTVKTEGGETLTVKEDQIFSMNPPKYDKIEDMAMMTHLHEPAVLYNLKERYAAWMIYTYSGLFCVTVNPYKWLPVYNPEVVLAYRGKKRQEAPPHIFSISDNAYQFMLTDRENQSILITGESGAGKTVNTKRVIQYFATIAASGDKKKEEQSGKMQGTLEDQIISANPLLEAFGNAKTVRNDNSSRFSKGKFIRIHFGATGKLASADIETYLLEKSRVTFQLKAERSYHIFYQIMSNKKPELIDMLLITTNPYDYHFVSQGEITVPSINDQEELMATDNVLSIVISPRQIFYFTFSVVECHFSCYLVADKAAYLMGLNSADLLKALCYPRVKVGNEYVTKGQTVQQVNNSVGALAKAVYEKMFLWMVVRINQQLDTKQPRQYFIGVLDIAGFEIFDFNSLEQLCINFTNEKLQQFFNHHMFVLEQEEYKKEGIEWEFIDFGMDLAACIELIEKPMGIFSILEEECMFPKATDTSFKNKLYDQHLGKSSNFQKPKASVIKKIESYFSLFVLRRLYCFCLYYGEFRVSLETFSKKVFNLFKNRIKLIFTQIGRTQNNFISLCGSEKLYNSFHWINSTIAENLNKLMTNLRSTHPHFVRCIIPNETKTPGAMEHELVLHQLRCNGVLEGIRICRKGFPSRVLYADFKQRYKVLNASAIPEGQFIDSKKASEKLLSSIDVDHTQYKFGHTKVFFKAGLLGLLEEMRDEKLAQLITRTQARCRGFLMRVEYQRMVERRGVSHLHLKALYFGESPSDHISQNNQMYILIMLQRVHRAKAEKHRADLSRELEEISERLEEAGGATAAQIDMNKKREAEFQKMRRDLEEATLQHEATAAALRKKHADSTAELGEQIDNLQRVKQKLEKEKSELKMEIDDLASNMESVSKAKANLEKMCRTLEDQLSEIKTKEEEHQRMINDLNTQRARLQTEAGEYSRQVEEKDALISQLSRGKQAFTQQIEELKRHLEEEIKAKNALAHALQSARHDCDLLREQYEEEQEAKGELQRALSKANSEVAQWRTKYETDAIQRTEELEEAKKKLAQRLQDAEEHVEAVNAKCASLEKTKQRLQNEVEDLMIDVERANAACAALDKKQKNFDKILAEWKQKYEETQAELEASQKESRSLSTELFKMKNAYEESLDHLETLKRENKNLQQEISDLTEQIAEGGKAIHELEKVKKQIEQEKSEIQAALEEAEASLEHEEGKILRLQLELNQVKSEIDRKIAEKDEEIDQLKRNHLRIVESLQSSLDAEIRSRNEALRLKKKMEGDLNEMEIQLSHANRVAAEAQKNLRNTQTVLKDTQIHLDDALRSQEDLKEQVAMVERRANLLQAEIEELRAALEQTERSRKVAEQELLDASERVQLLHTQNTSLINTKKKLETDIAQIQSEMEDTIQEARNAEEKAKKAITDAAMMAEELKKEQDTSAHLERMKKNLDQTVKDLQHRLDEAEQLALKGGKKQIQKLEARVRELEGEVDAEQKRSAEAVKGVRKYERRVKELDLPVSEEDRKNILRLQDLVDKLQMKVKSYKRQAEEAEELSNVNLSKFRKIQHELEEAEERADIAESQVNKLRVKSREFHSKKIEGEE

SEQ ID NO: 2385 - protein, 1518 aa, Meleagris gallopavo
AVGALAKAVYERMFLWMVLRINQQLDTKQPRQYFIGVLDIAGFEIFDFNSFEQLCINFTNEKLQQFFNHHMFVLEQEEYKKEGIEWTFIDFGMDLAACIELIEKPMGIFSILEEECMFPKATDTSFKNKLYDQHLGKSSNFQKPKPTKGKVEAHFSLIHYAGTVDYNITGFSQDNVFKWNNVIQETFKKYLKKMLRLFFWKHALEIRPLIIDDNNLQKLTQSYLYISPGTYNENLNKLMTNLRSTHPHFVRCIIPNETKTPGAMEHELVLHQLRCNGVLEGIRICRKGFPNRVLYADFKQRYKVLNASAIPEGQFIDSKKACEKLLGSIDIDHTQYKFGHTKVFFKAGLVGLLEEMRDEKLAQLITRTQARCRGFLMRVEYQKMVERRESIFCIQYNIRAFMNVKHWPWMKLFFKIKPLLKSAESEKEMANMKQEFEKTKEELAKSEAKRKELEEKMVKLVQEKNDLQLQVQAEADALADAEERCDQLIKTKIQLEAKVKEVTERAEDEEEINAELTAKKRKLEDECSELKKDIDDLELTLAKVEKEKHATENKVKNLTEEMAALDETIVKLTKEKKALQEAHQQTLDDLQAEEDKVNTLTKAKTKLEQQVDDVRTKAQGYYGTVVEINMAGRALYNQEKCIQKEVLSFSSFPQMQNHTSKGREFQAEGISWRSQLGLPAGHEQEGAAEIRKEGLERLEEEGLRKISPPTDSQVRKYLQKLSRDKSKAAFGLQSAMGNDSLRDGKASRQSPVRNWRTVLQKVEAHSAVAIRSLHVFTLTENVGEPVDSSAKETKKINPFEMETRPVATFHVTATVQEVMFRAAQTKQATRLMLLLQNAEIMKKGLNEVTSRKLEMARQNTVYSEDLSENGDMASSSCRPLPCQGQVLTWLPHTWAEEFACKHDLICSASSKRTTREYAIKNPNKITIKKTKSNKTKTKQNKKPPQQPYQFLLSSDLVQRIVPMQQGNSDRRMKLASSSEVIQGICLKATMQKKTAQERQNTLDKLFIDIFTYSLPDNALPKKFCQKCFDRRKGEHLQLLQTRHYKISQGQVWPVSTEGFKTLCCIKKQLPFLFHRIDHFPLQKKDLKKEISDLTEQIAEGGKAIHELEKVKKHVEQEKSELQASLEEAEASLEHEEGKILRLQLELNQIKSEIDRKIAEKDEEIDQLKRNHLRIVESMQSTLDSEIRSRNEALRLKKKMEGDLNEMEIQLSHANRMAAEAQKNLRNTQGTLKDTQIHLDDALRTQEDLKEQVAMVERRANLLQAEVEELRAALEQTERSRKVAEQELLDATERVQLLHTQNTSLINTKKKLETDIVQIHSEMEDTIQEARNAEEKAKKAITDAAMMAEELKKEQDTSAHLERMKKNLDQTVKDLQHRLDEAEQLALKGGKKQIQKLEARVRRCGAGREVDAEQKRSAEAVKGVRKYERRVKELTYQTEEDRKNILRLQDLVDKLQMKVKSYKRQAEEAEELSNVNLSKFRKIQHELEEAEERADIAESQVNKLRAKSREFHGKKIEEE

SEQ ID NO: 2386 - protein, 819 aa, Meleagris gallopavo
DAEMAVFGEAAPYLRKSEKRIEAQNKPFDAKSSVFVAHPKESFVKGTIQSKESGKVTVKTEGGETLTVKEDQIFSMNPPKYDKIEDMAMMTHLHEPAVLYNLKERYAAWMIYTYSGLFCVTVNPYKWLPVYNPEVVLAYRGKKRQEAPPHIFSISDNAYQFMLTDRENQSILITGESGAGKTVNTKRVIQYFATIAASGDKKKEEQSGKMQGTLEDQIISANPLLEAFGNAKTVRNDNSSRFGKFIRIHFGATGKLASADIETYLLEKSRVTFQLKAERSYHIFYQIMSNKKPELIDMLLITTNPYDYHYVSQGEISVPSIDDQEELMATDSAIDILGFTADEKTAIYKLTGAVMHYGNLKFKQKQREEQAEPDGTEVADKAAYLMGLNSAELLKALCYPRVKVGNEFVTKGQTVSQVHNSVGALAKAVYEKMFLWMVIRINQQLDTKQPRQYFIGVLDIAGFEIFDFNSFEQLCINFTNEKLQQFFNHHMFVLEQEEYKKEGIEWEFIDFGMDLAACIELIEKPMGIFSILEEECMFPKATDTSFKNKLYDQHLGKSNNFQKPKPAKGKAEAHFSLHYAGTVDYNISGWLEKNKDPLNETVIGLYQKSSVKTLALLFATYGGEAEGGGKKGGKKKGSSFQTVSALFRENLNKLMANLRSTHPHFVRCIIPNETKTPGAMEHELVLHQLRCNGVLEGIRICRKGFPSRVLYADFKQRYRVLNASAIPEGQFMDSKKASEKLLGSIDVDHTQYRFGHTKVFFKAGLLGLLEEMRDDKLAEIITRTQARCRGFLMRVEYRRMVERRESIFCIQYNVRSFMN

SEQ ID NO: 2387 - protein, 452 aa, Meleagris gallopavo
MKNAYEESLDHLETLKRENKNLQQEISDLTEQIAEGGKAIHELEKVKKQIEQEKSEIQAALEEAEASLEHEEGKILRLQLELNQVKSEIDRKIAEKDEEIDQLKRNHLRIVESLQSSLDAEIRSRNEALRLKKKMEGDLNEMEIQLSHANRVAAEAQKNLRNTQTVLKDTQIHLDDALRSQEDLKEQVAMVERRANLLQAEIEELRAALEQTERSRKVAEQELLDASERVQLLHTQNTSLINTKKKLETDIAQIQSEMEDTIQEARNAEEKAKKAITDAAMMAEELKKEQDTSAHLERMKKNLDQTVKDLQHRLDEAEQLALKGGKKQIQKLEARVRELEGEVDAEQKRSAEAVKGVRKYERRVKELTYQSEEDRKNILRLQDLVDKLQMKVKSYKRQAEEAEELSNVNLSKFRKIQHELEEAEERADIAESQVNKLRAKSREFHRRIEEEE

SEQ ID NO: 2388 - protein, 1729 aa, Meleagris gallopavo
GTLEDQIISANPLLEAFGNAKTVRNDNSSRFGKFIRIHFGTTGKLASADIETYLLEKSRVTFQLASERSYHIFYQIMSNKKPELIDLLLITTNPYDFTYVSQGEITVASIDDSEELLATDNAVDILGFSPDEKVGMYKLTGAVMHYGNMKFKQKQREEQAEPDGTEVADKAAYLMGLNSAELLKALCYPRVKVGNEYVTKGQNVQQVYNSVGALAKSVYEKMFLWMVTRINQQLDTKQPRQHFIGVLDIAGFEIFDFNSLEQLCINFTNEKLQQFFNHHMFVLEQEEYKKEGIDWEFIDFGMDLAACIELIEKPMGIFSILEEECMFPKATDTSFKNKLYDQHLGKSNNFQAPGPGGQAADEDHFSELSYNNTDSHLALNALNKNKQPLRNETVVGLYQKSSLKLLSFLFSNYAGAETSDSGSGKKGGKKKGGSFQTVSAVFRENLNKLMTNLRSTHPHFVRCLIPNETKTPGEMDHYLVMHQLRCNGVLEGIRICRKGFPSRILYADFKQRYKILNASAIPEGQFIDKKKIGKKLFGKVDINAALYCYCHTKVFFKAGLLGLLEEMRDEKLVSLITHMQAMCRGYLMRTEFKKMNARREDMLCETGTVKAALNKILWHSIKIQSNLKSALKTPDTAVRNSKLEGDLKLAHDSIMDLENDKQQLDEKLKNQIQSKIDLHLQVQSESENLADAEERCEGLIKSKIQLEARIKELNERMEDEEEMNAELTAKKRKLEDECSELKKDIDDLELTLAKVEKEKHATENKVKNLTEEMAALDENISKLTKEKKALQEAHQQTLEYLQAEEDKVSILTKIKTKLEQQVDDLEGSLEQERKQRMDLERAKRKLDGDLKMSQDSIMDLKNDKQQTDERLKKKDFEISHLQSKIEDEQAQSSQLQKKIKELQARTEELEEEIEAERANCAKTEKQRADLSRELEEISERLEEAGGATAAQIEMNKKREAEFQKMRRDLEEATLQHEATAAALRKKHADSTAELGEQIDNLQRVKQKLEKEKSELKMGPSVSPASFETLMSVSKAKSNLEKMCRALEDQYSEVRTKDDEHMRLINDMNTQKTRLQTENGELTRQLEEKESLISQLTRGKQAITQQTEELKRQLEEENKAKNALAHGLQSARHDCDLLREQYEEELEAKGELQRALSKANSEVAQWRTKYETDAIQCMEELEDAKKKLAQRLQDSEEQIEAVNSKCASLEKTKQRLQGEVDDLMIAVERSNAACAAFDKKQKNFDKVMAEWKQKYQESQAELEAAQKESRTLSTEIFRMKNAYEEVLDQVETVRRENKNLQQEISDLTEQLAEAGKANHGLEKAKKQTEQEKYDLQAALEEAEVSLEHEEGKILRVQLELNQVKSGVDRRSAEKDEEIQQLKKNHQRVLESMQTMLDAEIRSRNDALRLKKKMEGDLNDMEIQLSRANCQIAEIQKHLKGMQGQLKDSQLHLDDALRENDDLKEQLAVVERRNNLMMTELEQMRAALEQTERARKVSEQELTDTSERVQILHSQNTSLLNTKKKLEVDITHLQNEVEDSIQEASNAEEKAKKAITDAAMMAEELKKEQDTSAHLERMKRNLEQMVKDLQHRLDEAEQLTLKGGKKQLQKLEARIHELENELDIEQKRGTESLKGARKYERRLKELTYQSEEDKKNILRLQNLVDKLQLKVKAYKKQAEEAEEQASTNLSRCRKTQHELEEAEERADIAECQVNKLRAKSRDTGRQVSWSA

SEQ ID NO: 2389 - protein, 377 aa, Meleagris gallopavo
MCDDEETTALVCDNGSGLVKAGFAGDDAPRAVFPSIVGRPRHQGVMVGMGQKDSYVGDEAQSKRGILTLKYPIEHGIITNWDDMEKIWHHTFYNELRVAPEEHPTLLTEAPLNPKANREKMTQIMFETFNVPAMYVAIQAVLSLYASGRTTGIVLDSGDGVTHNVPIYEGYALPHAIMRLDLAGRDLTDYLMKILTERGYSFVTTAEREIVRDIKEKLCYVALDFENEMATAASSSSLEKSYELPDGQVITIGNERFRCPETLFQPSFIGMESAGIHETTYNSIMKCDIDIRKDLYANNVLSGGTTMYPGIADRMQKEITALAPSTMKIKIIAPPERKYSVWIGGSILASLSTFQQMWISKQEYDEAGPSIVHRKCF

SEQ ID NO: 2390 - protein, 1946 aa, Meleagris gallopavo
MMDMTEFGEAAPFLRKSEKELMMLQTVAFDGIREKKCWVPDEKKAYVEAEITESSGGKVTVETTDGRTMTIKEDDVQSMNPPKFDMIEDMAMLTHLNEASVLYNLRKRYSNWMIYTYSGLFCVTINPYKWLPVYKSEVVAAYKGKRRSEAPPHIFSIADNAYHDMLRTTDRENQSMLITGESGAGKTVNTKRVIQYFATVAALGEPGKKSQPATKTGGTLEDQIIQANPALEAFGNAKTLRNDNSSRFGKFIRIHFGTTGKLSSADIEIYLLEKSRVIFQQPGERDYHIFYQILSGKKPELLDMLLVSTNPYDYHFCSQGVVTVDNLDDGEELMATDQAMDILGFVQDEKSGAYKLTGAIMHFGNMKFKQRPREEQAEADGTESADKAAYLMGINSSDLVKGLLHPRVKVGNEYVTKGQSVEQVLYAVGALSKAVYDRMFKWLVVRINKTLDTKLPRQFFIGVLDIAGFEIFDFNSFEQLCINYTNEKLQQFFNHHMFVLEQEEYKKEGIEWIFIDFGMDLQACIDLIEKPLGILSILEEECMFPKATDMTFKAKLYDNHLGKSPNFQKPRPDKKRKYEAHFELIHYAGSVPYNIIGWLEKNKDPLNETVVGIFQKSSNKLLASLFESYVGADSADQGGEKKRKKGASFQTVSSLHKENLNKLMTNLRSTAPHFVRCIIPNESKTPGAMDAFLVLHQLRCNGVLEGIRICRKGFPNRVLYADFKQRYRILNPGAIPEDKFVDSRKAAEKLLASLDIDHNQYRFGHTKVFFKAGLLGHLEEMRDERLAKILTMIQARARGRLMRIEFQKIVERRDALLVIQWNIRAFMAVKNWPWMKLFFKIKPLLKSAETEKEMANMKEEFLKLKEALEKSEARRKELEEKQVSLVQEKNDLLLQLQAAPQEQDTLADAEERCDLLIKSKIQLEAKVKELTERVEDEEEMNSELTSKKRKLEDECSELKKDIDDLEITLAKVEKEKHATENKVKNLTEEMAALDENISKLTKEKKSLQEAHQQVLDDLQAEEDKVNTLSKAKVKLEQQVDDLEGSLEQEKKVRMDLERAKRKLEGDLKLTQESVMDLENDKLQMEEKLKKKEFEMSQLNSKIEDEQAIVMQLQKKIKELQARIEELEEELEAERAARAKVEKQRSDLARELEELSERLEEAGGATAAQLEMNKKREAEFLKLRRDLEEATLHYEATAAALRKKHADSVAEMGEQLDNLQRVKQKLEKEKSELKMEVDDLTSNMEQTVKGKANAEKLCRTYEDHLNETKSKLDEMTRLMNDLTTQKAKLQSENGEFVRQLEEKESLISQLSRGKTSFTQQIEELRRQLEEETKSKNALAHALQAARHDCDLLREQYEEEQEAKAELQRALSKGNAEVAQWRTKYETDAIQRTEELEDAKKKLAARLQEAEEAIEAANAKCSSLEKTKHRLQNELEDMMIDLEKANSAAASLDKKQRGFDKIINDWKQKYEESQAELEASQKEARSLSTELFKLKNAYEETLDHLETLKRENKNLQEEISDLTNQISEGNKNLHEIEKVKKQVEQEKSEVQLALEEAEGALEHEESKTLRFQLELSQLKADFERKLAEKDEEMENIRIRRNQQRTIDSLQSTLDSEARSRNEAIRLKKKMEGDLNEMEIQLSHANRHAAEATKSARGLQTQIKELQVQLDDLGHLNEDLKEQLAVSDRRNNLLQSELDELRALLDQTERARKLAEHELLEATERVNLLHTQNTSLINQKKKLEGDISQMQNEVEESIQECRNAEEKAKKAITDAAMMAEELKKEQDTSAHLERMKKNMEQTIKDLQKRLDEAEQIALKGGKKQIQKLESRVRELENELENELRRNSDAQKGARKFERRIKELTYQSEEDKKNLARMQDLIDKLQLKVKSYKHQAEEAEAQANLYLSKYRKQQHDLDDAEERAEIAESQVNKLRSKSRDIGMKKVHEEE

SEQ ID NO: 2391 - protein, 1874 aa, Meleagris gallopavo
TLTVPEANVHPQNPPKFDRIEDMAMLTFLHEPAVLYNLKERYASWMIYTYSGLFCVTVNPYKWLPVYNAEVVAAYRGKKRTEVPPHIFSISDNAYQNMLTDRENQSILITGESGAGKTVNTKRVIQYFASIAAIGDRKKEVANSSKQGTLEDQIIQANPALEAFGNAKTVRNDNSSRFGKFIRIHFGATGKLASADIETYLLEKSRVIFQLKAERNYHIFYQILSNKKPELLEMLLITNNPYDYSYVSQGEVTVASIDDSEELLATDSAFDVLGFTAEEKAGVYKLTGAIMHFGNMKFKQKQREEQAEPDGTEDADKSAYLMGLNSADLLKGLCHPRVKVGNEYVTKGQSVQQVYYSIGALAKAVYEKMFNWMVVRINNSLETKQPRQYFIGVLDIAGFEIFDFNSFEQLCINFTNEKLQQFFNHHMFVLEQEEYKKEGIEWEFIDFGMDLQACIDLIEKPMGIMSILEEECMFPKASDMTFKAKLFDNHLGKSANFGKPRNVKGKAEAHFSLIHYAGTVDYNIIGWLEKNKDPLNETVVGLYQKSALKLLASLFSNYAGADTGKSGDSGKGKGAKKKGSSFQTVSALHRENLNKLMANLKTTHPHFVRCLIPNERKEPGVMDNPLVMHQLRCNGVLEGIRICRKGFPNRILYGDFRQRYRILNPTAIPEGQFIDSRKGAEKLLGSLDIDHNQYKFGHTKVFFKAGLLGLLEEMRDERLSLIITRIQAQARGQLMRIEFKKILERRDALLVIQWNIRAFMGVKNWPWMKLYFKIKPLLKSAETEKEMQTMKEEFGHLKEALEKSEARRKELEEKMVSMLQEKNDLQLQVQAEQDNLADAEERCDQLIKNKIQLEAKVKEMTERLEEEEEMNAELTAKKRKLEDECSELKKDIDDLELSLAKVEKEKHATENKVKNLTEEMAGLDENITKLTKEKKTLQESHQQALDDLQAEEDKVNTLAKAKVKLEQQVDDLESSLEQEKKIRMDLERAKRKLEGDLKLAQESVMDLENDKQQLEERLKKKDFELNTLNARIEDEQAIAAQLQKKLKELQARIEELEEELEAERMGRAKVEKLRSELLQELEETSERLEEAGGATSVQLELNKKREAEFQKLRRDLEEATLQHEATAAALRKKHADSVAELSEQLDNLQRVKQKLEKEKSELKLELDDVSSNTEQLIKAKANLEKMCRTMEDQMNEHRSKLEEAQRTVTDLSTQRAKLQTENSELSRQLEEKEAFINQLMRGKLTYTQQLEDLKRQLEEEAKAKNALAHALQSAQHDCDLLREQYEEEMEAKAELQRALSKANSEVAQWRTKYETDAIQRTEELEEAKKKLAQRLQEAEEAVEAVNAKCSSLEKTKHRLQNEIEDLMADVERSNAAAAALDKKQRNFDKILSEWKQKFEESQTELEASQKEARSLSTELFKLKNAYEESLEHLETFKRENKNLQEEISDLTEQLGASQKSIHELEKVRKQLDAEKLELQAALEEAEASLEHEEGKILRAQLEFNQVKADYERKLAEKDEEMEQAKRNHLRVVDSLQTSLDAETRSRNEALRLKKKMEGDLNEMEIQLSHANRTAAEAQKQVKALQGYLKDTQLQLDDAVRANEDLKENIAIVERRNNLLQSELEELRAMVEQSERARKLAEQELIEASERVQLLHSQNTSLINQKKKMEADISQLQTEVEEAIQECRNAEEKAKKAITDAAMMAEELKKEQDTSAHLERMKKNMEQTVKDLQLRLDEAEQLALKGGKKQLQKLEVRVRELENELEAEQKRNAESIKGLRKSERRVKELSYQTEEDRKNMVRLQDLVDKLQLKVKAYKRQAEEAEEQANSNLAKFRKVQHELDEAEERADMAESQVNKLRARSRDIGAKKGLNEE

SEQ ID NO: 2392 - protein, 1941 aa, Meleagris gallopavo
MLDMSEFGEAAEYLRKSYTEQLKLQTIPFDGKKRAWIPDEKEAYIEVEIKESTGGKVTVETKDKQTRVVKEDELQAMNPPKFDMIEDMAMLTHLNEASVLYNLKRRYSHWMIYTYSGLFCVTINPYKWLPVYTAPVVAAYKGKRRSEAPPHIYSIADNAYTTCCADRENQSMLITLSGESGAGKTVNTKRVIQYFAIVAALGDTPGKKLASVATKTGGTLEDQIIEANPAMEAFGNAKTIRNDNSSRFGKFIRIHFGPSGKLASADIDIYLLEKSRVIFQQPKERSYHIYYQILSGKKPELQDMLLLSLNPYDYHFCSQGVTTVDNLDDGEELMATDHAMDILGFSNDEKYGSYKIVGAIMHFGNMKFKQKQREEQAEADGTESADKAAYLMGISSADLIKGLLHPRVKVGNEYVTKGQNVEQVVYAVGALAKATYDRMFKWLVTRINKTLDTKLARQFFIGVLDIAGFEIFEFNSFEQLCINFTNEKLQQFFNHHMFVLEQEEYKKEGIEWVFIDFGLDLQACIDLIEKPLGILSILEEECMFPKASDMSFKAKLYDNHIGKSPNFQKPRPDKKRKYEAHFELVHYAGVVPYNIIGWLDKNKDPLNETVVAVFQKSQNKLLASLYENYVGSSSEEPHKPGSKEKRKKAASFQTVSQLHKENLNKLMTNLRSTQPHFVRCIIPNETKTPGAMDAFLVLHQLRCNGVLEGIRICRKGFPNRILYADFKQRYRILNPAAIPDDKFMDSRKATEKLLSSLDLDHSQYKFGHTKVFFKAGLLGLLEEMRDERLAKILTMLQARIRGHLMRIEYQKIISRREALYTIQWNIRAFNAVKNWSWMKLFFKIKPLLKSAQTEKEMSTLKEEFQKLKEALEKSEAKRKELEEKQVSMIQEKNDLALQLQAEQDNLADAEERCDLLIKSKIQLEAKVKELTERVEDEEEMNADLTAKKRKLEDECAELKKDIDDLEITLAKVEKEKHATENKVKNLIEEMAALDEIIAKLTKEKKALQEAHQQALDDLQAEEDKVNTLTKAKVKLEQQVDDLESSLEQEKKIRMDLERAKRKLEGDLKLTQESVMDLENDKQQLEEKLKKKDFEMSQLNSRIEDQQVTEAQLQKKIKELQARIEELEEELEAERAARAKVEKQRAEVSRELEELSERLEEAGGATSAQLEMNKKREVEFLKLRRDLEEATLQHESTAAALRKKHADSVAELSEQIDNLQRVKQKLEKEKSEMKMEVDDLSSNIEYLTKNKANAEKLCRTYEDQLSEAKSKVDELQRQLTDVSTQRGRLQTENGELSRLLEEKESFINQLSRGKTSFTQTIEELKRQLEEETKSKNALAHALQASRHDCDLLREQYEEEVEAKSELQRNLSKANAEVAQWRTKYETDAIQRTEELEEAKKKLAIRLQEAEEAVEAAHAKCSSLEKTKHRLQTEIEDLSVDLERANSACAALDKKQRNFDRILAEWKQKYEETQAELEASQKESRSLSTELFKLKNAYEESLDNLETLKRENKNLQEEIADLTDQISMSGKTIHELEKLKKALENEKSDIQAALEEAEGALEHEESKTLRIQLELNQIKADVDRKLAEKDEEFENLRRNHQRAMDSMQATLDAEARAKNEAVRLRKKMEGDLNEMEIQLSHANRQAAEFQKLGRQLQAQIKDLQIELDDTQRQNDDLKEQAAALERRNNLLLAEVEELRAALEQAERSRKLAEQELLEATERVNLLHSQNTGLINQKKKLETDISQLSSEVEDAVQECRNAEEKAKKAITDAAMMAEELKKEQDTSAHLERMKKNMEQTIKDLQMRLDEAEQIALKGGKKQIQKLEARVRELEGELDMEQKKMAEAQKGIRKYERRIKELSYQTEEDRKNLTRMQDLIDKLQSKVKSYKRQFEEAEQQANSNLVKYRKVQHELDDAEERADIAETQVNKLRARTKEVITFKHE

SEQ ID NO: 2393 - protein, 666 aa, Meleagris gallopavo
SGESGAGKTVNTKRVIQYFATIAASGDKKKEEQPAGKMQGTLEDQIISANPLLEAFGNAKTVRNDNSSRFGKFIRIHFGATGKLASADIETYLLEKSRYFHETSYFHTLNMLYFLFSLRKLRSMKMLMLNSISLNLNSISAVGIIFSSVFSSLEYSVFNLSSPVVTDRNCTHLLLIFTYINVSKLFFSFNKIQNNSSVKKNSDIADKAAYLMGLNSADLLKALCYPRVKVGNEFVTKGQTVQQVYNSVGALAKAVFEKMFLWMVVRINQQLDTKQPRQYFIGVLDIAGFEIFDFNSLEQLCINFTNEKLQQFFNHHMFVLEQEEYKKEGIEWEFIDFGMDLAACIELIEKPMGIFSILEEECMFPKATDTSFKNKLYDQHLGKSNNFQKPKPGKGKAEAHFSLVHYAGTVDYNISGWLDKNKDPLNETVVGLYQKSSLKTLALLFASAGGEAESGGGGKKGGKKKGSSFQTVSALFRENLNKLMTNLRSTHPHFVRCIIPNETKTPGAMEHELVLHQLRCNGVLEGIRICRKGFPSRILYADFKQRYKVLNASAIPEGQFIDSKKASEKLLSSIDVDHTQYKFGHTKVFFKAGLLGLLEEMRDEKLAQLITRTQARCRGFLMRVEYQRMVERRESIFCIQYNVRSFMNVKHWSWMKLFFKIKPLLK

SEQ ID NO: 2394 - protein, 333 aa, Meleagris gallopavo; identical to SEQ ID NO: 1653

SEQ ID NO: 2395 - protein, 399 aa, Meleagris gallopavo
  MOD_RES (1)..(1): Any amino acid
XELQAALEEAEASLEHEEGKILRVQLELNQVKSEIDRKIAEKDEEIDQLKRNHLRIVESMQSSLDAEIRSRNEALRLKKKMEGDLNEIEIQLSHANRQAAEALKNLRNTQGVLKDTQIHLDDALRSQEDLKEQVAMVERRANLLQAETEELRAALEQTERSRKVAEQELLDASERVQLLHTQNTSLINTKKKLESDISQIQSEMEDTIQEARNAEEKAKKAITDSTMISFCDLKLAHDSIMDLENDKQQLDEKLKNYRRRSRSCRQLALKGGKKQIQKLEARVRELEGEVDAEQKRSAEAVKGVRKYERRVKELTYQSEEDRKNVLRLQDLVDKLQMKVKSYKRQAEEAEELSNVNLSKFRKIQHELEEAEERADIAESQVNKLRAKSREIGKKAESEE

SEQ ID NO: 2396 - protein, 530 aa, Meleagris gallopavo
MSKHHDAGTAFIQTQQLHAAMADTFLEHMCRLDIDSEPTIARNTGIICTIGPASRAVDKLKEMIKSGMNVARLNFSHGTHEYHEGTIKNVREATESFASDPITYRPVAIALDTKGPEIRTGLIKGSGTAEVELKKGAALKVTLDNAFMENCDEHVLWVDYKNLIKVIDVGSKIYVDDGLISLLVKEKGKDFVMTEVENGGMLGSKKGVNLPGAAVDLPAVSEKDIQDLKFGVEQNVDMVFASFIRKAADVHAVRKVLGEKGKHIKIISKIENHEGVRRFDEIMEASDGIMVARGDLGIEIPAEKVFLAQKMMIGRCNRAGKPIICATQMLESMIKKPRPTRAEGSDVANAVLDGADCIMLSGETAKGDYPLEAVRMQHAIAREAEAAMFHRQQFEEILRHSVHHRDPADAMAAGAVEASFKCLAAALIVMTESGRSAHLVSRYRPRAPIIAVTRNDQTARQAHLYRGVFPVLCKQPAHDAWAEDVDLRVNLGMNVGKARGFFKTGDLVIVLTGWRPGSGYTNTMRVVPVP

SEQ ID NO: 2397 - protein, 894 aa, Meleagris gallopavo
  MOD_RES (6)..(6): Any amino acid
RNSIHXNMQYTYNYEEDEYMTQEEEWDRDLLLDPAWEKQQRKTFTAWCNSHLRKAGTQIENIEEDFRNGLKLMLLLEVISGERLPKPDRGKMRFHKIANVNKALDYIASKGVKLVSIGAEEIVDGNVKMTLGMIWTIILRFAIQDISVEETSAKEGLLLWCQRKTAPYRNVNIQNFHLSWKDGLGLCALIHRHRPDLIDYSKLNKDDPIGNINLAMEIAEKHLDIPKMLDAEDIVNTPKPDERAIMTYVSCFYHAFAGAEQAETAANRICKVLAVNQENERLMEEYERLASELLEWIRRTIPWLENRTPEKTMQAMQKKLEDFRDYRRKHKPPKVQEKCQLEINFNTLQTKLRISNRPAFMPSEGKMVSDIAGAWQRLEQAEKGYEEWLLNEIRRLERLEHLAEKFRQKASTHEQWAYGKEQILLQKDYESASLTEVRAMLRKHEAFESDLAAHQDRVEQIAAIAQELNELDYHDAASVNDRCQKICDQWDSLGTLTQKRREALERTEKLLETIDQLHLEFAKRAAPFNNWMEGAMEDLQDMFIVHSIEEIQSLISAHDQFKATLPEADGERQAILSIQNEVEKVIQSYSMRISASNPYSTVTVEEIRTKWEKVKQLVPQRDQSLQEELARQHANERLRRQFAAQANVIGPWIQTKMEEIARSSIEMTGPLEDQMNQLKQYEQNIINYKHNIDKLEGDHQLIQEALVFDNKHTNYTMEHIRVGWELLLTTIARTINEVETQILTRDAKGITQEQMNDFRASFNHFDRRKNGLMDHDDFRACLISMGYDLGEAEFARIMSLVDPNGQGTVTFQSFIDFMTRETADTDTAEQVIASFRILASDKPYILADELRRELPPEQAQYCIKRMPQYTGPGSVPGALDYTSFSSALYGESDL

SEQ ID NO: 2398 - protein, 3500 aa, Meleagris gallopavo
MYGITDFRGLLQAFELLKQTREEESHRLEIELTEKAQKEDQEFEELVAFIQQRLTQTEPITLIRDIENQTVLTDEDAIFECEIKINYPEIKLSWYKGTQKLDSSDKYEIKIEGDRHILKIRNCQLEDQGNYRIVCGPHIASARLTVIEPAVERHLHDTTFKEGNTCTLSCQFSIPNAKSQWYRNGRPIKIGGRYSTQVSDKVHKLIIKDVRTEDQGQYTCKLDNLETSADLAIEAEPIQFTKSIQNIVVSEHQSATFECEVSFDDAVVTWYKGPTELRESPKYSFRSEGRCHYMTIHNVTAEDEGVYSVIARLEPRGEARSTAELYLVTKEIKLELKPPDVPDAKVAVPPQKPAEAAPIPILLPLIPPPEEKKPAEKKVPVKKVSKKVVKKGAKEIPPPEVPEILPEKPKEVKITSMARREGIHEEKMEIYEKPKEVYEEWEEDYGEDHDYYFKEEGYDEEEEEWEETYEKREVAYEEKQIIHEEAVEVPKKPVPERKPPAIIAEKKEKKEVTVHKVPDVPKKIPEEKVPITVPKKPEPTPAKEPEVPKKIEEKIKVIEPKKPEVPPAKVPEVPKKVVQEEVSVEVPKKPEPPPAKVPEVPKKVVPEEKVHVEVPKKPEPPPPKVLRKKPEEEEPKPEKEPKPEVKPVPTPVEKIKKPEVSEVPKKKPEIPVIKKEEKHVPEPPKEPKQAAISVPGPEPKPAVALKSPKPAAEPAPAITTAPVTTPVVGKKAEAKPTKEETPKGISPVKAKKTPSPADAERRKLRPGSGGEKPPEEPPFTYQLKAVPLKFVKEMKDIVLKEAESVGSSAIFEVLISPSTAITSWMKDGSNIRESPKHKFIADGKDRKLHIIDVQLSDAGEYTCVLRLGNKEKTSTAKLIVEELPVRFVKTLEEEVTVVKGQPLYLTCELNKERSVVWRRDGKIIKDKPGKFALGIIGLSHSLTITDSDDSDAGTYTVTVEDSELSCSSCVKVVEVIRDWLVKPIRDQHVKPKGTATFTCDIVKDTPNIKWFKGDEEIPAEPTDKTEILKEGNKIFLKIKNAGPADIGEYSVEIEGRRYPAKLTLGEREVELLKPLEDVTVYEKETANFDTEISEEDIPGEWKLKGEILRPSPTCEIKAEGGKRFLTLHKVKLEQAGEVLYQALNAVTTAILTVKEIELDFAVPLKDVTVPEKRQARFECVLTREANVIWSKGTDILKIGEKFDIIADGKKHILVINDSQFDDEGEYTAEVEGKKSTARLFVEGKLKFISPLQDQTVKEGETAHFQFELSHEDMLVKWYKNDKRLHTSRTVFITSEGKVHKLEMREVTLDDISEIKAVVKDMNTQANLKVLEADPYFTVRLQDYSALEKDDVTLQCELSKDVPVKWYKDGEELVASSRISIKTDGLRRILTIKKAAEGDKGVYECSCGTDKTNCNIGIEPRLIKVERPLYGVEVFVGETARFEIEISEPDVHPIWKLKGETLTPSPECEILEDGKKHVLILHNCRLDMTGEVSFQAANAKSAANLKVKELPLIFITPLSDVKVFEKDEAKFECEVSREPKTFRWLKGTQEITSDERFEIISDGTKHALIIKSVAFDDEAKYMFEAEDKRTSAKLIIEGIRLKFITPLKDVTKKERETAVFTVELSHENIPVVWFKNDQRLHTTKVVSMTDDGKFHTLTIKDLTIDDTSQIRVEAMGKSSEAKLTVLEGDPYFTGKLQDYTAVEKDEVILQCEISKADAPVKWMKDGKPITPSKNVVIKADGKKRILILKKALKKDIGQYTCDCGTDQTSANLNIEDRDIEIIRPLYSVEVIETETARFDIEISEEGVHGNWKLKGEPLTESPDCEIKEEGKKHFLTLYNVRLDQAGGVDFQAANAKSGAHLRVKPRVIGLLRPLKDVTVTAGESATFDCELSYEGIPVEWYLQGKKLEPSDKVGRLNFIFPYVSRDTKVTALLRPDVIRSFLPKICLLSEPPVEFTKPLEDQTVEEEATAILECEVSRENAKVKWFKNGEEVHKTKKYDIISEGRVRKLVIHGCTLDDAKTYTCDAKDFKTSCFLNVEPLRVEFLRPLTDLEVKEKESARLNVKFLAQVKVKWFKDGIEIRKGKKYDIISKGAERILVISKCLFDDEAEYACEAKTARTSGLLTVIEEEAVFTKNLHDLEVNENETVRLICEISKPNAEVTWFKGDEEVPDGGRFEYISDGRKRILVIRNKKKTDAGKYTCKLPSSSTTGKLTVHELAAEFLTRPQNLEVLEGDKAEFACSVSKEAITVQWLGVLEPSDKYDIISDGKKRTLVVKDSVIGDAGKYSVMVGEAKATARLTVIEKLRIVTPLKDQEVNEGQEIIFNCEVNKEGAKEKWYKNGEAIFDSAKYIIVQKDLVYTLRIRDTQLKDQATYSISLSNHRGEHAESSAALTVLEEDLRIVEPLEDIETMEKKTVTFWCKVNRLNATLKWTKNGEEITFDKRILYKIDKYKHSLIIKDCGFKDEGEYTVTAGQDKSVAELLITEAPADFIEHLQDQTVTEFDDAVFTCQLSKEKASVKWYRNGREIKEGKKYQFEKDGNLHRLIIKDCRLDDECEYSCGVDDRKSRARLFVEEIPVEIIRPPQDVYEAPGADVIFMAELNKDGVEVKWLRNNMIIIQGDKHQMMSEGKVHRLQVCEIKPRDQGEYRFIAKDKEARAKLELAAAPRIKTGDQNLVVDVGKPLTMTVPYDAYPRAEAEWLKGEESLPTTTVDTTNDCTTFKIYEAKKSDKGRYKVVLRNKHGQAEAFINVEVIDVPGPVRNLEVTETYDGEVGLAWQEPESDGGSKIIGYVVERRDIKRKTWIVATDHAENCEYTVTGLQKGGVEYLFRVSARNRVGTGEPIETERPVEAKSKFDVPGPPQNVEVTDVNRFGATLTWEVPEYDGGSPITGYVIELRNRASIKWEPTMTTGADELSAVLTDVVENEEYFFRVRAQNIVGVGKPSHPTRAVKIMDPVERPSPPINLDHSDQTKTSVQLTWEPPLQDGGSPILGYIIERKEEGTDKWIRCNPKLVPALTFKVTGLKAGSSYYYRVSAENAAGVSDPAEAIGPLTADDPFVGPTMDLSAFKDGLEVIVPEPIKIRVPITGYPIPTATWSFGDRVLEEGDRVTMKTTATFAELVITPSERPDKGIYTLTLENPVSSVSGEINVNVIARPGAPKELKVVDVSRSTVQLSWEPPEDDGGSPVIDYIIEKREVSRKTWIKVMDHVMDQEFSVPDLIQGKEYLFRVCACNKCGPGEPAYIDEPINMSAPATVPDPPENVKWRNPTSKGIFLTWEPPKYDGGARIKGYLVEKSQRGTDKWEICGEPVIETKMEVTKLKEGEWYAYRVKALNRIGASKPSKPTDDIQAIDAKEAPEIFLDVKLLAGLTVKAGTKIELPAKITGKPEPQITWTKAEKILRPDDRITIETKPDHSTVTITDSKRSDSGTYIIEAVNSSGRATAVVEVNVLDKPGPPAAFDVSEITNESCLLTWNPPRDDGGSKITNYVLEKRATDSEIWHKLSSTI

SEQ ID NO: 2399 - protein, 332 aa, Meleagris gallopavo
MSLKDHLIHNVHKEEHPHAHNKISVVGVGAVGMACAISILMKDLADELTLVDVVEDKLKGEMLDLQHGSLFLRTPKITSGKDYSVTAHSKLVIVTAGARQQEGESRLNLVQRNVNIFKFIIPNVVKYSPHCKLLIVSNPVDILTYVAWKISGFPKHRVIGSGCNLDSARFRHLMGERLGIHPLSCHGWIVGEHGDSSVPVWSGVNVAGVSLKALHPDMGTDADKEHWKEIHKQVVDSAYEVIKLKGYTSWAIGLSVADLAETIMKNLRRVHPISTAVKGLHGIKDDVFLSVPCVLGSSGITDVVKMILKPDEEEKIKKSADTLWGIQKELQF

SEQ ID NO: 2400 - protein, 3098 aa, Meleagris gallopavo
QIAWYKDGKRIRHGERHHMEVLQDGSASLRLPVVLPEDEGIYTVFASNMKGNAICSAKLYVEPLAPTAAPGYMPGPEVMRRYRSISPRSPSRSPARSSPSRSPARRLDETDEGQLERLYKPVFVLKPTSVKCSQGQTARFDLKVVGRPMPETYWFHNGQQVVNDYTHKIVIKEDGTQSLIIVPAMPEDSGEWAVIAQNRAGKASVTVTLSVEAKEDLVRPRFVERLKNVSVKEGSRLHMSVKATGNPNPDIVWLKNSDIIVPHKYPRIKIEGTKGAAALKIESTVRQDAAWYTATAINKAGRDTTRCKVNVEVEHAEPEPERRLIIPKGTYKAKEIAAPELEPLHLRYGQEQWEEGDLYDKEKQQKPFFKKKLTSLRLKQFGPAHFECRLTPIGDPTMVVEWLHDGKPLEAANRLRMINEFGYCSLDYGVAYSRDSGVITCRATNKYGTDHTSATLIVKDEKSLVEESQLPEGRRGMQRIEELERMAHEGALPAVAVDQKEKQKPELVLVPEPARVLEGETARFRCRVTGYPIPKVNWYLNSQLIRKSKRFRLRYDGIHYLDIVDCKSYDTGEVKVTAENPEGFIEHKVKLEIQQREDFRSVLRRAPEPRHEPVVTEPGKLLFEVQKIDKPAEATTKEVVKLKRAERITHEKLSEESEELRSKFKRRTEEGYYEAITAVELKSRKKDESYEEMLKKTKEELLHWTKEIPEEEKKALPPEGKITIPTFKPEKVELSPSMEAPKIFERIQSQTVAQGTDAHFRVRVVGKPDPECQWFRNGVQIERTDRIYWYWPEDNVCELVIRDVTSDDSASIMVKAVNIAGETSSHAFLLVQAKQLISFIQNLQDIVAKERDSMATFECETSEPFIKVKWFKNGIEIHSGEKYRMHSDRKAHFLSVLAVEMSDADDYSCALVEDESVKTTAKLTVEGAVVMFIKELEDVEIPESFTGELECEVSPEDIEGKWYHGDVELSSNHKYVLASRRGRRILTIKDVNKDDQGEYSFVVDGKRTHCKLKIKPRPMTILEGLTDQKVCEGDIVQLEVKVSLENVEGVWMKDGHEIQSSDRIHIVLDKQSHMLLIEDATKEDGGTYSFSIPGLELSTTGQVTVYSVEIIVPLKDVHVVEGTKAILECKVSAPDVTSSKWYLNDHQIKPDERVQAVCKGTKQRLVVTRTHASDEGHYKLMVGKVETSCNVTVEEIEIIRGLRDITCTETQNVSFEVELSHSGIDIIWHFKGQEIKAGPKYKIEVHGKIYKLTVVKMMKDDEGEYVFYAGGKKTSGKLIVAGGAISKPLTDLTVAESQRAVFECEVANPESEGQWLKNGKPLPRTDQYRAETDGVKRRLNIPATKMDDMGEYSYEIASSKTSAKLHVEAVKIKKTLKNLTVTETQEAVFSVELSHPDVKGALWIKNGVELESNDKYEISVKGTVHTLKIKHCVVTDESVYSFKLGKIGANARLHVETVKIIKKPKDVTALENAVVSFELSVSHDTVPVRWFHKNVELKQSDKYKMISQRKVHKLMLHNISPADAGEYTAFVGQLECKAKLFVETIHITKTMKSIEIPETKTASFQCEVSHFNVPAVWLKNGVEIEMSEKFKIVVQGKLHQLNIMNTSSEDSAEYTFVCGNDRVSATLTVKPILITSMLEDINAEEKDTITFEVTVNYEGISYKWLKNGVEIKSTDKCQIRTKKLTHSLSIRNVHFGDAAEYSFVAGKAASSATLYVEARHIEFRKHIKDIKVVEKKRAIFECEISEPDVQVQWMKDGQELQIGDRMKIQREKYVHRLIIPSTKMSDAGQYTVVAGGNTSSANLIVEGRDIRIRSIRKDIQVIERQRAEIEFEVNEDDIEPQWYKDGIEINFHYEERYSYVVERRIHRMSIFETTYSDAGEYTFVAGRNRSSVVLYVNAPEPPQIIQELQPTTVESGKPARFCAVISGKPQPKVSWYKDDQQLSPGFKCKFLHDAQEYTLLLIETFPEDSAVYTCEAKNDYGVATTSASLSVEIPEVVSPELEVPVYPPAVIVPLRDAVTSEGQSARFQCRVTGTDLKVSWYSKDREIKPSRFFRMTQFEDTYQLEIAEAYPEDEGTYTFVATNSVGQVTSTATLKLEAPEKIMYEKLEEEIEMEMKVAPILRRRLEPLEVAVNHMAKFTCEVETTPNVKFQWYKAGREIYDGDKYSIRSSNYLSMLEIPRPQVVDCGEYSCKASNQHGSVSSTAFLTVTEPPRFIKKLDSSRLVKQHDSTRYECKVGGSPEIKVTWYKGETEIHPSEKYSMSFVDSVAVLEMHNLSVEDTGDYSCEAQNPAGSASTSTSLKVKAPPAFTKKPHPVQTLKGSDVHLECELQGTPPFQISWYKDKREIRSSKKYKVMSENYLASIHILNVDTADVGEYHCKAINDVGSDSCIGSVTLRAPPTFVKKLSDVTVVVGETIELQAAVEGAQPISVLWLKDKGEIIRESENLWISYSENVASLKIGNAEPTNAGKYICQIKNDAGFQECFAKLTVLEPAVIVEKPGPVKVTAGDSCTLECTVDGTPELTARWFKDGNELSTDHKYKISFFNKVSGLKILNAGLEDSGEYTFEVKNSVGKSSCTASVQVSDRIIPPSFTRKLKETYGQLGSSAVLECKVYGSPPILVSWFHDGQEITSGEKYQATLTDNTCSLKVNGLQESDTGTYSCTATNVAGSDECSTFLSVREPPSFVKKPEPLNVLSGANITFTSIVRGSPPLQVKWFRGSVELAPGHKCNITLQDSVAELELFDVQPLQTGDYTCQVSNEAGKISCTTHLFVKEPAKFVMKVNDLSVEKGKNLILECTYTGTPPISVTWKKNGIILKHSEKCSITTTETSAILEIPNSKLEDQGQYSCHIENDSGQDNCHGAITILEPPYFVTPLEPVQVTVGDSASLQCQVAGTPEMIVSWYKGDTKLRGTATVKMHFKNQVATLVFSQVDSGDSGEYICKVENTVGEATSSSLLTVQERKLPPSFTRKLRDVHETVGLPVTFDCGIAGSEPIEVSWFKDNVRVKEDYNVHTSFIDNVATLQILKTDKSLMGQYTCTASNAIGTASSSGKLVLTEGKTPPFFDTPITPVDGIIGESADFECHVSGTQPIRVTWAKDNQ

SEQ ID NO: 2401 - protein, 376 aa, Meleagris gallopavo; identical to SEQ ID NO: 726

SEQ ID NO: 2402 - protein, 3937 aa, Meleagris gallopavo
SSNYLSMLEIPRPQVVDCGEYSCKASNQHGSVSSTAFLTVTEPAVFVKKLSDQYVEPGKPIILEGTYTGSLPISVTWKKNGHTLAQSHKCSITTTEKSCILEILDSTKEDAGEYTCHVENEAGRDVCEAVVSTLEPPYFVTHLEPLEVSVGDYTTLQCHVAGTPEITVSWYKGDTKLRSTPEYKVFFKDNIASLTFNKVVINDSGEYICKAENSVGTASTKALLTVQERKRPPSFARRLKDIEHPVGLPLKLMCRLNGSEPITVTWHKDGVQLSDDHSVHTSFVDNVAVLQLVQTEMNHSGQYTCTATNAVGTANTSARLTVTEPKQAPVFDTKPESIDVPFGESADFECHVTGAQPIQITWSKDGREIRTGGNFNITFVANTAHLRVLRVGKGDSGQYTCQASNEAGKDFCSAQLTVKAEPPKFIKKPEALQFVRQGDTVQLECKITGTPEIKITWYKNDQALQASNRLHMSFVESTAVLTILDASAEDAGDYICEAQNSAGAASCSTSVSVKEPPVFSKVPSPVDTLKGSDVILQCEIAGTPPFEVAWFKDRRQVRSSKKFKVTAKHSIASLHILSLESQDTGEYQCKAMNEVGSDTCTCPVKFKASEPPRFTKKLSDTAIFVGEPTALQAVVEGSPPISVVWLKDKGEVIRESENVQMWFMDNIATLEIASAEGADVGKYICQIKNDAGMRECSAFLQVLEPAVILEKTEPITVMAGNPFTLECRVGGTPELITKWYKDGRELRSDRKYQITFFNNISTLKVFSAEKSDRGLYTFEVHNEVGDSSCTSSVDVSDRLVPPSFSRKLKETNGVLGSSVLLECKVSGTSPMSVAWFQDGNEIVGGEKYEISFLDNICALKLNALDVTDTGPYTCVATNVAGSDECSAFLTVQEPPSFVKTPDPQEVLPGSSVTFTSHIKGSTPFKVTWFRGIRELVPDSTCSISLDESKAQLQLFNVEPGSSGDYACVVTNDAGSASCTTQLFVKEPAVFMKKLSDFSVEQGKSIVLESIYTGTPPISVTWKRNGMPIAQSQRCSVTTTDKSGILEIFNSTKSDEGEYTCEVSNEAGGDVCHSLVSILEPPYFITHLDRVEVKIGEPLVLKCQIGGAPEIKVSWYKEDTKLRSTQAYKMHFKNNVATLAFSTVEDGDIGEYTCKAENSVGFATSTALLVVKERQLPPTFARKLKDIQETVGAPVTFDCRINGSEPIQVSWYKDGVLLSDSDNVQSTFLNNVATLQILQTSMAYCGQYTCSAQNLGTASSSAKLLLTEHLQPPFFDIKPVSIDVALGERATFKCHVTGSAPMRIVWTRDNREIRPGGNYKMMLVENTASLVVLKVGKGDAGLYTCTASNSVGKDACAAQLAVQEPPRFIKKLDSSRLVKQHDSTRYECKVGGSPEIKVTWYKGETEIHPSEKYSMSFVDSVAVLEMHNLSVEDTGDYSCEAQNPAGSASTSTSLKVKAPPAFTKKPHPVQTLKGSDVHLECELQGTPPFQISWYKDKREIRSSKKYKVMSENYLASIHILNVDTADVGEYHCKAINDVGSDSCIGSVTLRAPPTFVKKLSDVTVVVGETIELQAAVEGAQPISVLWLKDKGEIIRESENLWISYSENVASLKIGNAEPTNAGKYICQIKNDAGFQECFAKLTVLEPAVIVEKPGPVKVTAGDSCTLECTVDGTPELTARWFKDGNELSTDHKYKISFFNKVSGLKILNAGLEDSGEYTFEVKNSVGKSSCTASVQVSANTDRIIPPSFTRKLKETYGQLGSSAVLECKVYGSPPILVSWFHDGQEITSGEKYQATLTDNTCSLKVNGLQESDTGTYSCTATNVAGSDECSTFLSVRDLEPPSFVKKPEPLNVLSGANITFTSIVRGSPPLQVKWFRGSVELAPGHKCNITLQDSVAELELFDVQPLQTGDYTCQVSNEAGKISCTTHLFVKEPAKFVMKVNDLSVEKGKNLILECTYTGTPPISVTWKKNGIILKHSEKCSITTTETSAILEIPNSKLEDQGQYSCHIENDSGQDNCHGAITILEPPYFVTPLEPVQVTVGDSASLQCQVAGTPEMIVSWYKGDTKLRGTATVKMHFKNQVATLVFSQVDSGDSGEYICKVENTVGEATSSSLLTVQERKLPPSFTRKLRDVHETVGLPVTFDCGIAGSEPIEVSWFKDNVRVKEDYNVHTSFIDNVATLQILKTDKSLMGQYTCTASNAIGTASSSGKLVLTEGKTPPFFDTPITPVDGIIGESADFECHVSGTQPIRVTWAKDNQEIRTGGNYQISYVENTAHLTILRVDRGDSGKYTCYASNEVGKDSCTAQLNVKERKTPPTFTRKLSEAVEETEGNELKLEGRVAGSQPLTVSWYKNNQEVHSSPHCEISFKNNTLLLHIKSVGQSDAGLYTCKVSNEAGSVLCTSSVVIREPKKPPVFDQPLQPAATEEGNTLQLSCHVRGSEPIRIQWLKAGREIRASERCSFSFANGVALLELAAVTKSDSGEYVCKASNVAGTDTCRSKVTVKEKAAALPAAKKADMEGKLYFVSEPQSIKVMEKTVATFIAKVGGDPIPNVKWMKGKWRQLNQGGRIIIQQRGDEAKLEIKDTTKTDSGLYKCVAFNQHGEIERSVNLQVEERKQEVVEEDVRGKLKRIPTKKKEDEEQTIDILELLKNVDPKEYEKYARMYGITDFRGLLQAFELLKQTREEESHRLEIELTEKAQKEDQEFEELVAFIQQRLTQTEPITLIRDIENQTVLTDEDAIFECEIKINYPEIKLSWYKGTQKLDSSDKYEIKIEGDRHILKIRNCQLEDQGNYRIVCGPHIASARLTVIEPAVERHLHDTTFKEGNTCTLSCQFSIPNAKSQWYRNGRPIKIGGRYSTQVSDKVHKLIIKDVRTEDQGQYTCKLDNLETSADLAIEVSKTAEPIQFTKSIQNIVVSEHQSATFECEVSFDDAVVTWYKGPTELRESPKYSFRSEGRCHYMTIHNVTAEDEGVYSVIARLEPRGEARSTAELYLVTKEIKLELKPPDVPDAKVAVPPQKPAEEAAPIPILLPLIPPPEEKKPAEKKVPVKKVSKKVVKKGAKEIPPPEETKKPTTNTLLKIASAYVKSYRSYKKKTSHNTVCNKELISLTVNIQYTLQIPGYDDNMVVLVPEILPEKPKEVKITSMARREGIHEEKMEIYEKPKEVYEEWEEDYGEDHDYYFKEEGYDEEEEEWEETYEKREVAYEEKQIIHEEAIIAEKKEKKEVTVHKVVKKPVDEKVEITTQRVAEEKLKRAEVTKKIPPAKPTPMIVEEKVMKKEVPTVERWTVSEEKMSVSVHREEEYSYVTVPEVPKKPLPEEKVHIPVPKAEPPPVKEVPAVPKKPVPKEKVPPAVPKKVEAPPAKVPEVHKKVTPKEKVPVPVPKKVEAPPSREMSAVPKKTVPEEKVPVPVSRKVAAPPAKVPEVRKMVVQKEKVYIEVPQDEEEEEIPQYEEVTKYEKEVIHYEEEVQHYEEVSHYEEEAPQYEEVPQYEEEEVTREEEEAAYYEDQNNVFEVPEVPKKPEPEKKVQVPKKKEAPPPKVPEVPKKPVPEEKVLVPVPKKVEEPPSAKVPEAPKKVVPEEKIPIFIPEKEEETIPEKAIPTKVPEMPKKPVPEEKVPIPKKVPVPPEKVPEVPKRPLPEEKVPVPVPKKEAPPAKVPEVPKKVVPEEKVHVEVPKKPEPPPPKEPEVPKKIVPEKKLPEPVAVPEKPEPLPEKVPGLVKKPRRIIPEVTPPPKEEVVLKRVLRKKPEEEEPKPEKEPKPEVKPVPTPVEKISEVPKKKPEIPVIKKEEKHVPEPPKEPKQAAISVPGPEPKPAVALKSPKPAAEPAPAITTAPVTTPVVGKKAEAKPTKEETPKGISPVKGKTKKTPSPADAERRKLRPGSGGEKPPEEPPFTYQLKAVPLKFVKEMKDIVLKEAESVGSSAIFEVLISPSTAITSWMKDGS

SEQ ID NO: 2403 - protein, 3005 aa, Meleagris gallopavo
IHMPVDAMSLQAAKECQTLVSDVDYRHYLHQWTCLPDHNDVVHARKAYDLQSDNVYKSDLEWLRGIGWLTEGSVDVVKAKKAQEILSDRLYRTLPDQMKFTSVTDSPDVVQAKINAMQLSNRLYREAWDKDKAQISIPSDTPEMLQSKLNALNISNKQYQKAWDEAKAKSYDLRADAIPIKHAKASRDIASEYKYKETHEKQKGHYIGCRTAKEDPKLSWAARAMLLQNDRIYRKAYNDSKAHIHMPVDAMSLQAAKECQTLVSDVDYRHYLHQWTCLPDHNDVVHARKAYDLQSDAVYKSDLEWLRGIGWLPNDSPGIRRVKHAQDLLSDKVYRTPIDSLKYTSVVDSPDILLAKVNAEQLSIPKYKEAWEKDKTMIHIMPDTPEINLAKSNAHNYSQKLYREAWDEVKMSYDLRADAIPIKAAKASREIASDYKYKLDHEKQKGHYVGVPNAKADTKMQFALGIGKVQSELEYKKHFAKWKTQCHLPVDMLSIQSAKHGQSLVSDVDYRHYLHQWICLPDQNDVIHARKAYDLQSDAVYKSDLEWLRGIGWLPNDSLGINHVKHAGDLLNERKYRTKVETLQFTPVTDRVDYVTAKKSGEILSDIKYHKAWNEVKSNYTLTDTPQLDMAREAARILNQSLYKESWEKEKATGYLLPPDTVQICHAQHSNDVQSELKYKADYVKQRGHYVGVASMRDDPKLVWFEHAGEIQNDRLYKSNYHKTKSKIHIPADIMSVVAAKECQALVSDVDYRHYLHQWTCHPDQNDCIQARKAYDLQSDNIYKSDLEWLRGCGWIPLDSVEHKKVKHAQELINKRAYTKDALENFSKFTSVVDTPDIVLAKINSVNQSDLKYKETFNLEKGQYIGSDDTPELNHARDMSLLYSDKLYKRDWEISKPIGYTLDTTYIPLVGAKHANYVNSERKYKELYEKLKGHYLAGKDIGDFPSVVHSLAFQKIRSALAYRKNYEDTKTRVHIPSDMMNHVLAKKCQYILSDLEYRTYLHHWNCSPEEHDVIQARRAQEILSDVVYKDDLNWLKGIGCYVWDTPQILHAKKSYDLQSQIKYTAAGKENFQNFGVVTDTPVYVTAVQSTINASDVKYKEDYHKTKDKYTTVTETADSERVQNLKHLFSNNLYKEAWDRVKATSYILPSDAVSLARAKELKHNASTVKYREEYEKFKALYTLPGSVEDDPNTARCLRVGKLNIDRLYRETYEKNKAKVHIVPDMVDIIAAKDAQQKISEIDYRTRLHDWICLPDLQINAHVRKVADQISDVVYKDDLNWLKGIGCFVWDTPEILHAKHAYDLRSDIKYKSDAEKTKSKYTVVMDTPVYVQNILSGLNASEVVYRGDYLNKVRGKMIPTDKTVDLERAHHANKIQSENLYRWAGLKALPTGYSLPKDTPGFQHAKHVQYIGSDLKYKEAYEHMKAKGYTLGPNDVGFENVKKVNQVINERLYRATYHKNKDKIHTTPDTPEIRQVRATQEAVSDLIYKSDFFKMQGHLISLPFTPQVLHCRYVGDITSDNKYKEDLKWLQGLGCFLYDTPDMVRARQLRKLWSNYVYTDSAKKMRDKYSVVLDTPGYRTVQELKTHLSDLVYRAAGKELKTKYTSVLDTPDFLRAKKGQKIQSQYLYVELATKERPHHHAGSQTPAFTHARHVKDMVSETKYKIQYEKMKDKYTPVLDTPVLIRAKRAYLNASDLRYKETFENTKGKYHTVKDALDIVYHRKVTDDISSVKYKENYMSQLGVWRSIPDRPEHFHHRIVTDAISDVKYKEDLSWLRGIGCYAWDTPDFTLAGKNKVLYSGHKYKEMFEKTKSHFQYVADSPINRHFKHATQLLDAKLYKAAYEKLKDRYSVIVDDPKNLLAKWGTTLSSQVEYKKDYEKKKDKYTTVVDTPENLRTAKVNKQISDIIYKLEYNKAKPKGYTTIHDTPMLLHVRKVKDRISDLKYKEVYERNKSHCNVVADSVHIKTPRHAYKLNSNLDYKKKYEAAKAHWHWIADRPDFVQAAKSSLQQSDYEYKLDREFLKGCKLSVTDDKNTVLALNNAILASDIKYKEKHNKARGTCLVVPDTPQILLAKNVSSLVSENKYKEHSKKQLPRGSYTTLPETRDTAHVKEVTKNVSDTNYKKNFVKEKGKSNYSIMLEPPEVKHAMEVAKKQSTIEYKKDAKSKLHYTPIADRPDIKKATQAAKLISDIEYKKRGEAGLGVTMLGRPDIELAKEVSKLTSQVKYKENFSKEKGKRPKYDLKEAKIYKTMKDAHNMASEVKYKADLKKLHKPVTDMSESLIMNHVLNTSQLASAYQYKKQYEKSKGHYHLVPDNLEQVHLREASELQSHVKYKEKYEKEKGKPMLDFETPTYLTAKESQLMQSEKEYKRDFEESIKGRNLTGLEITPSLLHVKYATKIASEKEYRKDLEEGVKGKGLSVLEETPDMLRAKNATQILNEKEYKKALELEIRGKGLSELALETPDFVRAKNATDIASQIKYKQLAEMEKANYTSVVDTPEIIHAQQVKNLSSQKKYKEEAERTMPYYVPVADTPEMQRVRENQKNFSTLQYQWDLQNSKGKVTVVQDTPEMLRVKENQKNFSSILYKEDIGTGTTIEKTPEMQRVKRTQDAISSIKYKESIGKGTPIPDLPEVKRVKETQKHISSVLYKEELGTGIPTPVTPEIERVRRNQEHISSVLYKENVGMGTPTPVTPEIERVKRNQEHVSSVLYKENVGKVTPTPITPEMERVKRNQEIISSVLYSDSFRKQVQGKAAYVLDTPEMRRVRETQKHISTVKYHEDFEKNKGTFTPVVTDPITERVKKNMQDFSDISYRGIQRRVVQMEQKRVDQDQENLTGLRVWRTNPGSVFDYDPAEDNIQSRSLHMISVQAQRRSREHSRSASALSISGGDEKSEPSEGLNQHLSYYSNEGFFTTTATGYKHAKTIELPQQRSASVATQQTTVSSVPSHPSTAGKTYRAMYDYTAADADEVSFKDGDTIVNVQAIDEGWMYGTVQRTGKTGMLPANYVEAV

SEQ ID NO: 2404 - protein, 1450 aa, Meleagris gallopavo
  MOD_RES (119)..(120): Any amino acid
MSSVAVPFYQKRHKHFDQSYRNIQTRYVLEEYAARKAASRQAAHYESIGLGKTTCRLCARRARSLAHEAMQESRKRTHEQKSHASDEKRIKFASELSSLEREIHLARHHAREQLDRLAXXFFVEENMALERHAVEEKISRAPEILVRLRSHTVWEKMSVRLCFTVQGFPSPVVQWYKNEELITPASDPAKYTVENKYGVHVLHINRADFDDSATYSAVATNIHGQASTNCAVVVRRFRESEEPHPAGIMPFHLPLSYDVCFTHFDVQFLEKFGVTFATEGETLTLKCSVLVTPELKRLRPRAEWYRDDVLIKDSKWTKLYFGEGQAALSFTHLNKDDEGLYTLRMVTKGGVNEYSAFLFVRDADALIAGAPGAPMDVKCHDANRDYVIVTWKPPNTTTQNPVIGYFVDKCEVGLENWVQCNDAPVKICKYPVTGLCEGRSYIFRVRAVNSAGISRPSRISEPVAALDPVDLERTQTVHVDEGRKIVIRKDDLEGDIQVPGPPTNVHASEISKTYVVLSWDPPVPRGREPLTYFIEKSMVGSGSWQRVNAQVAVKSPRYAVFDLAEGKPYVFRVLSANKHGISDPSEITEPIQPQDTIVVPSAPGRVVATRNTKTSVVVQWDKPKHEENLYGYYIDYSVVGSNHWEPANHKPINYSRFVVHGLETGEQYIFRVKAVNAVGFSENSQESEAIKVQAALTCPSYPHGITLLNCDGHSMTLGWKAPKYSGGSPVLGYYIDKREANHKNWHEVNSSLICRTIYTVEDLTEDAFYEFKIAAANMVGIGHPSDPSEHFKCKAWTMPEPGPAYDLTICEVRNTSLVLLWKAPVYEGKSPITGYLVDYKEVDTEDWITANEKPTSHHYFKVTDLHQGHTYVFKVRAVNDAGVGKSSEISEPVFVEASPGTKEIFSGVDEEGNIYLGFECKEATDASHFLWGKSYEEIEDSDKFKIQTEGDHSKLYFKNPDKSDLGTYCISVSDTDGVSSSFILDEEEFERLMAISNEIKNPTIPLKSELAYEVLDKGEVRFWIQAESLSPNSTYRFVINDKEVENGDRHKISCDHSNGIIEMVMDKFTIDNEGTYTVQIQDGKAKNQSSLVLIGDAFKTVLAESELQRKEFLRKQGPHFSEFLYWEVTEECEVLLACKVANTKKETVFKWYRNGSGIDVDEVPDLQRGECHLTIPKLSRKDEGVYKATLSDDRGHDVSTLELSGKVYDDIILALSRVSGKTASPLKILCTEEGIRLQCFLKYYNEEMKVIWSHRESKISSGEKMKIGGGEDVAWLQITEPTEKDKGNYTFEIFADKGSFKRTLDLSGQAFDDALTEFQRLKAAAFAEKNRGKVIGGLPDVVTIMDGKTLNLTCTVFGNPDPEVVWFKNDKTLELNEHYLVSLEQGKYASLTIKGVTSEDSGKYSIYVKNKYGGETVDVTVSVYRHGEKIPEVKQGQLAKPRLIPPSSST

SEQ ID NO: 2405 - protein, 108 aa, Meleagris gallopavo
GMESAGIHETTYNSIMKCDIDIRKDLYANNVMSGGTTMYPGIADRMQKEITALAPSTMKIKIIAPPERKYSVWIGGSILASLSTFQQMWITKQEYDEAGPSIVHRKCF

SEQ ID NO: 2406 - protein, 400 aa, Meleagris gallopavo
FRVDFNVPMKDHKITNNQSCSRIKAAVPTIKHCLDHGAKSVVLMSHLGRPDGVPMPDKFSLAPVAVELKALIGREVLFLKDCVGPEVEKACANPANGSIILLENLRFHVEEEGKGKDASGNKIKADAAKVEAFRASLSKLGDVYVNDAFGTAHRAHSSMVGVHLPQKAAGFLMKKELDYFAKALESPERPFLAILGGAKVQDKIQLISNMLDKVNEMIIGGGMAFTFLKVLNNMQIGNSLFDEEGSKIVKDLMAKAEKNGVKITLPVDFITADKFDEHAQTGEATVASGIPAGWMGLDCGPESVKKFVEVVGRAKQIVWNGPVGVFEWDKFSKGTKALMDKVVEVTGKGCITIIGGGDTATCCAKWNTEDKVSHVSTGGGASLELLEGKVLPGVDALSNV

SEQ ID NO: 2407 - protein, 894 aa, Meleagris gallopavo
AWEKDKTNVHIMPDTPGILLAQQNQVNFSEKMYRLAMEEDKKKGYDMRADAIPIKSAKASRDIASDYKYKEGYRKQLGHHIGARNIEDDPKMMWSMHVAKIQSDREYKKAFEKTKTHFSSPVDMLGIVLAKKCQELVSDVDYRHYLHQWICLPDQNDVIHAKKAYDLQSDAVYKSDLEWLRGIGWVPIGSLDVEKAKKAGEILSERKYRQPADQIKFTSVTDSLAMMLAKHNAEIMNKRLYTEAWDADKTSIHVMPDTPTILLAKANAANVSHKHYIQAWEDAKTKGYDMRADAIPIRSAKASRDIASDYKYKEAHEKQKGHYIGCRTAKEDPKLSWAARAMLLQNDRIYRKAYNDSKAHIHMPVDAMSLQAAKECQTLVSDVDYRHYLHQWTCLPDHNDVVHARKAYDLQSDNVYKSDLEWLRGIGWLTEGSVDVVKAKKAQEILSDRLYRTLPDQMKFTSVTDSPDVVQAKINAMQLSNRLYREAWDKDKAQISIPSDTPEMLQSKLNALNISNKQYQKAWDEAKAKSYDLRADAIPIKHAKASRDIASEYKYKETHEKQKGHYIGCRTAKEDPKLSWAARAMLLQNDRIYRKAYNDSKAHIHMPVDAMSLQAAKECQTLVSDVDYRHYLHQWTCHPDQNDCIQARKAYDLQSDNIYKSDLEWLRGCGWIPLDSVEHKKVKHAQELINKRAYTKDALENFSKFTSVVDTPDIVLAKINSVNQSDLKYKETFNLEKGQYIGSDDTPELNHARDMSLLYSDKLYKRDWEISKPIGYTLDTTYIPLVGAKHANYVNSERKYKELYEKLKGHYLAGKDIGDFPSVVHSLAFQKIRSALAYRKNYEDTKTRVHIPSDMMNHVLAKKCQYILSDLEYRTYLHHWNCSPEEHDVIQARR

SEQ ID NO: 2408 - protein, 1736 aa, Meleagris gallopavo
VLYKQNWEENKDKYLLPPDAPELVNAIKNTAMFSKKLYTEDWEGDKTLFYPYNDSPELRRVAQAQKALSDIVYKKGHDERKSKYTSLPDPPDVEQAKKVTRQLSDELEWQKKYQRAKEKSKPQDLFDFFSSETSQQILSSLNSKFSCDFHYSEPSLIEITCTRKAMYISLQVIYHEDYKNKIKDYNVLPATENPLLRQLKTAGDVLSDHTYKKHPDQIKFTQVTDSPVQKQAEINSKQLSDKLYRSSGEEVIHKYTLPPDVPQFIQARYNAANVSDAYYKQDYHDLIAKGTNVSLDAIPITRAKASRNIASDYKYKEAYEKAKGKQVGFRSLQDDPKLVHYMHVAKIQSDREYKKDYEKSKTNYHTPPDTFSIQAAKKSQDVASTAHYKNLIHHYTYLPDAMDVELAKNMMQIQSDNVYKQDYNSWFKGIGWSPLGSLDVEKAKKAGDALNEKRYRQHPDTIKFTSVPDSMTMVLAQHNTKQLSDVAYKQEGEKVKHKYKLDPDVPQFIQARVNAFNLSDANYKADWKKTIAKGYDLKPDAIPIIAAKASRNIASDYKYKESYEKDKGKHVGYRSLQDDPKLVHYMHVAKLQSEREYKKDYEVTKTKYHTPLDMFSVTAAKKAQEAVTNTGYKQPIHHYTLLPDSVNLELSRNMMQLQSDNVYKADFNNWLRGVGWLPIQSLDVEKAKKASDILSEKKYRQHPDKLKYSIPLDAMEQVLAKQNAKTMNKRLYTDKWNKEKTSIHVMPDTPEILQSRVNQITMSNKLYKAGWEEEKKKGYDMRPDAIPIKAAKTSQDIASDYKYKLAYEQAKGKHIGFRSLEDDPKLVHFMQVAKMQSDREYKKDYEKAKTNFHTPVDMLSVVAAKKAQEVATNANYKNLIHIYNVLPDAMSLELAKNMMQIQSDNQYRADYDESMKGVGWMPLGSLEAEKNKKAMEILSEKKYRQHPDKLKYSVPVDSMNMALALHNAKIMDEHQYKQAWEEDKKKVHITPDIPQFALAKANAFNISDKMYRHSFEEARKKGYDLRSDAIPIKAAKASRDIASDYKYKLGYEQDKGKLVGFRSLQDDPKLVHYMQVAKMQSDREYKKAYEASKTHYQTPSDALSIVAAKEAQDRVTNANYKRLIHHYMLLPDAMSFELCRNMNQIQSNNEYKQDYNEWFRGIGWSPVGSLDVEKSKKATEIASDQKYRQHPSTFSFTKQTDAMDMVLAKHNADIMNKHAYTQAWEKDKTQVHVMPDTPDILQAKQNMANYSQKQYKLGWEEMIKKGYDLTPEAISVKAAKASRDIASDYKYKEGYRKQQGHHIGFRSLQDDPKMMWSMQVAKMQSEREYKKDFEKWKTKFNMPVDMLGFLLAKKCQELVSDVDYKHMLHRWTCLPDQNDVTQAKRVYELQSDNLYKSDLQWLRGIGWSPLGSLESEKNKKASEILSEKKYRQHPDTIKFTSIPDAMNITLAKSNAKNRSDILYREAWDKDKTQVHIMPDTPEILLAKSNLINTSDKHYKLGYEELRRKGYDLPPDAIPLKAAKASRDIASEYQYKTAYRKQLGHHIGARNIEDDPKMMWSMHVAKIQSDREYKKAFEKTKTHFSSPVDMLGIVLAKKCQELVSDVDYKHLLHRWTCLPDQNDVVQARKVYDLQSDNVYRSDLQWLRGIGWSPLGSLDEDEEKNKRASMILSDKKYRQHPDTIKFTSLPDSMPMVLAKHNSDIMNHRSYIAAWEKDKTNVHIMPDTPGILLAQQNQV

SEQ ID NO: 2409 - protein, 688 aa, Meleagris gallopavo
  MOD_RES (1)..(1): Any amino acid
XRTREGRLKAARNLVKRGITNLCVIGGDGSLTGADTFRAEWSSLLAELLKTGGITAEEAKKSSYLNIVGMVGSIDNDFCGTDMTIGTDSALHRIMEIVDAITTTAQRELGTCVPEVMGRHCGYLALITSLACGADWVFIPESPPEDGWEDHLCRRLTETRLGGSRLNIIIVAEGAIDRHGKAITSDEVKDLVVKRLGYDTRVTILGHVQRGGTPSAFDRILGSRMGVEAVMALLEGTPDTPACVVSLSGNQAVRLPLMECVQVTKDVTTAMNEKRFDDAVKLRGRSFQNNWNVYKLLAHIRPPSTKSGYTLAVLNVGAPAAGMNAAVRSTVRIGLIHGHRMLAVHDGFEGLAYGKVEESSWDKVGGWTGLGGSKLGTKRTLPKKYFEEISATISTFGIHGLIIIGGFEAFMGSLELMEGRAKFDELCIPICVIPATVSNNVPGSDFSIGADTALNTITTTCDRIKQSAAGTKRRVFIIETMGGYCGVPGHHAGLAGADAAYIFEEHFSIRDLQINVEHLTEKMKTTVKRGLVLRNEHCNENYTTDFIYNLYTEEGKGIFDCRKNVLGHMQQGGTPTPFDRNFGTKMGAKSVAWITGKIKECSRHGRIFANTADSACLLGMRKRSLVFQPLIELKEQTDFEHRIPKEQWWLKLRPILKILAKYNIELDTSEKALMEHVRHKRVSQEYNM

SEQ ID NO: 2410 - protein, 574 aa, Meleagris gallopavo
RKRVTVFQNNAHYAENFIQSILATVPPAERQEATLVGGDGRFYMKDAIQIIVRIAAANGIGRLVIGQNGILSTPAVSCIIRKIKAIGGIILTASHNPGGPNGDFGIKFNTANGGPAPEGITDKIFQISKKIEEYAICPDLKVDLGTIGKQQFDLENKFKPFTVEIVDSVEAYANMLRNIFDFNALKELLSGKNHLKIRIDAMHGVVGPYVKKILCEELGAPANSAVNCTPLEDFGGHHPDPNLTYAADLVQTMKTGEYDFGAAFDGDGDRNMILGKHGFFVNPSDSVAVIAANILSIPYFQQTGVRGFARSMPTSGALDRVAHATKIALYETPTGWKFFGNLMDANKLSLCGEESFGTGSDHIREKDGLWAVLAWLSILAARKQSVEDIMKDHWHKYGRNFFTRYDYEEVDADAAGKMMKDLETVMFDRSFVGKQLSAGDKVYTVEKADNFEYHDPVDGSVSRNQGLRLIFSDGSRIIFRLSGTGSAGATVRLYIDSYEKDAKKIHEDPQVMLAPLISIALKLSQLHERTGRTGPCYNIKTHPGTKGKKAARRVCHYKRNINFICVFKNTARYR

SEQ ID NO: 2411 - protein, 284 aa, Meleagris gallopavo; identical to SEQ ID NO: 1691

SEQ ID NO: 2412 - protein, 613 aa, Meleagris gallopavo
MKWVTLISFIFLFSSATSRNLQRVARDAEHKSEIAHRYNDLKEETFKAVAMITFAQYLQRCSYDGLSKLVKDVVDLAQKCVANEDAPECSKSLPSIILDEICQVEKLRDSYGAMADCCSKADPERNECFLSFKVSQPDFIQPYQRPASDVICKEYQDNRVSLLGHFIYSVARRNPYMYAPTILSFAADYEHALQSCCQESDVGACLDAKETAMREKAKKISVKQQYSCGILKKFGDRVFQAEKLVRLSQKYPKAPFSEVAKLVRESKDVHKECCEGDMVECMDDMAEIINNMCSKQDVFSSKIKGCCEKPIMERSQCIMEAEFDEKPADLPSLVEKYIQDKEVCKSFEAGHDAFMSEFVYEYSRRHPEFSTQLILRIAKGYESLLEKCCKTDNPAECYANAQDQLNQHIKETQDVVKTNCDLLSAHGEPDFLKSILIRYTKKMPQVSTETLLEIGKKMTAIGTKCCQLSEDRRMACSEGYLSIVIHDMCRRQETTPINDNVSHCCSDSYAHRRPCFTAMGVDTKYVPPPFNPDMFSFDEKLCSAPAEEREVGQMKLLINLIKRKPQMTEEQIKTIADGFTAMVDKCCKQSDINTCFGEEKKKIRIINKSLLNL

SEQ ID NO: 2413 - protein, 1634 aa, Meleagris gallopavo
MLKDLQLMPGALQPTAMLLQQTSALSLQQHIAMALQPTTLSQQPTAMDLQPMIMLLRKVRDLLPTVLTLKPSARALLPIVMDLNLSTSWLQPTAWGQRLKIRLKDSNLMIEDQSYKMSPKAKRAKQHLVSEDKENEAIDYSVPIFTGREVNISGITDTEEERIKESAAYVAKRNLFATGEGVSVSKVAKSVSEEEHHEKKSRKVAIRESAERVALKKTLEDTQAFHKKLNQDKLLHPPEFVIKPRSHTIWEKQNVKFHCTVAGWPAPRVTWYKNNVPIDVQAHPGKYTIENRYGLHSLEISTCDFDDIAQYRASAMNVKGEISAYASLVVKRYKGEIDASHLHAGTFSMPLSLGVTPHGFASRFEIKFIDKFEVMFGREGETMSLGCTVVISPDIKRFKPDIEWYRNGVLITPSKWVQMHWTGERASLTLTHANKEDEGLYTLRVVMGEYYEEYSGYVFVRDADAEIPGAPGAPLDVQCLDANKDYVIVSWKQPAVDGGNPILGYFIDRCEVGTTHWTQCNETPVKFARFPVTGLIEGRSYIFRVRAVNRAGVSLPSRVSEAVAALDPADRARLRSHPSAPWTGQIIVTEEEPAEGVIPGPPTDLQVIEATKNYVVLSWKPPGQRGHEGIMYFVEKCIAGTEDWQRVNTEIPVKSPRFAVFDLSEGKSYCFRVRCCNSAGIGEPSEATEATVVDDKLDIPKPPGRIMPTRNTDTSVVVTWTEPPDAKELVGYYIESSVVGSGHWEPCNNNPVKGTRFICHGLVNGEKYIFRVRAVNAAGLSEFSQDSEPIEVQAAIVIGGGLLHETAAPSPPYDITVLESVRDSMVLGWKQPKATGGTEITGYYVNYREVIGGVPGKWREANIKAISERAYRIENLKENMVYQFQVAAANLAGVGTPSLPSKPFKCEEWTIAVPGPPHDVTYTEVRKDSLVLLWKEPVYTGRSPIAGYYIDMKETEAKEEHWRSVNEKPLQKKFLKIAGLTEGVSYVFRVRATNQAGVGRPSDITDPVVAETRPGTKEVVVNVDDDGVISLNFECDQMSPNSKFVWSKNYEPIEDDSRLDIDSKGGKSKAIFKNLGEDDLGIYSCVVTDTDGVSSGYTIDEEEMKRLLALSHERKFPTIPLASELAVEILEKGEVRFWLQAEKLSGNAKANFVFNDKEIFNGEKYKMKVDQRTGLVEMIMDKLEDKDEGTYTFQLQDGKATNQSSLVLIGDVFKKLRDEAEFQRKEWHRKQGPHFVDQLGWEVTDECNVMLKCKVANIKKETHIVWYKDDREIMVDEEHDFKDGVCTLLISEFSKKDTGIYEVILKDDRGKDVSELKLTDTAFADLMNEVCRRIALSATDLKIQSTAEGIRLYSFVTYYVDDLRVGWVHNDTQIRYTDRVKTGVTGEQIWLQINEPTPQDKGKYTMELFDGKTGHKKTVDLSGQAFDEAFAEFQRLKQAAIAEKNRARVLGGLPDVVTIQEGKALNLSCTVWGDPTPEVSWLKNEKSFVSDANCILKFEAGKNVSFTISAVSTHDSGKYSLVVKNKYGTETSDVTVIVITVSGQTDTAKHTVSISGQSQNNITVSKKKKATTMSKPQQEKEKKDIKPHVDEIIATEETSDSKEIPRVEKEKNTENNQQTAKKTHGKAAAARTVP

SEQ ID NO: 2414 - protein, 461 aa, Meleagris gallopavo
QNRAVLHIALRNRSNTPILVDGKDVVPEVNKVLDKMKHFCQKVRSGEWKGYTGKAITDVVNIGIGGSDLGPLMVTEALKPYSKGGPRVWFVSNIDGTHIAKTLAELHPETTLFIIASKTFTTQETITNAVTAKEWFLHAAKDPSAVAKHFVALSTNGPKVKEFGIDTENMFEFWDWVGGRYSLWSAIGLSIALHIGFDNFESLLAGGHWMDKHFHTAPLEKNVPVLLAMLGVWYINCYGCETHALLPYDQYMHRFAAYFQQGDMESNGKYITKKGSRVDYNTGPIVWGEPGTNGQHAFYQLIHQGTRMIPCDFMIPVQTQHPIRNGLHHKILLANFLAQTEALMKGKTADEARKELQAAGLSGDALEKLLPHKVFEGNRPTNSIMFTKLNPFTLGAIIAMYEHKIFVQGVVWDINSYDQWGVELGKQLAKKIEPELESDAAVTSHDSSTNGLISFIKKHRA

SEQ ID NO: 2415 - protein, 212 aa, Meleagris gallopavo
QALRDAGFKFDICFTSVQKRAIRTLWNVLDAIDQMWLPVVRTWRLNERHYGALTGLNKAETAAKHGEAQVKIWRRSFDIPPPPMQSDHPFFSTISKDRRYADLTEDQLPTCESLKDTIARALPFWNEEIVPQIKEGKRVLIAAHGNSLRGIVKHLEGMSEEAIMELNLPTGIPIVYELDKNLKPIKPMQFLGDEETVRKAMEAVAAQGKVKK

SEQ ID NO: 2416 - protein, 220 aa, Meleagris gallopavo
EKPRIKLTAPKIPEGEKVDFDDIQKKRQNKDLIELQALIDSHFEARRKEEEELVALKERIEKRRAERAEQQRIRAEKEKERQARLAEEKARREEEDAKRKAEDDLKKKKALSSMGASYSSYLAKADQKRGKKQTARETKKKVLAERRKPLNIDHLNEDKLRDKAKELWDWLYQLQTEKYDFAEQIKRKKYEIVTLRNRIDQAQKHSKKAGAKGKVGGRWK

SEQ ID NO: 2417 - protein, 220 aa, Meleagris gallopavo
EKPRIKLTAPKIPEGEKVDFDDIQKKRQNKDLIELQALIDSHFEARRKEEEELVALKERIEKRRAERAEQQRIRAEKEKERQARLAEEKARREEEDAKRKAEDDLKKKKALSSMGASYSSYLAKADQKRGKKQTARETKKKVLAERRKPLNIDHLNEDKLRDKAKELWDWLYQLQTEKYDFAEQIKRKKYEILTLRCRLQELSKYSKKAGAKGKVGGRWK

SEQ ID NO: 2418 - protein, 817 aa, Meleagris gallopavo
RESDHRAWTPVSYTVTRQNAVVQGLTEGKAYFFRIAAENIIGMGPFTETTKELIIRDPITVPDRPEDLEVKAVTKNSVTLTWNPPKYNGGSDITMYVLESRLIGKEKFHRVTKEKMLDRKYTVEGLKEGDTYEYRVSACNIVGQGKPSFCTKPITCKDEIAPPTLDLDFRDKLIVRVGEAFSLTGRYSGKPTPKITWLRDDIVLKEDNRTKIKTTPTTLCLGILKSVREDSGKYCVTVENSTGSRKGFCQVTVVDRPSPPVGPVIFDEVHKDHMIVSWKPPLDDGGSEITNYIIEKKDAHRDIWMPVTSATVKTTCKIPKLLEGREYQIRIYAENLYGISDPLISDEMKAKDRFSVPDAPEQPVIKDVTKDSAVVVWNKPYDGGKPITNYIVEKKETMATRWVRVTKDPIFPSTQFKVPDLLEGCQYEFRVSAENEIGVGNPSPPSKPIFARDPIVKPSPPVNPEAVDKTKNSVDLTWQPPRHDGNGKIIGYLVEYQKVGDEEWKKANLTPDSCPETKYKVTGLTEGLTYKFRVMAVNAAGESEPAYVPDPVEVKDRLEPPELILDANMAREQHVRAGDTLRLSAVIKGVPFPKVSWKKEDKEVSPKADIEVTGVGSKLEIRNTAHEDGGIYSLTVENPAGSKTVSVKVLVLDKPGPPRNLQVSDVRSDSCYLTWKEPEDDGGSVITNYVVERKDVASPQWVSVSSTSKKRSHMAKYLMEGTQYLFRVAAENMFGRGPYVETLKPIKAVDPLHPPGPPKNLHHVDVDKTEVSLVWNRPDRDGGAEITGYLVEYQEDGADEWTKFQTVPMLDCVVTGL

SEQ ID NO: 2419 - protein, 212 aa, Meleagris gallopavo
TEVVCGAPSIYLDFARQKLDAKIGVAAQNCYKVSKGAFTGEISPAMIKDIGAAWVILGHSERRHVFGESDELIGQKVAHALAEGLGVIACIGEKLDEREAGITEKVVFEQTKAIADNVKDWSKVVLAYEPVWAIGTGKTATPQQAQEVHEKLRGWLKSHVSDAVAQSTRIIYGGSVTGGNCKELASQHDVDGFLVGGASLKPEFVDIINAKH

SEQ ID NO: 2420 - protein, 406 aa, Meleagris gallopavo
MRATCWILAGFCLLFCCKAEEGLNFPTYDGKDRVIDLNEKNYKHALKKYDMLCLLFHEPVSSDRVSQKQFQMTEMVLELAAQVLEPRSIGFGMVDSKKDAKLAKKLGLVEEGSLYVFKEERLIEFDGELATDVLVEFLLDLLEDPVEIINSKLELQAFDQIDDEIKLIGYFKGEDSEHYKAFEEAAEHFQPYIKFFATFDKGVAKKLGLKMNEVDFYEPFMDDPVHIPDKPYTEEELVEFVKEHKRATLRKLRPEDMFETWEDDMEGIHIVAFAEEDDPDGFEFLEILKQVARDNTDNPDLSIVWIDPDDFPLLITYWEKTFKIDLFRPQIGIVNVTDADSVWMEIRDDDDLPTAEELEDWIEDVLSGKINTEDDDDDDDDDDDDDDDDDDDDDDDDDDDDDDDDD

SEQ ID NO: 2421 - protein, 436 aa, Meleagris gallopavo
MSILKIQAREIFDSRGNPTVEVDLYTNKETGLFRAAVPSGASTGIYEALELRDNDKTRYLGKGVSKAVEHVNKTIAPALISKNVNVVEQEKIDKLMLEMDGTENKSKFGANAILGVSLAVCKAGAAEKGVPLYRHIADLAGNPEVILPVPAFNVINGGSHAGNKLAMQEFMILPVGADNFKEAMRIGAEVYHNLKNVIKEKYGKDATNVGDEGGFAPNILENKEALELLKTAIGKAGYSDKVVIGMDVAASEFYRDGKYDLDFKSPDDPSRYISPDQLADLYKGFVKNYPLVSIEDPFDQDDWAAWKKFTASVGIQVVGDDLTVTNPKRIAKAVEEKSCNCLLLKVNQIGSVTESLQACKLAQSNGWGVMVSHRSGETEDTFIADLVVGLCTGQIKTGAPCRSERLAKYNQLLRIEEELGSKARFAGRNFRNPRIN

SEQ ID NO: 2422 - protein, 766 aa, Meleagris gallopavo
PQRIYYLSLEFYMGRTLQNTMVNLGLQNACDEAIYQLGLDLEELEEIEEDAGLGNGGLGRLAACFLDSMATLGLAAYGYGIRYEFGIFNQKIVDGWQVEEADDWLRYGNPWEKARPEYMLPVHFYGRVEHSPEGVKWVDTQVVLAMPYDTPVPGYKNNTVNTMRLWSAKAPNDFNLQEFNVGDYIEAVLDRNLAENISRVLYPNDNFFEGKELRLKQEYFVVAATLQDIIRRFNSSNFGISSPGAATSEPSKSVLQVAIQLNDTHPALSIPELMRILVDVEKVDWDKAWEITKQTCAYTNHTVLPEALERWPVSMFEKLLPRHLEIIYALNQMHLDRVAALYPGDIDRLRRMSVIEEGDCKRINMAHLCVIGSHAVNGVARIHSDIVKNTVFKDFYELDPEKFQNKTNGITPRRWLLLCNPGLADVIAEKIGEDFVTDLSQLKKLLDFIDDETFIRDVAKVKQENKLKFSAYLEEHYKVKINPSSMFDIQVKRIHEYKRQLLNCLHAITLYNRMRSDPSKSFVPRTIMIGGKAAPGYHMAKMIIKLITSIGEVVNNDPYVGDKLKVIFLENYRVSLAEKVIPAADLSQQISTAGTEASGTGNMKFMLNGALTIGTMDGANVEMAEEAGEENLFIFGMRVEEVEALDRQGYNAREYYDRIPELRQAIDQISSGFFSPRDPGCFRDVVNMLMHHDRFKVFADYEAYIKCQGQVDQLFMDPREWTKKVIRNIACSGKFSSDRTITEYAREIWGVEPSATKIPPPNLPRD

SEQ ID NO: 2423 - protein, 956 aa, Meleagris gallopavo
  MOD_RES (778)..(778): Any amino acid
MENAHTKTVEEVLAYFGVNESTGLSLEQVKKLKEKWGSNELPAEEGKTLLELVIEQFEDLLVRILLLAACISFVLAWFEEGEETITAFVEPFVILLILVANAIVGVWQERNAENAIEALKEYEPEMGKVYRQDRKSVQRIKARDIVPGDIVEVAVGDKVPADIRITSIKSTTLRVDQSILTGESVSVIKHTDPVPDPRAVNQDKKNMLFSGTNIAAGKAMGVVIATGVNTEIGKIRDEMVATEQERTPLQQKLDEFGEQLSKVISLICIAVWIINIGHFNDPVHGGSWIRGAIYYFKIAVALAVAAIPEGLPAVITTCLALGTRRMAKKNAIVRSLPSVETLGCTSVICSDKTGTLTTNQMSVCRMFILDKVEGDSCSLNEFTVTGSTYAPMGEVHKDDKLIKCSQYDGLVELATICALCNDSSLDYNEAKGVYEKVGEATETALTCLVEKMNVFDTDLKGLSRIERANACNSVIKQLMKKEFTLEFSRDRKSMSVYCTPNKPSRTSMSKMFVKGAPEGVIDRCTHVRVGNAKIPLSSGIKQKIMSVIREWGTGRDTLRCLALATHDNPPRKEEMNLEDSSNFINYETNLTFVGCVGMLDPPRIEVASSIKLCKQAGIRVIMITGDNKGTAVAICRRIGIFVEDEDVSTKAFTGREFDELSLAAQRDACHHARCFARVEPSHKSKIVEFLQSFDEITAMTGDGVNDAPALKKAEIGIAMGSGTAVAKTASEMVLADDNFSTIVAAVEEGRAIYNNMKQFIRYLISSNVGEVVVSLTWXAFSMRHCCVSCISVLAGFILESFLNTADFLSLFYILKVKLSCFIVTLSFQSHFLQCKDDNPDFSGVDCVVFESPYPMTMALSVLVTIEMCNALNSLSENQSLMRMPPWENIWLVGAICLSMSLHFLILYVEPLPIIFQITPLNVTQWLMVLKISLPVILLDETLKYVARNYLEPAILE

SEQ ID NO: 2424 - protein, 1536 aa, Meleagris gallopavo
APRSPERRLLLMHLNEMEKLDKTLFRLEQGFELQFRLGPTLQGKHVTVCTNYPASGDVFDRHKFRTLSWHNPTGKEDDSDKYCKLDLQISGSYQYYFSLGNEKSGGGYIVVDPILRVGADNHVLPLDCVTLQTFLAKCLGPFHEWENRLKVAKETGYNMIHFTPLQKLGLSRSCYSLADQLEVNPEFSSHNKKCTWNDIGALVEKMKNEWNMLCITDVVYNHTEAANSEWLRMHPECGYNLVNSPHLKPAWVLDRALWHLSCMVADGRCIDKGVPPMIENDHHLNCIRKIIWEDIYPKIKLWEFFQVDVNKAVQQFRTLLTKGKGKIGTKSDPNQHLQIVQDPDYRRFGCTVDMNIALATFIPHSNGPGAIEECCNWFRKRIEELNAEQYRQIHHHQEQAVNCLAGTVVYERLAGHGPKLGPISRKYPLVTRYFTYPFKDLTVEEEQSMMHQPDKACYFMAHNGWVMGDDPLRNFAEPGSNVYLRRELICWGDSVKLRYGNKPEDCPYLWAHMKKYTEITAKHFHGIRLDNCHSTPIHVAEYMLDTARKLRADLLVVAELFTGNEELDNIFVNSLGITSLIREAMTAYNSHEEGRLVYRFGGEPVGSFVQPRLRPLVPGIAHALFMDITHDNECPIQHRSAYDALPSAMIVSMACCATGSTKGYDELVPHQISVVSEERFYSTWNPQAHLNSGEVNFQTGILAGRLAMNRLHQELGTKGFNQVYVDQVDEDIVAVTRHCPNTHQSVVAVSRTAFRDPKTSFYSKEVPEMCIPGKIEEVVFEARTIERSTSPYKKDEHFINGLPNFTVELREHIQIKESKIIKQAGTAIKGPNEFVQEIEFENLTPGSVIVFRVSLDPKAQEAVGVLRNHLIQFSPHFKSGSLPDDHSAPILKTLFSSIASKLTLADLNQVLYRCESEEQEDGGGCYNIPNWSSLKYAGLQGLMSVMADVRPKNDLGHPFCDNLRSGDWMIDYVSNRLISRAGACAEVGKWLKAMFVYLKKIPRYLIPCYFDAILVGAYTTLLDVGWHQMSSFVQNGSTFVKHLSLGSIQMCGIGKYACLPDLSPSLHDVPYRLNEITNKKEQCCVTLAAGLPHFSSGIFRSWGRDTFIALRGLMLLTGRYIEARNIILAFGGTLRHGLIPNLLGQGTHARYNCRDAVWWWLQCIQDYCKIVPNGLDILRCPVSRMYPRDDSSPQPAGSVDQPLYEVIQEAMQRHMEGISFRERNAGPQIDQNMRDEGFNIIAGVDHETGFVFGGNRFNCGTWMDKMGESDRARNKGIPATPRDGSAVEIVGLCKSAVRWLLDLSRKNEYPFHGVTIKRYGREETITYDEWNRKIQGHFERLFFVSENPADQNEKHPNLVHKRGIYKDSYGASSPWCDYQLRPNFTIAMVVAPELFTPERAWKALRIAEEKLLGPLGMKTLDPDDMVYCGVYDNALDNDNYNVARGFNYHQGPEWLWPIGYFLRAKLYFSKLIGPEIYAKTVVMIKNVLSRHYVHLESRSSWKGLPELTNENGQYCPFSCETQAWSIGVILEVLYDL

SEQ ID NO: 2425 - protein, 262 aa, Meleagris gallopavo
MAQSVWGYDRENGPEHWHENYPMAKGDKQSPIEINSKDVRHDSSLSSWHASYDPGAAKTILNNGRTCRVVFDDSFDRSVLRGGPLTGAYRLRQLHLHWGSADDHGSEHVIDGVKYAAELHLVHWNPKHGNFAGALKQPDGVAVVGVFLKVGKTPKPEMKRILEEIDNIKTKGKEAPFQHFDPSILFPKSRDYWTYHGSFTTPPCEECITWILLREPIEVSPDQMARLRSLSKNGENEPMCPLVDNWRPLQPVKGRIVRASFK

SEQ ID NO: 2426 - protein, 1172 aa, Meleagris gallopavo
MPEPTKKDETETENALPPPEQKTPQDGGTEKGKDEDDTSVSTPPADGMSKAAERKDSVWSIGESPPEETEKHDDSQRSTLFIEKPQSGSVSVGGNITFIAKVEAKDLLRKPNVKWFKGKWMDLASKAGKHLQLKESFERHTKIHTFEMHIIQAKENYAGNYRCEVSYKDKFDSCSFDLEVTESSQAAPSIDIRSAFKRSNSGDGQDDAGELDFSGLLKRREIKQQEEEPEVDVWELLKNANPSEYEKIAFQYGITDLRGMLKRLKRMRREVKKSAAFSKGLDPAYQVDKGGKVRFMVELADPTVELKWYKNGQEIRPSAKYIFEHKGNQRILFINNCTMTDDARYYVTAGDEKCSTELFVRDPPILVTKGLEDTNTYVGERVELSCEVSEDDANVKWFKNGVELTNEPKSRYRIKVEGKKHTLIIEEAAKNDNATYSVMTTGGQSEAKLSVDLRPLKISLALEDQTVRLGQEIHLKCEISENVEGKWYKNGQLIEASDRVKLYHKGRIHRFIIASAAVDDEGEYMFVPDAYNINIPCKVHVVDPPKLHLDGLGENNTVTVVAGTKLRLEIPITGEPTPKVMWSKGDKSGEDMEGNSGRIRAETYSDSSCLVIDTAEREDSGPFRITLKNEAGEDSALINIKVVDVPDPPQAPNVTEVGEDWCVMTWEPPANDGGSPILGYFIERKKKQSSRWMRLNFELCKETTFEPKKMIEGVAYEVRVFAVNAIGTSKPSMPSKSFVPLAVTSPPTLLAVDSVTDTSVTMKWRPPDHIGAAGLDGYVVEYCFEGTDEWIVANPELTDKTKFTINGLPTGSKILVRVKAVNAAGESEPRYHPQPILVKEVIEPPKIRLPRHLKQTYTRRVGETVNLVIPFQGRPRAKVSWQKNGSPIDKNQINIRNTENDTIIFIRKAERSHSGEYDMKVEVENLVDKATIDIQIVDRPGPPEVVTIEDVWGENVNLSWKPPKDDGNAAITGYTIQKADKKSMEWFTVIEHYHRTSATINELVIGNEYYFRVFSENMCGLSEDATMTKESALIAKDGKVYKYPVYDDFDFTERPLFTQPLVNTFAVAGYNATLNCSVRGNPKPKITWLKNKVAILNDPRYRMFGNQGVCTLEIRKPSPYDGGTYTCRAVNELGEAEVDCKLEVKVIYQGVINPGEPIFMAGNNSQLQNKDF

SEQ ID NO: 2427 - protein, 3135 aa, Meleagris gallopavo
  MOD_RES (2614)..(2614): Any amino acid
MRKHRHLPLAAILGLLLSGFCSVGAQQQAAVRNVAVADIIFLVDSSWNIGKEHFQLVREFLYDVVKALDVGGNDFRFALVQFSGNPHTEFQLNTYPSNQDVLSHIANMPYMGGGSKTGKGLEYLIENHLTKAAGSRASEGVPQVIIVLTDGQSQDDVALPSSVLKSAHVNMIAVGVQDAVEGELKEIASRPFDTHLFNIENFTALHGIVGDLVASVRTSMTPEKAGAKGLVKDITAQESADLIFLIDGSNNIGSVNFQAIRDFLVNLIESLRVGAQQIHIGVVQYSDQPRTEFALNSYSTKADVLDAVKALSFRGGKEANTGAALEYVVENLFTQAGGSRIEEAVPQILVLISGGESSDDIREGLLAVKQASIFSFSIGVLNADSAELQQIATDGSFAFTALDIRNLAALRELLLPNIVGVAQRLILLEAPTIVTEVIEVNKKDIVFLIDGSTALGTGPFNSIRDFVAKIVQRLEVGPDLIQVAVAQYADTVRPEFYFNTHQNRKDVMANVKKMKLMGGTALNTGSALDFVRNNFFTSAAGCRMEEGVLPMLVLITGGKSMDAVEQAAAEMKRNRIVILAVGSRNADMAELQEIAHERDFVFNPNDFRLQFMQAILPEVLSPIRTLSGGMIIHETPSVQVTKRDIIFLLDGSLNVGNANFPFVRDFVVTLVNNLDVGTDKIRVGLVQFSDTPKTEFSLYSYQTKSDIIQRLGQLRPKGGSVLNTGSALNFVLSNHFTEAGGSRINEQVPQVLVLVTAGRSADPFLQVSNDLARAGVLTFAVGVRNADKAELEQIAFNPRMVYFVDDFSGLTALPQELNKPITTYVSGGVEEVPLAPTESKKDILFLIDGSANLLGSFPAVRDFIHRVISDLNVGPDATRVAVAQFSDNIQVEFDFAELPSKQDMLLKVKRMRLKTGKQLNIGVALDEAVRRLFVKEAGSRIEEGIPQFLVLLAAGKSNDEVERPSGALKEAGVVTFAIKAKNADLSELERIAYAPQFILNVESLPRISELQANIVNLLKTIQFQPTVVERGEKKDVVFLIDGSDGVRRGFPLLKTFVERVVESLDIGRDKVRVAIVQYSNVIQPEFLLDAYEDKADLVSAIQALTIMGGSPLNTGAALDYLIKNVFTVSSGSRIAEGVPQFLILLTADRSQDDVRRPSVVLKTSGTVPFGIGIGNADLTELQTISFLPDFAISVPDFSQLDSVQQAVSNRVIRLTKKEIESLAPDLVFTSPSPAGAKRDIVFLVDGSRYAAQEFYLIRDLIERIVNNLDVGFDTTRVSVVQFSEHPHVEFLLNAHSTKDEVQGAVRRLRPRGGQQVNMGEALEFVAKTIFTRPSGSRIEEGVPQFLVILSSRKSDDDLEFPSVQVKQVGVAPLVIAKNMDPEEMVQISLSPDYVFQVSSFQELPSLEQKLLAPIETLSADQIRQLLGDVTVPDVSGEEKDVVFLIDSSDSVRTDGLAHIRDFISRIVQQLDVGPNKVRIGVVQFSNNVFPEFFLKTHKSKNAVLQAIRRLRLRGGYPVNAGKALDYVVKNYFIKSAGSRIEDGVPQHLVVILGDQSQDDVNRPANVISSTSIQPLGVGARNVDRNQLQVITNDPGRVLVVQDFTGLPTLERRVQNILEELPVPTTESPGYPGPGGKKQADIVFLLDGSINLGRDNFQEVLQFVYSIVDAIYEDGDSIQVGLAQYNSDVTDEFFLKDYSTKPQILDAINKVIYKGGRVANTGAAIRHLQAKHFVKEAGSRIDQRVPQIAFIITGGKSSDDGQGASMEVAQKGVKVFAVGVRNIDLEEVSKLASESATSFRVSTAQELSELNEQVLVTLAAAMEEKLCPGTTDVTRDCDLDVILGFDVSDVGAGQNIFNSQRGLESRVEAVLNRITQMQKISCTGSQAPNVRVAIMAQSRGGPVEGLDFSEYQPELFERFQGMRTRGPYFLTAETLKSYQNKFRSAPSGSTKVVIHFTDGTDDSLDQMKTASADLRRQGVHALLFVGLDRVKNFEEVMQLEFGRGFTYNRPLRVNLLDLDFELAEQLDNIAERTCCGVHCKCSGQRGDRGLPGPIGPKGATGDIGYGGYPGDEGGPGERGPPGVNGTQGFQGCPGHRGTKGSRGFPGEKGELGEMGLDGIDGEEGDKGLPGSSGEKGFSGRRGNKGAKGERGERGDRGLRGDPGDSGADNTQRGTRGQKGEIGQMGEPGPAGQRGPDGGVGRQGMAGRRGPIGVKGTKGALGQPGPAGEQGMRGPQGPPGQIGTPGIRGEQGVPGPRAGGGQPGAPGERGRIGPLGRKGEPGNPGPKGPNGQQGPRGEMGDDGRDGIGGPGPKGRKGERGFIGYSGPKGGPGDRGGAGGPGPKGNRGRRGDAGNPGTPGQKGEIGYPGPSGLKGEKGPSISQCALVQNIKDKCPCCYGPKECPVFPTELAFAIDTSSGVGRDVFNRMKQTVLRVVSNLTIAESNCPRGARVALVTYNNEVTTEIRFADARKKSSLLQQIQNFQATLTTKPRSLETAMSFVARNTFKRARSGFLMRKVAVFFSNGETRASPQLNDAVLKLYDAGVTPVFLTSRQDAVLERALEINNTAVGHAIVLPTSGSQLNDTIRRLLTCHICLDVCEPDPICGYGSQRPVFRDXAAPTDVDTDMAFIMDSSASTTPLQFNEMKKYISHLISNMEISSEPKISQHHARVAVLQQAPYEHETNSSFPPVKTEFSLTDYGSKQKIINYLHNQMTQLYGTMAMGSAVEHTVAHIFESAPNPRDLKVIVLMITGKMEKQELEDLREAVIDAKCKGYLFVILGIGRNVDVKNIYSLASEPNDVFFKLVSKPGELHEEPLLRFGRLLPSFIRSDFAFYLSPEIRKQCKWLQGDQTPKSPGHTGQKAVYVAPNATITQTISTTTTLSTTIKPAASTSAHAKTTTASTTAQTRATERPTESTTVQVNATVQGQGSTAANTKATSRTTASTTAAAASGRRRQGAKMNDIQITDVTENSARLRWASPEPHSAYVFDLTITLAHDHSLVLKQNVTGSERVIGGLRSGQKYLVFITGYLKSQPKVTYTGTFSTKTPAQPKVALANMMLNTEPLEGPENVMDICLLQKEEGTCRDFVLKWHYDVKTKSCARFWYGGCGGNENRFNTQKECEKACSPGNISPGVVTTIGT

SEQ ID NO: 2428 - protein, 759 aa, Meleagris gallopavo
  MOD_RES (728)..(728): Any amino acid
PYSLLFLLAEIDEATRSFAEKVFASEVKDEATRQEISPFDVEEICPISRHEMRTHMMLQESSSAAEKRQRRKKKKPFCPVTSALSLQWPQVSWRWRPGDLYGKKTGLSTIDEIISTSPQYQSVPDFQRVQITGDYASGVTVEDFEVVCKGLYRALCIREKYMQKSLQRFPRTPSQYLRTIEGEVWRASDAGPVFTPPVKDGQDPFETGNLPEDLGYHVQMKDGIVYIYSDKAAAGRNEPKDLPYPNLKHFVDDMNFLLALIAQGPVKTYSHRRLKFLSYKFQVHEMLNEMEEMKELKNNPHRDFYNCRKVDTHIHAAACMNQKHLLRFIKKSYRVDADRVVYDAKGEKLTLKQLFQKLNLHPYDLTVDSLDVHAGRQTFQRFDKFNAKYNPVGASELRDLYLKTENTINGEYFATIIKEVGSDLEDAKYQHAEPRLSIYGRSAEEWPKLANWFNRHRVYSPNMKWMIQVPRIYDVFRSRNFLPHFGKMLENIFVPVFEATVNPQAHKELSVFLRHITGFDSVDDESKHSGHMFSTKSPKPEQWTSAKNPSYTYYVYYMYANILVLNNLRRQRGMNTFLFRPHCGEAGAITHLLAAFMTADNISHGLNLKKSPVLQYLYFLAQIPIAMSPLSNNSLFLEYAKNPLLDFHQKGLMVSLSTDDPMQFHYTKEPLMEEYAIAAQVFKLSTCDMCEIARNSVLQCGLSHEEKAKFLGEKYQEEGPHGNDVRKXALRAARKESLGGEGSDILDTAGQEEYSAMRD

SEQ ID NO: 2429 - protein, 366 aa, Meleagris gallopavo
STMTHQYPALTAEQKKELSDIALRIVAPGKGILAADESVGSMAKRLNQIGVENTEENRRLYRQILFSADSRVKKCIGGVIFFHETMYQKADDGTPFVQMIKDKGIVVGIKVDKGVVPLAGTDGETTTQGLDGLSERCAQYKKDGADFAKWRCVLKISDNTPSALAIMENANVLARYASICQQNGIVPIVEPEILPDGDHDLKRCQYVTEKVLAAVYKALSDHHVYLEGTLLKPNMVTPGHSCPTKYSPEEIAMATVTALRRTVPPAVPGVTFLSGGQSEEEASINLNAINTCPLVRPWALTFSYGRALQASALSAWRGQRDNANAATEEFVKRAEVNGLAALGKYEGSGDDSGAAGQSLYVANHAY

SEQ ID NO: 2430 - protein, 337 aa, Meleagris gallopavo
MLSRFARPAAVLCRGLATSAQNNAKVAVLGASGGIGQPLSLLLKNSPLVSRLSLYDIAHTPGVAADLSHIETRANVKGFLGPEQLPECLKGCDVVVIPAGVPRKPGMTRDDLFNTNASIVATLTTACAKHCPEAMICIISNPVNSTIPITSEIFKKHGVYNPNRIFGVTTLDIVRANTFVAELKGLDPARVSVPVIGGHAGKTIIPLISQCTPKVDFPQDQLEKLTGRIQEAGTEVVKAKAGAGSATLSMAYAGARFVFSLVDAMNGKEGVIECSFVRSEETESPYFSTPLLLGKNGIEKNLGIGKITPFEEKMVAEAMAELKASIKKGEDFAKNFK

SEQ ID NO: 2431 - protein, 655 aa, Meleagris gallopavo
GGPGEEGEAGPEPGTQHGSQEEEEEEEANTKEVASEGKEPTVSAPEGGEEEDEQSSEEDDEQGESEEDEGEAESEEEGKSAEEGESEEDGASPEGLEDGAEGTDTEETSGENDHGKAAAGHEGEQSSPGEPSNSRRPSNSRRPTGSSGRPPGRQGTISRNGEPSQPQCLQSSPSSLGTQTAELLKRCPGCGQGVSDQPKAASSEEVEDASEPTKRDRSHLENTLKLNEDKPADDFSGVLQRLRKIYHSSIKPLEQSYRYNELRQHEITDGEITSKPMVLFLGPWSVGKSSMINYLLGLDDTPYQLYTGAEPTTSEFTVIMHGPKLKTIEGIVMAADSARSFSPLEKFGQNFLEKLIGIEVPHKLLERVTFVDTPGIIENRKQQERGYPFNDVCQWFIDRADLIFVVFDPTKLDVGLELEMLFRQLKGRESQIRIILNKADSLATQELMRVYGALFWSLAPLINVTEPPRVYVSSFWPHEYHPDTHKDLFLKEEISLLEDLNQVIENRMENKIAFIRQHAIRVRIHALLVDRYLQTYKDKMTFFSDGELVFRDIVEDPDKFFIFKSILAKTNVSKFDLPNREAYKDFFGINPITGFKLLSQQCSYMGGCYLEKIEKAITRELPDLLGSIGLGKKPNVLSCDITGCGETPKNRYKKP

SEQ ID NO: 2432 - protein, 1008 aa, Meleagris gallopavo
WNPTELPAEEGKSLWELVLEQFEDLLVRILLMAAFLSFILAWFEEGEESTTAFVEPIVIIMILIANAVVGVWQERNAESAIEALKEYEPEMGKVIRADRSGVQRIRARDIVPGDIVEVAVGDKVPADVRIIEIRSTTLRVDQSILTAGESMSVIKHADPIPDPRAVNQDKKNMLFSGTNIAAGKAVGIVIATGVYTEIGKIRNQMVETEPEKTPLQQKLDEFSQQLSKVIFLVCIAVWVINISHFSDPVHGGSWFRGAIYYFKTSVALAVAAIPEGLPAVITTCLALGTRRMAKKNAIVRSLPSVETLGCTSVICSDKTGTLTTNQMSVCRMFIMEKVEGTQCSLHEFSITGSTYAPEGEILKDKQLVKCGQYDGLVELATICALCNDSSLDYNESKKVYEKVGEATETALTCLVEKMNVFNTDTSKLSKVERANACNSVIKHLMRKECTLEFSRDRKSMSVYCTPTGPGHNSTGSKMFVKGAPESVIERCTHVRVGTAKVPLTTPVREKILSQIRDWGMGVDTLRCLALATHDAPVHRETMQLHDSTTFAHYETNLTFVGCVGMLDPPRKEVASSIEMCRKAGIRVIMITGDNKGTAVAICRRIGIFTETEDVAGKAYTGREFDELSPEAQRQACREARCFARVEPAHKSRIVEYLQSFNEITAMTGDGVNDAPALKKAEIGIAMGSGTAVAKSAAEMVLSDDNFSTIVSAVEEGRAIYNNMKQFIRYLISSNVGEVVCIFLTAILGLPEALIPVQLLWVNLVTDGLPATALGFNPPDLDIMDKLPRNPKEPLISGWLFFRYLAIGVYVGLATVGAATWWFLYDTEGPQVSFHQLRNFMRCTEDNPIFEGVDCEIFESRYPTTMALSVLVTIEMCNALNSVSENQSLLRMPPWLNIWLLGAIVMSMALHFFILYVKPMPLIFQVTPLSWPQWVVVLKISLPVILLDEGLKYLSRNHLEGILRTVRNTWSGEHQLKTCRTPEQGRRGQEMNDTKETLQAKGPQTCNSD

SEQ ID NO: 2433 - protein, 1247 aa, Meleagris gallopavo
LVKPPQKSSIRGVHITQFVDKIPKGCSTPDFERKPVSLTLQEGKNAIFRAVVKGVPAPEVKWKRAKGEINDPAKYLMFYSPATSEHILQINKITAGDSDLYRCFAVNEYGEASCSAGLRIIQVGFKRKANYVTGHPAEELKKSLQDLKKTLKKRAPLPKQKEVDKEAIFQLLLHADKKDYERICIKYGISDFRGMLRALQDLRKDTENEQAKLIHSIKHMEHIKVNKDGSASFSVEMDLKSASSNVYLLKDGEKVRYGTGDEYRKYYLRQIGKRYHFIVNDVHPEDAGLYQVRVEDVPIFSTELDAESIPVRFQKPLTDLRCHEKEDVVFDCVLRTPCFDAVWLHKAHPLEASEKHQISVSPDGLIHQLIIKNAATSDNGLYTLDTGLCSSRAWLLVEHAKEAKIQDEEHEKSDHQKGAPDKDRDAGMKRDGWYRSDQGVSQGYSTDADGEYGRHDSTLGAVDVDMGDAEVITCCEVPRCHPGAWTKFSIKLTSMDGVSLEKEGLVHKLVISKVEDIHAGKYRFEAGDIKTEASIFVEDPPQVDEILLKNLTSVPTVAKAGEKVVIKIPFEGRLPVRAMWLKDKIELGDDSRIRVDKTDTFTMLSISSAERKDCGDYKVRLKNDSGILDIDLKVEVTDKPLPPAGPLKIVGSTANDVTIQWNPPKDDGGKPVQNYIIEKQQVGKSGWVTLGETPRSCTTFTTSKVEQDMSYYFRVRAVNAEGTSDALESDEVVTISKATPGAPDPPEIIGVSKDTITISWKTPRKTGSSRILGYIVQKRKKGSMTWVPVNSVPIADKKLKINDLKKGVQYEFCVAAVNASGIGDISAPSQAAFARDSTKPPGKVRDLKMTISDSSSVTLTWNVPEAKEGSGAKGYNVEIRSSNNLSWTKCNIFPIETTTYKVKGLKTKETYFVRVRAINDCGPGEATELEAFTEAVPPVVSPRFIIDKTVKNFLVIKAGNAIRVNIPFEAPPDSVLTWLKDGVPLPSRAKISTQDGTSQLLIKAAEFTDSGIYTVELVSGTGKRETFSFQVQVTDIPQPPGPIELIENVPNIVTVTWEPSTSEKWESNLFYTVFKRESQKGLWHVVGDLIYTNKFTYTKVIPGRDYYFRVVAKNHLGSSRPSDTVQPWRIRKQKADIQVRPQRYKGVNQNQPPRFLVPLKPHVVITGSECRMSCAVGGHPPPKITWYKDGRDLSNNPSYFGTNNFGVCSLVIFSVSKADEGDYTVEATNDSGRAFSKASLTIKDSCL

SEQ ID NO: 2434 - protein, 431 aa, Meleagris gallopavo
IDKRTIEKFEKEAAEMGKGSFKYAWVLDKLKAERERGITIDISLWKFETTKYYITIIDAPGHRDFIKNMITGTSQADCAVLIVAAGVGEFEAGISKNNGQTREHALLAYTLGVKQLIVGINKMDSTEPAYSEKRYDEIVKEVSAYIKKIGYNPATVPFVPISGWHGDNMLEPSPNMPWFKGWKVERKEGNASGVSLLEALDTILPPTRPTDKPLRLPLQDVYKIGGIGTVPVGRVETGILRPGMVVTFAPVNITTEVKSVEMHHEALSEALPGDNVGFNVKNVSVKDIRRGNVCGDSKSDPPQEAAQFTSQVIILNHPGQISAGYSPVIDCHTAHIACKFAELKEKIDRRSGKKLEDNPKSLKSGDAAIVEMIPGKPMCVESFSQYPPLGRFAVRDMRQTVAVGVIKNVEKKSGGAGKVTKSAQKAQKAGK

SEQ ID NO: 2435 - protein, 434 aa, Meleagris gallopavo
MAVERIHAREILDSRGNPTVEVDLYTHKGMFRAAVPSGASTGIYEALELRDNDKSRFLGKGVLQAVDHINSTVAPAIVGSGLSVVDQEKIDNLMLEMDGTENKSKFGANAILGVSLAVCKAGAAEKDVPLYRHIADLAGNSDLILPVPAFNVINGGSHAGNKLAMQEFMILPVGAESFRDAMRIGAEVYHNLKSVIKEKYGKDATNVGDEGGFAPNILENSEALELLKEAIDKAGYTDKIVIGMDVAASEFYRDGKYDLDFKSPDDPSRYISADELGDLYQSFVRDYPVVSIEDPFDQDDWEAWSKFTANVGIQIVGDDLTVTNPKRIERAVEEKACNCLLLKVNQIGSVTEAIQACKLAQENGWGVMVSHRSGETEDTFIADLVVGLCTGQIKTGAPCRSERLAKYNQLMRIEEELGDEARFAGHNFRNPSVL

SEQ ID NO: 2436 - protein, 508 aa, Meleagris gallopavo
LMRIFVDIEKLPWSKAWDITKRTFAYTNHTVLPEALERWPVDLVEKLLPRHLEIIYEINQRHLDHIASLFPDDVDRLRRMSLIEEGGTKRINMAHLCIVGSHAVNGVAKIHSEIIKSEVFRDFAELEPDKGMGGSARGSQPWGPSVLCGQHVAVLLSQKIGEDYVRDLSQLAKLHEFVDDDLFIREVAKVKQENKVKFALYLEKEYGVKINPSSMFDVHVKRIHEYKRQLMNCLHIITMYNRIKRDPAKLFVPRTVIIGGKAAPGYHMAKMIIKLINAVAQVVNNDPVVGSKLKVIFLENYRVSLAEKVIPATDLSEQISTAGTEASGTGNMKFMLNGALTIGTMDGANVEMAEEAGEENLFIFGMRVEDVVELDKDGYNAQQYYDRLPELKQAVDQIRSGFFSSDEPDLFRDVVDMLFHHDRFKVFADYEAYVKCQEKVSELYLNSKAWTKMVIRNIAAAGKFSSDRTIKEYARDIWHVEPSDLKIPPPNEPRGAEDRTPNGTAARA

SEQ ID NO: 2437 - protein, 142 aa, Meleagris gallopavo
MVLSAADKNNVKGIFTKIAGHAEEYGAETLERMFITYPPTKTYFPHFDLSHGSAQIKGHGKKVVAALIEAVNHIDDIAGTLSKLSDLHAHKLRVDPVNFKLLGQCFLVVVAIHHPAALTPEVHASLDKFLCAVGTVLTAKYR

SEQ ID NO: 2438 - protein, 178 aa, Meleagris gallopavo
KKRRAATARRQHLKSAMLQLAATEIEKEAAAKEVEKQNYLAEHCPPLSLPGSMQELQELCKKLHAKIDSVDEERYDTEVKLQKTNKELEDLSQKLFDLRGKFKRPPLRRVRMSADAMLRALLGSKHKVNMDLRANLKQVKKEDTEKEKDLRDVGDWRKNIEEKSGMEGRKKMFEAGES

SEQ ID NO: 2439 - protein, 298 aa, Meleagris gallopavo
VYPLPPAGPSSYSVGTMSERFDCYYCRDSLQGKKYVQKEGRHCCVKCFEKICANTCIECKKPIGADSKELHFKNRYWHDSCFRCVKCYTSLVNEPFMLRENNKVWCSNCTATEDAPRCKGCFKPIIAGDQNVEYKKMVWHKDCFTCSQCKQVIGSGSFFPKGDEFYCVSCHEHKFAKTCAKCKNPITSGGLTYQEQPWHSECFICSNCKRQLGGKRFTAVEDQFYCVDCYKECVAKKCAGCKNPITAGFGRGTSVVNYEDESWHDYCFKCTKCARGLANKRFVCHNGKIYCAECPKRL

SEQ ID NO: 2440 - protein, 634 aa, Meleagris gallopavo
MSGKGPAIGIDLGTTYSCVGVFQHGKVEIIANDQGNRTTPSYVAFTDTERLIGDAAKNQVAMNPTNTIFDAKRLIGRKYDDPTVQSDMKHWPFRVVNESGKPKVQVEYKGEMKTFFPEEISSMVLTKMKEIAEAYLGKKVQNAVITVPAYFNDSQRQATKDAGTITGLNVMRIINEPTAAAIAYGLDKKGTRAGEKNVLIFDLGGGTFDVSILTIEDGIFEVKSTAGDTHLGGEDFDNRMVNHFVEEFKRKHKRDIAGNKRAVRRLRTACERAKRTLSSSTQASIEIDSLFEGIDFYTSITRARFEELNADLFRGTLEPVEKALRDAKLDKGQIQEIVLVGGSTRIPKIQKLLQDFFNGKELNKSINPDEAVAYGAAVQAAILMGDKSENVQDLLLLDVTPLSLGIETAGGVMTALIKRNTTIPTKQTQTFTTYSDNQSSVLVQVYEGERAMTKDNNLLGKFDLTGIPPAPRGVPQIEVTFDIDANGILNVSAVDKSTGKENKITITNDKGRLSKDDIDRMVQEAEKYKAEDEANRDRVGAKNSLESYTYNMKQTVEDDKLKGKISDQDKQKVLDKCREVISWLDRNQMAEKEEYEHKQKELEKLCNPIVTKLYQGAGGAGAGGSGGPTIEEVD

SEQ ID NO: 2441 - protein, 1021 aa, Meleagris gallopavo
KSRLRRRREREITEITSEEEEEIEMVQHVHREFSPPSRLLRRRRSLSPTYIELMRPVSELIRPRSRPPEESERRSPTPERTRPRSPSPVSTERSLSRFERMARFDIFSRYESMKSALKTQKTMERKYEVLTQQPFTLDHAPRITLRMRSHRVPCGHNTRFILNVQSKPTADVKWYHNGIELQESSKIHFSNTSGVLTLEILDCHIDDSGTYRAVCTNYKGECSDYATLDVTGGDYTTYSSQRRDEEVPRSILPDLTRTEAYAVSSFKKASATEASSSVREVKSEVSATRESLLSYEHHASSEEKTTASEEKSLEERTVRKAFKSTLPATILTKPRSITVSEGETARFSCDVDGEPAPTITWVRAGQPIVSSRRFQITRTQYKSTFEISLVQISDEGSYTVVVENSEGRQEAHFTLTVQRKRIPEKAITSPPRIKSPEPRVKSPEPVKSPKRVKSPEPISTHPKAKSPPGDKTAPVEKVQLPTASPPKIKEQLKAETLGDKVKLSCAVESSALSVREVAWYKDGKKLKEDHHFKFHYAADGTYELKIHDLTESDKGEYTCEIMGEGGISKTNFQFTGQVFKNIHSQVRSVSETHKLVEKGDEVLTVSTQKKSSVAAEEKSAVEEVIKKSIVTEDVKQLKTEIRASSTQMTMSEGQKVTLKANIPGASEVKWVLNGMELRNSDDYRYGISGSDHTLTIKKASNKDEGILTCEGKTDEGVIKCQYVLTFSKERSNEPAFIMQPKSQNVNEGQDVLFTCEVSGDPSPEIEWLRNNQPIAVSSHMRVTRSKNTYSLEIRNAAVSDTGKYTVKAKNYHGQCSATASLTVFPLIEEPPKEVVLKTSGDASMHESFSSQSFQMAASKQEASFSSFSSSSMTETKFASMSAKSMSSMKESFVEMSSSSIMGKSSMAQLESSTSKMLKSGVRGVPPKIEALPSDISIDEGKVLTLSCAFSGEPAPEITWYCRGRKITSQDQQGRFHIETSEDLTTLIIMDVQKNDGGIYTLNLGNEFGTDSATVNINIRSI

SEQ ID NO: 2442 - protein, 282 aa, Meleagris gallopavo
AIPPSYADLGKSARDIFNKGYGFGLVKLDVKTKSASGVEFTTSGSSNTDTGKVNGSLETKYKWAEYGLTFTEKWNTDNTLGTEIAIEDQIAKGLKLTFDTTFSPNTGKKSGKIKSAYKRECLNLGCDVDFDFAGPAIHGSAVFGYEGWLAGYQMTFDSAKSKLTRNNFSVGYKTGDFQLHTNVNDGSEFGGSIYQKVSDNLETAVNLAWTAGSNSTRFGIAAKYKLDSTASISAKVNNSSLVGVGYTQTLRPGVKLTLSALIDGKSINAGGHKLGLGLELEA

SEQ ID NO: 2443 - protein, 293 aa, Meleagris gallopavo
MPLAGTPAPLKRKKPTKLIGKLTHEVMPQEVTKLNLGKKISIPRDVMLEELSLLTNKGSKMFKLRQLRVEKFIYENNPDAFSDNSVDHFQRFIPSGGHYGEDAHGYGHGRMVGGVTAGQHGSSKQHYSTVPPRPGSKGGPGNSEGEHAEKSAGSAGEGGHGTEKDGKSGGKKPLLKTYISPWERAMGISPEDKSQLTIDLLSYSPKADFPHYKSFNRTAMPYGGYEKAAKRMTFKVPQFDICPLLPESIVLYNQNFRNRPSFNRTPIPWMPSGESSEYHTDINVPRSGETEEL

SEQ ID NO: 2444 - protein, 422 aa, Meleagris gallopavo
SSFRADMLLSARGEGRATPTSCSWWSHVEMGPPDPILGVTEAFKRDTNSKKMNLGVGAYRDDNGKPYVLNCVRKAEAMIASKKMDKEYLPIAGLADFTRASAELALGENSEAFKSGRYVTVQGISGTGSLRIGANFLQRFFKFSRDVYLPKPSWGNHTPIFRDAGLQLQAYRYYDPKTCSLDFTGAMEDISKIPEKSIILLHACAHNPTGVDPRQEQWKELASVVKKRNLLVYFDMAYQGFASGDINRDAWAVRHFIEQGIDVVLSQSYAKNMGLYGERAGAFTVICRDAEEAKRVESQLKILIRPMYSNPPINGARIASLILTTPDLRKEWLVEVKGMADRIISMRTQLVSNLKKEGSSHNWQHITDQIGMFCFTGLKPEQVERLTKEFSIYMTKDGRISVAGVASSNVGYLAHAIHQVTK

SEQ ID NO: 2445 - protein, 539 aa, Meleagris gallopavo
MTGKTAPAAAKKAPASKKAPAPAPKEEPAHTPKEEPAHTPKEGPAHTPKEEPAHTPKEEHAPAPAAETPPAPEHPPDAEQPAAPASEHAPAHEAEATPAHEEGSPPAAPAEAPAPQPEPEKPKEEPPSIPLSLAVEEVTENSVTLTWKAPEQTGKSSLDGYVVEICKDGSTDWTAVNKAPFLSTRYKIQDLGSGEKVHVRVKAISASGTSVPATLEQPILIREITDLPRIRLPRQLRQVYVRHVGEAVNLLIPFQGKPQPQVTWTKDNQPLDTSRVNIRNTDKDTIFFIRTAQRSDSGKYQLAVRINGAEDKAVLDIRVIELPGPPQNLKLVDVWGFNVALEWSPPADNGNSEIKGYTVQKSDKKSGKWFTVLERCTRTSCTISDLIIGNTYSFRVFSENACGLSETAAVASGVAHIKKTKTVYQPQKIPERDMMEPPKFTQPLTDRATTRGYSTHLFCSVRGFPQPKIIWMKNKMEIREDPKYIAMIEQGVCSLEIRKPSPFDAGVYTCKAVNPLGEASVDCKLDVKSKVLVEEELKG

SEQ ID NO: 2446 - protein, 646 aa, Meleagris gallopavo
MSKGPAVGIDLGTTYSCVGVFQHGKVEIIANDQGNRTTPSYVAFTDTERLIGDAAKNQVAMNPTNTVFDAKRLIGRRFDDSVVQSDMKHWPFTVVNDAGRPKVQVEYKGETKSFYPEEISSMVLTKMKEIAEAYLGKTVTNAVVTVPAYFNDSQRQATKDAGTIAGLNVLRIINEPTAAAIAYGLDKKVGAERNVLIFDLGGGTFDVSILTIEDGIFEVKSTAGDTHLGGEDFDNRMVNHFIAEFKRKHKKDISENKRAVRRLRTACERAKRTLSSSTQASIEIDSLYEGIDFYTSITRARFEELNADLFRGTLDPVEKALRDAKLDKSQIHDIVLVGGSTRIPKIQKLLQDFFNGKELNKSINPDEAVAYGAAVQAAILSGDKSENVQDLLLLDVTPLSLGIETAGGVMTVLIKRNTTIPTKQTQTFTTYSDNQPGVLIQVYEGERAMTKDNNLLGKFELTGIPPAPRGVPQIEVTFDIDANGILNVSAVDKSTGKENKITITNDKGRLSKEDIERMVQEAEKYKAEDEKQRDKVSSKNSLESYAFNMKATVEDEKLQGKISDEDKQKILDKCNEIINWLDKNQTAEKEEFEHQQKELEKVCNPIITKLYQSAGGMPGGMPGGFPGGGAPPSGGASSGPTIEEVD

SEQ ID NO: 2447 - protein, 185 aa, Meleagris gallopavo
SLGCKNAQYGQILKELMQTPNFRVTVVQEADTVEICGALKNIVAVGAGFCDGLGFGDNTKAAVIRLGLMEMISFAKIFCKGPVTPSTFLESCGVADLITTCYGGRNRKVAEAFAKTGKSIEQLEKEMLNGQKLQGPQTSAELNHILKTKNMVDKFPLFTAVYQICYEGKPVSDVIKCLQNHPEHM

SEQ ID NO: 2448 - protein, 192 aa, Meleagris gallopavo
MAPKKDVKKPAAAAAPAPAPAPAPAPAPAKPKEPAIDLKSIKIEFSKEQQDDFKEAFLLFDKTGDAKITLSQVGDIVRALGQNPTNAEMNKILGNPSKEEMNAKKITFEEFLPMLQAAANNKDQGTYEDFVEGLRVFDKEGNGTVMGAELRHVLATLGEKMTEEEVEELMKGQEDSNGCINYEAFVKHIMSV

SEQ ID NO: 2449 - protein, 351 aa, Meleagris gallopavo
GRGQRELIIGDRQTGKTSIAIDTIINQKRFNDGTDEKKKLYCIYVAIGQKRSTVAQLVKRLTDADAMKYTIVVSATASDAAPLQYLAPYSGCSMGEYFRDNGKHALIIYDDLSKQAVAYRQMSLLLRRPPGREAYPGDVFYLHSRLLERAAKMNDSFGGGSLTALPVIETQAGDVSAYIPTNVISITDGQIFLETELFYKGIRPAINVGLSVSRVGSAAQTRAMKQVAGTMKLELAQYREVAAFAQFGSDLDAATQQLLNRGVRLTELLKQGQYVPMAIEEQVAVIYAGVRGHLDKLEPSKITKFESAFLAHVLSQHQALLSTIRTEGKISDQTEAKLKEIVTNFLSTFEA

SEQ ID NO: 2450 - protein, 386 aa, Meleagris gallopavo
KNCWTQRLIGASSRSAEYPDLRKHNNCMASNLTPAIYARLCDKATPNGWTLDQCIQTGVDNPGHPFIKTVGMVAGDEETYEVFAELFDPVIQERHNGYNPRTMKHVTDLDASKIKFGHFDERYVLSSRVRTGRSIRGLSLPPACTRAERREVEKVTVEALNGLTGDLSGRYYRLSEMTEKEQQQLIDGSGMGEQPVAPSPIYRLVLAGDSGAGAPGRGGLPGNEKTFLIWINEEDHTRVISMEKGGNMKRVFERFCRGLKEVERLIQERGWEFMWNERLGYILTCPSNLGTGLRAGVHIKLPLLSKDSRFPKILENLRLQKRGTGGVDTAATGNVFDISNLDRLGKSEVELVQLVIDGVNYLIDCERRLEKGQDIRIPSPVPQFRH

SEQ ID NO: 2451 - protein, 425 aa, Meleagris gallopavo
GENTVRTIAMDGTEGLVRGQKVLDSGAPIRIPVGPETLGRIMNVIGEPIDERGPITTKQFAAIHAEAPEFVEMSVEQEILVTGIKVVDLLAPYAKGGKIGLFGGAGVGKTVLIMELINNVAKAHGGYSVFAGVGERTREGNDLYHEMIESGVINLKDATSKVALVYGQMNEPPGARARVALTGLTVAEYFRDQEGQDVLLFIDNIFRFTQAGSEVSALLGRIPSAVGYQPTLATDMGTMQERITTTRKGSITSVQAIYVPADDLTDPAPATTFAHLDATTVLSRAIAELGIYPAVDPLDSTSRIMDPNIVGPEHYDVARGVQKILQDYKSLQDIIAILGMDELSEEDKLTVARARKIQRFLSQPFQVAEVFTGHMGKLVPLKETIKGFKQILAGEYDHLPEQAFYMVGPIEEAVAKAEKLAEEHA

SEQ ID NO: 2452 - protein, 1087 aa, Meleagris gallopavo
MTTKAPTFTQPLQSVVALEGSAATFEAHISGFPVPEVSWYRDGQVLSAATLPGVQISFSDGRAKLVIPSVTEANSGRYTIQATNGSGQATSTAELLVTAGTAPPNFSQRLQSMTARQGSQVRLDVRVTGIPTPVVKFYRDGVEIQSSPDFQILQEGDLYSLIIAEAYPEDSGTYSVNATNNVGRATSTAELLIQGEEEAVPAKKTKTIVSTAQISQTRQARIEKKIEAHFDARSLTSVEMVIEGATAQQLPHKAPPRMPPRPTSKSPTPPVITAKAQMARQQSPSPVRQSPSPVRHVRAPTPSPVRSVSPAGRISTSPIRPVKSPSPIRKAQVVTPGAEVLPPWRQEGYSATTEAQMKETRVSTSATEVRTEERWEGRYGLQEQVTISGAAAGEVAAGAKEVRRDSEKTAAVATVVAAVDQAMVREPAPSVVEQAAKRTAMTAVHVQPVQEQMRKEATVVVTSDKATKQTVISRTREGIVTSQEQRHISREKVRKEPEKTPVPTVIIATDKAKEQERISTAREEISVRHEQVHVSHEQIRREDVKPSVPKVVITTDKPKAPVLISKSKEGIATKQERVSISHEKIKKEAKKTTVVPKIIAPVTVPRTREEITAKQEQMHLAYDQIEAGKRAEAVATVVAAVDQARVRSPWETEQVDETYVKQKTLEYGYKEHAVKDHEAQAEHRVATKEVKTVYIPPEKHIPAAEKKEVHVSTEIKRETEAKIEKTIHIEHPRPRTASPHFTVSKIAVPKPDHTYEVSIAGSAMATLEKELSAASAAQKITKPVKPPQLKPHEVKIKPESAPPQFPFTEVAETKKEVDVSIKGEAVREDHLLLRKESEAKVTETARVPVPAEIPVTPPTLVWGLKNKTVTEGESVTLECHISGHPQPTVTWYREDYKIESSMDFQITFKAGLARLVIREAFAEDSGRFTCTATNKAGSVSTSCHLHVKVSEETETRETISEKVVTEEKSYVETKDVVMEDVSAAAEEVSGEPVPPFFIRKPVVHKLIEGGSIIFECQVGGNPKPHVLWKKGGVPLTTGYRYKVSYKRETGECKLEISMTFADDAGEYTIVIRNKFGEASATVSLLEE

SEQ ID NO: 2453 - protein, 147 aa, Meleagris gallopavo
MVHWSAEEKQLITGLWGKVNVADCGAEALARLLIVYPWTQRFFASFGNLSSPTAILGNPMVRAHGKKVLTSFGDAVKNLDNIKKSFAQLSKLHCDKLHVDPENFRLLGDILIVVLASHIGKDFTPASQAAWQKMVRVVAHALAHEYH

SEQ ID NO: 2454 - protein, 265 aa, Meleagris gallopavo
LLLQVQHASKQITAEKQYKGIIDCVIRIPKEQGIISFWRGNLANVIRYFPTQALNFAFKDKYKQIFLGGVDRHKQFWRYFAGNLASGGAAGATSLCFVYPLDFARTRLAADVGKGVAEREFTGLGDCIVKIFKSDGLRGLYQGFNVSVQGIIIYRAAYFGVYDTAKGMLPDPKNVHIIVSWMIAQSVTAAAGLVSYPFDTVRRRMMMQSGRKGADIMYKGTIDCWKKIAKDEGSKAFFKGAWSNVLRGMGGAFVLVLYDEIKKYV

SEQ ID NO: 2455 - protein, 374 aa, Meleagris gallopavo
SKGLGAASHPPLTPPPHIFPTSGQSGAGNNWAKGHYTEGAELVDSVLDVVRKEAESCDCLQGFQLTHSLGGGTGSGMGTLLISKIREEYPDRIMNTFSVVPSPKVSDTVVEPYNATLSVHQLVENTDETYCIDNEALYDICFRTLKLTTPTYGDLNHLVSATMSGVTTCLRFPGQLNADLRKLAVNMVPFPRLHFFMPGFAPLTSRGSQQYRALTVPELTQQVFDAKNMMAACDPRHGRYLTVAAVFRGRMSMKEVDEQMLNVQNKNSSYFVEWIPNNVKTAVCDIPPRGLKMAVTFIGNSTAIQELFKRISEQFTAMFRRKAFLHWYTGEGMDEMEFTEAESNMNDLVSEYQQYQDATAEEEEDFGEEAEEEA

SEQ ID NO: 2456 - protein, 716 aa, Meleagris gallopavo
IKQATWLSVSNIIQLGGTVIGSARCKAFTTRQGRLRAAHNLVEHGITNLCVIGGDGSLTGADIFRAEWAGLLDELLRDGLISEEVAKANGRLNVVGLVGSIDNDFCGTDMTIGTDSALHRIMEVIDAITTTAQSHQRTFVLEVMGRHCGYLALVSGLASGADWLFIPESPPEDGWEDLMCERLGETRSRGSRLNIIIIAEGAIDRNGKPISSNYVKDLVVQRLGFDTRVTVLGHVQRGGTPSAFDRVLSSKMGMEAVMALLEATPDTPACVVSLSGNQSVRLPLMECVQVTKDVQKAMDEKRFDEAIQLRGRSFENNWNIYKLLAHQKPAQEKSPFSLAILNVGAPAAGMNAAVRSAVRISICRGHTVYAVSDGFEGLAKGQIREVGWHDVAGWLGRGGSMLGTKRTLPKTCMEKIVENVRKFNIQALLVIGGFEAYEGVLQLVEARGQYEELCIIMCVIPATISNNVPGTDFSLGSDTAVNAAMESCDRIKQSASGTKRRVFIVETMGGYCGYLSTVTGIAVGADAAYVYEDPFTIHDLKANVEHLTDKMKTDIQRGLVLRNEKCHEHYTTEFLYNLYSSEGKGIFDCRINVLGHLQQGGAPTPFDRNYGTKLGVKAVLWMSEKLQEAYRKGRVFANSADSACVIGLRKKVVAFSPVTELKKVTDFEHRLPQEQWWLNLRLMLKMLANYQISLTEYISGKMEHVTRRTLSIEKGF

SEQ ID NO: 2457 - protein, 864 aa, Meleagris gallopavo
KVNFTVDQIRAIMDKKANIRNMSVIAHVDHGKSTLTDSLVCKAGIIASARAGETRFTDTRKDEQERCITIKSTAISLFYELSENDLAFIKQSKDGSGFLINLIDSPGHVDFSSEVTAALRVTDGALVVVDCVSGVCVQTETVLRQAIAERIKPVLMMNKMDRALLELQLDPEELYQTFQRIVENVNVIISTYGEGESGPMGNIMIDPVLGTVGFGSGLHGWAFTLKQFAEMYVAKFAAKGDAQMNPSERAKKVEDMMKKLWGDRYFDPATGKFSKSATGPDGKKLPRTFCQLILDPIFKVFDAIMTFKKEEAAKLIEKLDIKLDSEDKDKEGKPLLKAVMRRWLPAGDALLQMITIHLPSPVTAQKYRCELLYEGPPDDEAAIGIKNCDPKGPLMMYISKMVPTSDKGRFYAFGRVFSGLVSTGLKVRIMGPNYTPGKKEDLYLKPIQRTILMMGRYVEPIEDVPCGNIVGLVGVDQFLVKTGTITTFEHAHNMRVMKFSVSPVVRVAVEAKNPADLPKLVEGLKRLAKSDPMVQCIIEESGEHIIAGAGELHLEICLKDLEEDHACIPIKKSDPVVSYRETVSEESNVMCLSKSPNKHNRLYMKARPFPDGLAEDIDKGEVSARQELKQRARYLAEKYEWDVTEARKIWCFGPDGTGPNILTDITKGVQYLNEIKDSVVAGFQWATKDLPLLTQGVLCEENMRGVRFDVHDVTLHADAIHRGGGQIIPTARRCLYACVLTAQPRLMEPIYLVEIQCPEQVVGGIYGVLNRKRGHVFEESQVAGTPMFVVKAYLPVNESFGFTADLRSNTGGQAFPQCVFDHWQILPGDPFDSTSRPSQVVAETRKRKGLKEGIPALDNFLDKL

SEQ ID NO: 2458 - protein, 1086 aa, Meleagris gallopavo
MASLDDDRTSSAHAFLKFGSIYEPLKSINLPKAEGESLWDKLDHYYRIVKSTLLLHQSPTTGLFPTKTHGDNHKAKVHDNLYCAACSWALALAYRRIDDDKGRTHELEHSAIKCMRGILYCYMRQADKVQQFKQDPKPSGCLHSVFNAHTGDEVFSHNEYGHLQINAVSLFLLYLVEMISSGLQIIYNTDEVSFIQNLVFCVERAYRVPDFGVWERGSKYNNGCPELHSSSVGLAKAALEAINGFNLFGNQGCSWSVIFVDFDAHNRNRQTLCSLLPRESRSHNTDAALLPCISYPAFALDDEVLFSQTLDKIIRKLKGKYGFKRFLRDGYRTALEDKTRRYYKPAEIKLFDGIECEFPLFFIFMIIDGVFRGNLAQVKEYQDLLDPVLQHTSEGCPVVPKYYYVPADFVELEKKNPGSQKRFPSNNGRDGRFFLWGQAVYIIAKLLADKLVSPKDIDPIGRYVPPQEQRNVSMRFSNQGPLENDLVVHVALIAESQRLQVFLNTYGIQTQTPQQVEPIQIWAQKELVKAYFHLGINDKLGLSGRPDRPIGCLGTSKIYRILGKTVVCYSIIFDLSDFYMSQDVMMLIDDIKNALQFIKQYWKMRGRPLFVVLIREDNIRGSRFNPILDMLAAFKKGIVGGVKVHVDRVQTLVSGAVVEQLDFLRITETEEAPVFKSLEELDLPKHSKVKRQSSTPNASELEQQPDININDWKNKSTYEILQKLDDCNCLASQALLLSILLKREGPNFITKEGTVAEHIERIYRRAGSKKLWSVVRFAASLLGKLVDSLAPSITNVLVQGKQVTLGAFGHEEEVISNPLSPAVIKNIIYEKCQLQDEREAVVQQELVIHIGWIISNSPELFSGMLKIRIGWIIHAMKYELKFRAGDMPAKDLYQMSPSEVKQLLLDILQPQQQGRGWLNRRQIDGSLNRTPAGFYDRVWQILERTPNGLIVAGRYLPQQPTLSDMTMYEMNFSLLVEDMLQNIDQPEYRQIIVELLMVISVILERNPELEFQDKVDLDKVVQEAFHDFQKDHNRPKGAEHQDDMTAFYNTHPVGKKGTCSYLSKAVISLLLEGDVKTSNDDPCTIS

SEQ ID NO: 2459 - protein, 4885 aa, Meleagris gallopavo
  MOD_RES (3443)..(3443): Any amino acid
GGHRTLLYGHAILLRHSFSEMYLTCLTSSRSQTDKLAFDVGLRENAAGEACWWTIHPASKQRSEGEKVRIGDDLILVSVSSERYLHLSMSNGSIQVDASFMQTLWNVHPTCSGSNITEGYLLGGHVVRFFHGHDECLTIPSTDQNDSQQKKVLYETGGAGVRARSLWRVEPLRISWSGSNIRWGQPFRLRHITTGMYLALNDDEGLVMLDREKSDTTSSAFCFRASKELKEKQDSTLKRDIDGMGVPEIKYGDSVCFVQHVASALWLTYKAPDAKSARLGLLKRKVILHQEGHMDDGLTLQRCQHEESQAARIIRNTTSLFSQFISHVDDYVSIPNGNNRTLSPIALPVEEMAQTLQDLIKYFQPPGEDLEHEDKQNKLRSLKNRQNLFKDESKIKLKLKICSSVLTCFTDILLTSKISSLIKLLSPLGYSNLFVKLLSALIRGNRNNCTQFSSNLDWLISKLDRLESSSGILEVLHCILIESPEALNVIAEEHIKSIISLLDKHGRNYKVLDVLCSLCVCNGVAVRANQNLICDNLLPRRDLLLQTRLINDVTSIRPNIFLGVAEGSAQYKKWYFELIIDQVDPFLTAEPTHLRVGWASTSGYAPYPGGGEGWGGNGVGDDLYSFGFDGLHLWSGRVPRAVASVNQHLLSSDDVVSCCLDLGVPSISFRINGQPVQGMFENFCTEGFFFPVVSLSAGVKARFLLGGRHGEFKFLPPAGYAPCYEALLPKEKMKLEPVKEYKRDSDGVRDLLGTTQFLSQASFIPCPIDTSQIALPFHLEKIRDKLAENIHELWGMNKIELGWTYGKIRDDNKRHHPCLVEFSKLPETEKNYNLQMSTETLKTLLALGCHIVHANPAAEEDLKKVKLPKNYIMSNGYKPAPLDLSEVKLLPSQEFLVDKLAENAHNVWAKDRIKQGWTYGIQQDLKNKRNPRLVPYALLDERTKKSNRDSLREAVRTFAGYGYNVEPPDQEIADQTLEKVSIDKIRFFRVEQSYAVKSGKWYFEFEAVTGGDMRVGWARPGCRPDIELGADDQAFVFEGSKGQRWHQGSGFFGRSWQPGDVVGCMINLDDKSIIFTLNGELLITSKGSELAFADFGIESGFVPICSLGLAQIGRMNLGMDASTFKYYTMCGLQEGFEPFAVNMNRDVAMWFSKRLPTFVNVPKNHPHIEIWRIDGTIESPPRLKVTHKTFGTQNSNSDMIYCRLSMPIEFRSSFNFGVGVENASSDALQKRLDIECRTLYTDKIGESFLKSHSLLSTCHPSEICGTCKALYLTVIGKVKFYSHAKKKRLFSSIFRKHSQEFPASSTTVSNHTEHYLTTSSENNLVLITDMFFSSFQYFYSLRIFAGQDPSSVWVGWVTPDYHFYSENFDINKNCTVTVTLGDERGRVHESVKRSNCYMVWGGDITANSQRSGRSNVDLEIGCFVDLATGMLSFTGKELGTCYQVEPNTKLFPAAFVQPTSTNLIQFELGKLKNTMPLSAAIFKSEERNPVPQCPPRLDVQTITCLWSRMPNSFLKVETERVSERHGWVVQCLEPLQMMALHIPEENRCVDILELCEQEDLMKFHYHTLKLYSSVCALGNTRVAYALCSHVDISQLFYTIDNQYLPGLLRSGFYDLLISIHLDHAKQAKLMMNNEFIIPVTEETRTIKLYPDETKKHGLPGVGLSTCLKPSFNFSTPCFIVTSEEHQTSSPEIPLDTLKSKAISMLTEAVQCSGSHIRDPVGGHIAFQFVPVLKLIATLLIMGVFDDDDVKQVLILIDPNVFGDNKEETEERTEKEEVTQVEEKAVEAGEKAVKETKTPTKGLLQTRLPESVKLQMCHLLNYFCDCELQHRVEAIVSFADHYVSKLQYNQKYRYNELMQALNMSAALTAKKTKEFRSPPQEQINMLLNFQLGEDCPCPEEIRDELYDFHDDLLIHCGIPLEEEEEEEEDSSLTGKLRSLIYKIKGPPKPEKIEPREEEDKSPTTLKELISQTMVRWSQEDQIQDPELVRIMYTLLRRQYDSIGELLQALRKAYTISAGSVKDTINLLAALGQIRSLLSVRMGKEEELLMINGLGDIMNNKVFYQHPNLMRVLGMHETVMDVMVNVLGGDKSQQIVFPKMVASCCRFLCYFCRISRQNQKAMFEHLSYLLENSSVGLAFPSMRGSTPLDVAAASVMDNNELALALEEPDLDKVVTYLAGCGLQSCPVLLAKGYPDIGWNPIEGERYLSFLRFAVFVNSESVEENASVVVKLLIRRPECFGPELRGEGGNGLLAAMQEAIRISENPSRDLPSQGYKREGDEEEEEEEIVHMGNAIMSFYSALIDLLGRCAPEMHLIQSGKGEAIRIRSILRSLVPTEDLVGIISIPLKLSTVNKDGTVNEPDMSANFCPDHKAPMVLFLDRVYGIKDQSFLLHLLEVGFLPDLRASASLDTVSLSTTEAALALNRYICSAVFPLLKRCAPLFSGTEHHASLVDSMLHTIYRLSKGRSLTKAQRDTIEECLLAICQYYSHLRPSMLQQLLRRLVFDVPLLNEYCKMPLKLLTNHYEQCWKYYCLPSGMGSYGIAAEDELHLTEKLFWGIFDSLSHKKYDPELFRMALPCLSAIAGALPPDYLDTRIRSTLEKQTSVDPEGNFDPKPINTANLVLPEKLEYIVSKYAEHSHDKWAFDKTNNGWKYGVSLDENTKTHPLIRPFKTLTEKEKEIYRWPVRESLKTMLAMGWSLERTKEGGEAMLQQRENEKLRSISQSSQVWWSSEGNGYSPAPLDLTNVVLSRELQGMVEVMAENYHNIWAKKKKMELESKGGGSHPLLVPYDTLTAKEKSRDREKAQELFKFLQVNGIIISRGLNDMDLDASSMEKRFAFKFLKKILKYVDSAQEFIAHLEAIVTSGKTEKSPHDQEIKFFAKVLLPLVDQYFTNHCLYFLSSPTKTLSSSGYASNKEKEMVASLFCKLAALVRHRISIFGKLLRKILINCLHILAQSLDTRTVMKSGSELVKAGLRAFFENAAEDLEKTSENLKLGKFTHSRTQIKGVSQNINYTTVALLPVLTSIFEHISQYHFGVDLLLGDVQVSCYRILCSLYSLGTGKNIYVERQRPALGECLASLAAAIPVAFLEPSLNHYNPLSVFNTKSARERAILGMPDTVEEMCPEIPQLDGLIKEINNLAESGARYTEMPHVIEVILPMLCNYLSYWWERGSESVPESAGPCCTMITSEHLSIILGNILKIINNNLGIDEASWMKRIAVYAQPIISKARPDLLKTHFIPTLEKLKKKAIKIVMEEEQLRADSKSDTQEAELLILDEFAVLCRDLYAFYPMLIRYVDNNRANWLKKPDADSDELFRMVAEVFILWCKSHNFKREEQNFVIQNEINNLAFLTGDTKSKMSKSGGQDQERKKSKRRGDLYSIQTSLIVAALKKMLPIGLNMCTPGDQELISLAKTRYSHKDTDEEVKEHIRNNLHLQEKMQSDDPAVKWXQLNLYKDILKSDEPPDPEKNVERVQRISAALYHLDQVEQPLRSKKAVWHKLLSKQRKRAVVACFRMAPLYNLPRHRSINLFLHGYQNYWIETEEYSFEEKLVQDLATSPKKEEEEEEDTEKEQPDPLHQIILYFSRNALTERSKLEDDPLYIAYAAMMAKYKSCQEEEEEEEEDKEKTFEEKEMEKQRTLYQQARLHDRGAAEMVLQMISASKGHTGPMVVETLKLGIAILNGGNTIVQQKMLDYLKEKKDAGFFQSLSGLMQSCRSVLDLNAFERQNKAEGLGMVTEEGTLIVRERGEKVLQHDEFTRDLFRFLQLLCEGHNNDFQNYLRTQMGNTTTVNIIISTVDYLLRLQESISDFYWYYSGKEFIDESGQRNFSKALAVTKQIFNSLTEYIQGPCIGNQQSLAHSRLWDAVVGFLHVFANMQMKLSQDSAQIELLKELLDLLKDMVVMLLSLLEGNVVNGTIGKQMVDTLVESSSNVELILKFFDMFLKLKDLTNSDAFKEHDPDGKGIISKKDFQKSMEAQKQYIQSEIEFLLSCTEADENDMFNYIDFVERFHEPAKDIGFNVAVLLTNLSEHMPNDSRLQSLLEPAESVLNYFEPYLGRIEIMGGAKKIERVYFEISESSRMQWEKPQVKESKRQFIFDVVNEGGEQEKMELFVNFCEDTIFEMQLASQISETDSAERPEEEEEEPCYIVDIGDDEEEEKSLESPSAFAMACAAVKKNVANFFKMVTVKNLRKQYRKVRKMTVKEMVKVFFSFFWILFVGVFQLFFTIVWGIFQILWSTVFGGGLVEGAKNIKVTKILGDMPDPTQFGIHDDVTEAEKTEGAEHGIRDELVQFVKGEKGEADIISDIFGIPTKKEGGSKHGHDAGLGDIAEILGSDIQSSLENNVRKKKGLQTPETAKDAEAERKVEAEKADMEDGEKQDKAKEEHSEQQEEGKTKKKKRRHGQKIEKPVAVMANFFKALEIYQTKMLHYLARNFYNLRFLALFVAFAINFILLFYKVTEEPLDEVEEDSNLWNSFEEEEEEEGMVFFVLEESTGYMAPTLRALAVIHTIISFVCVIGYYCLKVPLVVFKREKEVARKLEFDGLYITEQPSEDDIKGQWDRLVINTPSFPNNYWDKFVKRKVINKYGDLYGAERIAELLGLDKNALDFSPVEESEPEAASLVSWLSSIDTKYHIWKLGVVFTDNSFLYLAWYTTMSILGHYNNFFFAAHLLDIAMGFKTLRTILSSVTHNGKQLVLTVGLLAVVVYLYTVVAFNFFRKFYNKSEDEDEPDMKCDDMMTCYLFHMYVGVRAGGGIGDEIEDPAGDPYEIYRIVFDITFFFFVIVILLAIIQGLIIDAFGELRDQQEQVREDMETKCFICGIGNDYFDTTPHGFETHTLQEHNLANYLFFLMYLINKDETEHTGQESFVWKMYQERCWDFFPAGDCFRKQYEDQLG

SEQ ID NO: 2460 - protein, 6736 aa, Meleagris gallopavo
MDYSSFSGVPRFLTRPKAFIVSVGKDATLSCQIIGNPIPVVSWEKDKLPIQSGGRFKTTEDGDLYQLTIYDLSLEDSGQYICRAKNTIGEAFAAVSIKVGEETTVTESAPYFIQKPSSIKVTLGEDAMFKCKVQGSPPLSVNWEKDGRHLRNRADAGRFQIESAGESNALTIQCARLGDSGTYTCRAENPIGSASASAALVVESQGSSNPGSHFDTSCGKTSSLLSHLQKRREEITTKGARNAMFGTLTRSCSVTEGKHAKLSCYVTGEPKPEIVWKKDNEVIVEGRRHVIYEDDQENFVLKILYCKQVDNGLYTCTASNLAGQTYSSVLVTVKEPPIPFKEKLKDLEVWEKESATFQCEVPVPSTETSWFKEETKLRQSKKYNIEEEGTYRRLTVQNVTADDDAVYICEMKEGSRTIAELSVQGNIIKKLPRKTAVSVNDTAIFCVELDNECQNIRWLKNTEEVKPSDRISITRSGKQYTMIIRECTMEDAGEIVFLADESRTSTQFTVTIPRKPPTQPPVDPVVKNKTETSVTLAWSPPKMHRPIPIDGYVVERKKLTGFTWVRCHESHVPVPEFTVSNLSEEADYQFRVSAVNAHGQSPYLEFPGSVHLEPVLAVKSPLTTGEAVYGGDAMFTIDLTTTCSGTWYLNGKVLQESETCIIKRTQTTHSLIIKNVTKNDDGAEVKFVAKNVDVSTKMRVRGAAVRFTNKSKDIEKISARLREEAKLQAELSDTDATVKWMKDGKELKANEKYELQTVGKRRILKIHNVAMEDAGTYQCICEGDKMLYQLSVKALANFINKEKTGGVIRAVAGKQAEFVSETSEANVMVKWYKNGKEITASKKFTMEDKGKLHKLVASAVTKEDEGTYICKIGDDTLIFDLKVSDEAVNFVNKPKTTPEISVSPSEDLELVCEVSAASGAVVWKKDQTEVKQDQRTTIISQGTHRKLIVKNVTLKDQGSYSCETKDDKATFQVKVREKEDVFTNKEKVQKEVKAAATENATLSCEVAQDKTEVKWYKEGKLITSSKKFRVESEGKLRRLVVSQVEKKDAGEYSCEAAGQKLTFRIHVTEAEDAFINKEKVQKEVKAAATENATLSCEVAQDKTEVKWYKEGKLITSSKKFRVESEGKLRRLVVSQVEKKDAGEYSCEAAGQKLTFKIHVTEAEDAFINKEKVQKEVKAAATENATLSCEVAQDKTEVKWYKEGKPITSSKKFRVESEGKLRRLVVSQVEKKDAGEYSCEAAGQKLTFRIHVTEPEVVFTNKEKVQKEVKAAATENATLSCEVAQDKTEVKWYKEGKPITSSKKFRVESEGKLRRLVVSQVEKKDAGEYSCEAAGQKLTFRIHVTEAEDAFINKEKVQKEVKAAATENATLSCEVAQDKTEVKWYKEGKLITSSKKFRVESEGKLRQLVVSQVEKKDAGEYSCEAAGRKLTFRIHVTEAEDAFINKEKVQKEVKAAATENATLSCEVAQDKTEVKWYKEGKLITSSKKFRVESEGKLRRLVVSQVEKKDAGEYSCEAAGQKLTFRIHVTGCIWNDESATHSKRPDRAELSIPGTQSKISANHAQEQRTGLVRQKNRRLVMSKGTMKLQTYLCTLPATMLGYLSALGRNSGAFGCLEERCSLVLHSEPKAVFINQEEVQKEVSAVLAESAALSCEVAQDTTEVKWYKDGRLLASSRKFKMETVGKTRRLVVEQVEKKDAGEYICEAAGQKLTFKLEATEPEAKFGKEFVQKEPLIVQEHESITLTTSVTPETAVVKWYKDGREIKASKKYEIKSDGASRTLTVNLAESTDTAVYACQTKNDKQEFKVEVKEIPVKFTKKLEAVKAEIGGSVTLSCEVSHAKGKVVWRRNAVEIKPSKRFQIHEEGVRRTLTITGIRAEDEGEYFCESRDDKSSITITPKAPRVVKFVTSLNNVASEEGKEAVFKCTVSPSDAVVTWFRNGVKIEASKKYVISQKDTNHSLTITDLTLEDAAEISANAEGVESTANLRVREASISFKKKLEPKTVEERDTVTLEVELTKPGEVKWMRNSIVLKPSEKIEIKAEGTKHILIVKDISFADRGFYCCESPDDKTQAKINVEMRQIKLVKGLQPLEVSEKGTVTFSVEVSHEDVEGTWQKDGVRLKPAPNITMGVQGKKHSLTLSSVTLEDAGLVSFKAEGINSSGRLTVIELPVKISKPLADISVTQKDKVTFECELSRPNVDVKWFKDGKELRQSKKVGITSQGNKRSLIIHKCEYEDQGTYTCQAAEDKTSATLKVHAGKTYSLTYTRVQVKDAAEIKFVAEKAESRAHLTVKELPVKIVKPLRDKIALEKHRGFLECQVSRANAEVKWYKKDVEIHPSDKYEIVSDGVYRKLIINDAGYEDEDTYTCDAFDDKSSAHFFVEEQSINIVKELCDEDVTEPEEAKFECEISIPSVKPPKWYLRGEVLQPGRNIIMQQEGTIHRLTILKTSTDMTGTIQFSIGKSKSTANLLVRDYHIQITRKLEDKTALERHSVILSCDFRPSPKVVKWFKGHTPIEPSEKYKIKRDKHSAELKILKLKPDDAGVYKCKAGIAETEATLTVEARNVEVTKHLQDVEVEEESSAVFSCELSHDDEDVEWFLNGTLLYTNNYNDIKNVGSCYTLTMKQVKPEDAGTVTMKSDKVSESARLKVIEKPAVFMKSLDDVFGEERGVIKLECEVSKEKVKPVWKKDGVVLTSGNKYELVQSGKTLCLLIHDLEKADAGLYTCDIGTDVAKSKVGVQELNIGITKRLKNTEIQEGEDCTFECILSHESIGDFNWTLNGSRVESGGRFKASNVGRKYTLSIKSVIPADAGEVVFTARGLTSKASLSVKEKPTEVTKQLEDKTSAAGQDISLSCELSKPDVNIRWYKDGKAIRKSQKYDLQQEGTKAILIIHDSTVKDSGEYTCETEDSKTKARVTVQEKPNYFIKELSDLKIEESGTAVFICQSEKAASSVIWRKGIAELRPGRKYEMTQKGRDLQLTIKNLEKSDGDTYTCDIGDAQSRAKLVVQGQKVLITEDLEDVTVLEGESAMFKCRISPIEYSKVQWFLDKTPLHTNELNDIQSQPGGYHLLTLKKLSLKDSGLITFEAGDKKTSASLVVKEKPCIFTKELVDTEVTEGKDVILHCETSKSDSPVKWCKDGKSLRNSSKYNISRSGFEAKLVIYGAEERDSGRYECEAGAAKSSAVITVKAISVLFEEELKSLEALEGGTATLHCQLSREAPVEWRKGHTVLRPSNKYRMRQEGTVAELLIHDLATKDAGDYTCVVGSQKTTATLSVNALPILFQEEMVDKEATEGQAVTLHCKLSKSAPVEWRKGNKVLKPSEKYKIEQEGPFAELVIQDLDSADAGDYSCVCGNQQTTATLTVNVLPTLFTKELSNEEATEGKSVSLCCELNKAAANVEWKKGLKTLKSSDKYKMKREGITAELLIQNLDMTDAGNYSCVCGDQQTMAVLTVHALPAFFKEGLKNREATDGGTATLRCELSKVGVPVEWKKGNKMLKSSDKYRMRQEETSAELLIRDLDVEDTGEYTCVCGDQKTSAVLTVHALPALFKKELVDVEATESGTAVLQCELTKSAPVEWRKGQESLKPSEKYKLRLKDTIAELIIQSLEEQDAGDYTCVCGDKTTTASLTVHALPAYFKEEMKNEEATEGGTAMLQCELSRAVPVEWKKKHKVLKLSEKYSMRQEGSTAQLLIHALEVKDAGEYTCVCGDKKTTAVLTVHALPALFKEELRNEEATEGDVVTLRCELTKAAPVEWRKGHAVLKSTSEKYIMRQDDVLAELEIRELDLQDAGDYTCVCGDHHTTASLTVNALPAVFKEELKNEEVVEGASVSLRCELSKAAPVQWKIGPKVLKTSEKYQMSQPGTIAELVIRDLDVTDAGDYTCVCGDQKTTATLTVHDFAALPVTFKQILQNKESEEGSTATFCCELSKPNAAVEWRKGGVGLQPDEKYEMRQRECLVELLIHNLQLEDTGEYSCDTGDQETKASLHVKALPVLFKKELKDEEVEEGAAVKFQCELTKDNAAVEWRKGTMEIFPCSKYEMRLSGCTAELVIHNAEPEDASDYTCDTGDQQSTAILRVNAIKPRLKQQLKNEEVEVGGTAKLRCEISISKAEVEWSKDGAVLHSSSKYEMWQQGTIRELRVHHLEPSDAGEYSCKAGDETTSAKLTVKEPDVTIVSHLKDMVVFEGDDVTFQCQVSHENARDVEWKLQDVALQNNEMNEISVEKGKIHKLTLRKVTEQDLGTITFRVGPYTSTAELTVKEPAPTIVEMLKDVTSYEGEDAVFECRLSQETTQDAQWFLGDVPLQSNEMNEIKVQGTRHTLILKKVTLEDCGPISFKVGQHTTGAQLTVQAKNSIVQGLENVEAVEGGEALFECYLSKPECYNYNWLIDDEPAKTTENTEMVYFENGRRHLLLLKNLTLQDSCRVTFMCSDAVTSAFLTVKGWRLQILEPLTDVEVSPGQKATFSCALSEAVPINEVTWYFNDIEIQPDEDWEIQADGNKYKLILNKAQPHHSGEVTFASREAIASAKLSVLAHPDPPEEPKVLRTSSHSVTLSWYKPLSDGGCDILGYQVERKIPGVGWQSCNKSIIQGMELVVDNLTPGEPHRFRVSAVNKVGASEPAQFPQMVQLVTEPSVTVTHPLVGGSVSEGEVARLECKLSSEIKENVTWLKGKEPIQTGGRYEILSDGKKQILIIHAFKAEDQDTYTCMVSPEQMCKELKTCHLALFYEELVDGHVQPSLPPEAAQEGDLHLLWEALAKKRRMSREPTLDSISEVPEEEEKLQKLRKEEAEQSHYYSEEYSTCDELARTGEADFSFTSSDDESRAGTPSLVNYLKKAEKRSVSVTTKVQSISSGKLWKQWEKSSVETVVAAPGAKPVEPEIVDLDDPSMNSAAVKIQAAFKGYKVRKEIKQQECPVFTETFKDFSGEPGSTLHLECVAHSKTDMKVRWLKDGEELSDGRYYHIDNYSDGTCSLIITGLDRKDAGKYTCEASNKFGKVSHSAKVVIESTDSETESSSGSELDDAFRKAGRRLHRLFRSKISTEISDVEEELFVSADEGDVEVVDHQTYREDDQYIYIKFEVLSEAKTAATRFREMFGALGIPVEIDILEQGPRKVELRIGKATPPTHGKFAPPVLRPPPPLLTSDTAPMFLTELQNQEVQDGYPVSFDCIVVGKPLPTVRWFKDGKAIEENDHYMINEDQEGCHQLIITAVVPTDMGVYRCLAENNMGVASTKAELRVDLTSTDYETAADATETSSYYSAKEYVSSREQEESTTEEEQLPQILDDLHDIHVAPGAPLAKFHLKVKGYPEPRLYWFKNGQPLKASDRILKIDRREFHSLEILNVMKSDAGQYSIFLINSAGSAYSSARLVVRDPDEKEEESETDSHEQLIPPRFLERFTNKKVKKGASITLSVKVEGHPPPTITWLKEESQEDILWIKPDTPGYKLASSNMHHSLILLDVKKKYSGAYTCIATNKAGQSICTANLEVADVKEAEVLTQERVMVSEAIMTTLGFLCTAEIFSHLGLITTHFRDLEAGREGVPRTPISLADVGTEEFFQKLTSRISEMVSAKISQATLRVPGAESDDESKTPSASPRHGRSRPSSIAQESSSESEDGDSRGEIFDVYMVTADYVPPAPDKETITLKEGQYVEVLDSAHPLKWLVRTKPTNPSRQGWVSPAYLDKRLKLSPEWGTTEVPEFPGEFVSEDEYKRKLSVLIQELLISEEDYIQDLQFLQTHHLRYTETCPSVPGAIASQKSTIFRNIDDITRFHSSAFLRGLQKCDTDDDVAMCFIKHEAEFNKYIQYLVGRVQAESIVVSKAVQDFYKRYTDEILMKEDPSQTLIPPLQHYLEKPINRIQQYQTVIKELIRNKARNSQNCTLLEQAYAIVSALTRRAENNLHVSLIENYPGTLESLGEPIRQGHFIVWEGAPGARMAWKGHKRHVFLFRNYLVICKPKRDTRTDTYSYIFKNIMKLNNIDVNDMVEGDDRAFEIWHEREDSVRKYLLQARTVNIKNSWVKEICGIQQRISQPVWIPPDFEEELADCTAELGETVKLACKVTGAPRPSVSWYKDGKPVEVDPHHIIIEDPDGSCTLILDNLTGVDSGQYMCFASSPAGNASTLGKILVQVPPRFVNKVRNAYFVEGEDAQFTCTVEGAPRPQIRWYKDGILLKDTNKYQTFSEPRSGIIVLVVKNPSNEDMGHYECELVNRLGSAKSGAELYHHTAAALTQERRGDQAITIEGMVLVQLFQQINSLNKRLKCPRKPSSLFSVMTFSYHPCPSGASGLYEAMAPPPSGFYPKPAKEPRVPMPSLGLSHEETSTGAESTQERTVPISRLHERIPPAAGTGDWCRREGDVVWDVHSEVYIETTERTRVYKTEEKTPTSPPYMQVTIEDVQVNSGERAKFQAVIEGTPPPTVLWFKGTTLLTDSVRLHQGKTGTTYFLILDNVVSEDGGVYTCVAKNAGGEVLCKAELVVHEAKKDQAAKKVATRRKLHSLYEVKQEIGRGCFSFVKRVVHKGNGVSCAAKFIPLRSKTKARAHQERDILSSLSHDRITRLLDQFETRKTLILILELCSSEELLDRLFKKSVVTEAEVKLYIKQILEGINYLHDNNILHLDIKPLNILMVYPEREDLKICDFGFAQKITPLEPQFSKYGSPEFVAPEIVSQSPVSKATDIWAVGVITYLSLTCKSPFAGENDRGTLLNIQKGDVSWTAPDFVHLSEDAKDFIKRILQQQPRDRPGALDCLSHRWFMVS

SEQ ID NO: 2461 - protein, 347 aa, Meleagris gallopavo
GTAEVSSILEERILGANTSAELEETGHVLSIGDGIARVYGLRNVQAEEMVEFSSGLKGMSLNLEPDNVGVVVFGNDRLIKEGDVVKRTGAIVDVPVGEELLGRVVDALGNPIDGKSSFTSKMRRRVGLKAPGIIPRISVREPMQTGIKAVDSLVPIGRGQRELIIGDRQTGKTSIAIDTIINQKRFNDGVDEKKKLYCIYVAIGQKRSTVAQLVKRLTDADAMKYTIVVSATASDAAPLQYLAPYSGCSMGEYFRDNGKHALIIYDDLSKQAVAYRQMSLLLRRPPGREAYPGDVFYLHSRLLERAAKMNDSFGGGSLTALPVIETQAGDVSAYIPTNVISITDGQV

SEQ ID NO: 2462 - protein, 381 aa, Meleagris gallopavo
MPFSNSHNLLKMKHSADDEFPDLSAHNNHMAKVLTLDLYKKLRDRQTSSGFTLDDVIQTGVDNPGHPFIMTVGCVAGDEESYEVFKELFDPVIEDRHGGYKPTDEHKTDLNADNLQGGDDLDPNYVLSSRVRTGRSIRGFCLPPHCSRGERRAIEKLSVEALGSLGGDLKGKYYALRNMTDAEQQQLIDDHFLFDKPVSPLLLASGMARDWPDARGIWHNDNKTFLVWINEEDHLRVISMQKGGNMKEVFTRFCTGLTQIETLFKSKNYEFMWNPHLGYILTCPSNLGTGLRAGVHIKLPNLGKHEKFGEVLKRLRLQKRGTGGVDTAAVGGVFDVSNADRLGFSEVELVQMVVDGVKLLIEMEKRLEKGQSIDDLMPAQK

SEQ ID NO: 2463 - protein, 456 aa, Meleagris gallopavo
PSLTPQRECISIHVGQAGVQIGNACWELYCLEHGIQPDGQMPSDKTIGGGDDSFNTFFSETGAGKHVPRAVFVDLEPTVIDEVRTGTYRQLFHPEQLITGKEDAANNYARGHYTIGKEIIDLVLDRIRKLADQCTGLQGFLVFHSFGGGTGSGFTSLLMERLSVDYGKKSKLEFSIYPAPQVSTAVVEPYNSILTTHTTLEHSDCAFMVDNEAIYDICRRNLDIERPTYTNLNRLISQIVSSITASLRFDGALNVDLTEFQTNLVPYPRIHFPLATYAPVISAEKAYHEQLSVAEITNACFEPANQMVKCDPRHGKYMACCLLYRGDVVPKDVNAAIATIKTKRSIQFVDWCPTGFKVGINYQPPTVVPGGDLAKVQRAVCMLSNTTAIAEAWARLDHKFDLMYAKRAFVHWYVGEGMEEGEFSEAREDMAALEKDYEEVGVDSVEGEGEEEGEEY

SEQ ID NO: 2464 - protein, 672 aa, Meleagris gallopavo
MAPKGKVYRGSVKDFPGFNASQDADALYNAMKGFGSDKDAILDLITSRSNKQRVEICQAYKSQYGKDLIADLKYELTGKFERLIVSLMRPPAYSDAKEIKDAIAGVGTDEKCLIEILASRTNQEIHDLVAAYKDAYERDLEADIVGDTSGHFKKMLVVLLQGAREEDDVVSEDLVEQDAKDLLEAGELKWGTDEAQFIYILGRRSKQHLRMVFDEYMKISGKPIERSIRGELSGDFEKLMLAVVKCIRSTAEYFAERLYKAMKGLGTRDNTLIRIMVSRSEIDMLDIREVFRTKYEKSLHNMIKEDTSGEYKKALLKLCGGDDDAAGEFFPEAAQVAYRMWELSAVAKVELRGTVQPVGNFNDDGDAQVLRKAMKGLGTDEGAIIEVLTQRSNAQRQQILKAYKAHYGRDLLADLKSELSGSLAKLILGLMLTPAQYDAKQLRKAVEGAGTDESTLIEIMATRNNQEIAAINEAYQQAYHKSLEDDLSSDTSGHFKRILVSLALGNRDEGPENLTQAHEDAKVVAETLKLADVASNDSSDSLETRFLSILCTRSYPHLRRAQVFQEFIKMTNHDVEHAIRKRMSGDVRDAFVAIVRSVKNKPAFFADKLYKSMKGAGTDERTLTRIMISRSEIDLLNIRGEFIDLFDKSLYHMIEKDTSGDYRKALLALCGG

SEQ ID NO: 2465 - protein, 705 aa, Meleagris gallopavo
SIQPCPDVKYGKRIHVLPIDDTVEGITGNLFEVYLKPYFLEAYRPIRKGDIFLVRGGMRAVEFKVAISPRPVTSQTPGTGEALSNYCFHLSDEEESLNEVGYDDIGGCRKQLAQIKEMVELPLRHPALFKAIGVKPPRGILLYGPPGTGKTLIARAVANETGAFFFLINGPEIMSKLAGESESNLRKAFEEAEKNAPAIIFIDELDAIAPKREKTHGEVERRIVSQLLTLMDGLKQRAHVIVMAATNRPNSIDPALRRFGRFDREVDIGIPDATGDLTVTKILSCSLRMALQMLCFQVANETHGHVGADLAALCSEAALQAIRKKMDLIDLEDETIDAEVMNSLAVTMDDFRWALSQSNPSALRETVVEVPQVTWEDIGGLEDVKRELQELVQYPVEHPDKFLKFGMTPSKGVLFYGPPGCGKTLLAKAIANECQANFISIKGPELLTMWFGESEANVREIFDKARQAAPCVLFFDELDSIAKARGGNIGDGGGAADRVINQILTEMDGMSTKKNVFIIGATNRPDIIDPAILRPGRLDQLIYIPLPDEKSRVAILKANLRKSPVAKDVDLDFLAKMTNGFSGADLTEICQRACKLAIRESIESEIRRERERQTNPSAMEVEEDDPVPEIRRDHFEEAMRFARRSVSDNDIRKYEMFAQTLQQSRGFGSFRFPSGNQGGAGPSQGTGGGSGGNVYSEDNDDDLYG

SEQ ID NO: 2466 - protein, 983 aa, Meleagris gallopavo
VSFFFCLIVLIFPTAVCFAAPPKTTIRWCTISPLEEKKCNNLKDLTQQERITLTCLQKATYLDCIKAIANNEADAISLDGGQVFEAGLAPYKLKPIAAEVYEHTEGSTTSYYAVAVVKKGTEFTVNDLQGKTSCHTGLGRSAGWNIPIGTLIRRGAIECCVPGATTEQKLCRQCKGDPKTKCARNAPYSGYSGAFHCLKDGKGDVAFVKHTTVEENAPDQKDEYELLCLDGSRQPVDSYKTCNWARVAAHAVVARDDSKAEDIWSFLSKAQTDFGVDTKSNFHLFGPPGKKDPVFKDLLFKDSAIMLKRVPSLMDSQLYLGFEYYSAIQSLRKDQLTPSPRENRIQWCAVGKDEKSKCDRWSVVSNGDVECTVVDETKDCIIKIMKGEADAVTLDGGLVYTAGVCGLVPVMSERYDDGSLCGRPEEQPASYFAVAVVKKGTDVNWNNLKGKKSCHTAVGRTAGWNIPMGLIHNRTGSCNFDEYFSEGCAPGSPPDSRLCQLCQGSGEIPPEKCIASSHEKYFGYTGALRCLVERGDVAFIKHSIVEENTGGKNKAEWAKDLQMDDFELLCTDGRRANVMDYRECNLAEVPTHAVVVRPEKANKISELLEKQEKRFGVNGSEKSKFMMFESQTKDLLFKDLTKCLIKLRQGVTYKEFLGDKYYSTISSLNTCNPSDWNCVTLASTRMKDFYLPLENKQSGSLLVGCWTCFPCCDNVGMVGCVLVGQQCVAFSDSVQGLNFSLSFSFSDLLQVCTFLQNNICALVSPRLSHCLPSSQQLPIVVGIWDAGKTLLFARLLTGKYRDTQTSITDSSALYRVSNGKSTNVTLIDLPGHESLRLQFLERFKAAARAIVFVVDSVAFQREVKDVAEFLYQVLVDSTVLKNAPALLIACNKQDVTMAKSAKLIQQQLEKELNTLRVTRSAAPTSLDASATGGPAQLGKKGKDFDFSQLPMKVEFVECSARGSKGEEGDADFEGLEKWLAKIA

SEQ ID NO: 2467 - protein, 1170 aa, Meleagris gallopavo
QSVVKLMRGLLQCMMRQVDKVEAFKYSQSTRDCLHAKYNTHTCATVVGDHEWGHLQLDATSLYLLMLAQMTASGLHIIHSLDEVNFIQNLVFYIEAAYKTADFGIWERGDKTNRGITELNASSVGMAKAALEALDELDLFGAKGGPQSVIRVLSDEVQHCQSILHSMLPRASSSKEVDASVLSVISYPAFAVEDSELVEITKQEIITKLQGRYGCCRFLRDGYRTPKEDPNRSYYEPAELKLFENIECEWPLFWTYLIIDGIFSGNVEQVQEYREALEGILIKGKNGVRLVPELYSVPPDKVDEEYNNPHTVDRIPMGKLPLMWGQSLYILGCLMAEGFLAPGEIDPLNRRFATVPKPDVVVQVCILAETEGIKAILRKEGIHVETVADVYPIRVQPARILSHIYARLGRNKQMSLTGRPYRHMGVIGTSKLYNIRKNIFAFTPQFIDQQQFYLALDSKMIVEMLRTDLSYLCSRWRMTGRPTITFPVSHTMLDDTGSSIHPTVLATLRKLQDGYFGGARIQTGKLSEFLTTSCRTHLSFMDPGPEGKVFANGYKLGLDSFEELDPEEWLHGLQFAEDADTYDEVAQYLDHLLQRTVPQSNLPPTAQQGGLKRFRAAVHTTRDLMSLASKAKDLQVQNVGMYIPSKIFQASQQSVKLLSSPHQHDQEVKSHTLHAEMNLPRDEAGNVDCKALVDQLRICPTLQEQADILYMLHILKGPEWHTGLESEPGPTVKELLTELYVRVGATRQWALIRYISGILKKKVEALDEACTALLSHQKHLTVGLPPEPREKTISAPIPYEELVRLIDEASEKNLSVSILTQEIMVYLAMYIRTQPALFTDMFRIRIGLIIQVMATELAHSLHCSAGEATENLMNLSPSNVKTLLFHILSGKEFGVEKSVRSVDSLVTTAINVYDVEAAGATKTERAGIVKLKSEIKQVRAGSADCFPKAGGAALQAAGSWGCGEGSVGGSSVGGSSAPGTRLGGHKLSGSNQSSKDSRQGQWKRRRRLDGALNRVPLGFYQKVWKVLQKCHGLSVEGFVLPSSTTREMTPGEMKFAVHVESVLNRPQPEYRQLLVETILVLTMLVDVEVHTMGGIIPVEKILHAANDLFYEEQKALGADDQMLEKDPSTGICDLLYDSAPSGRFGTMTYLSKSVALHLYDLLPGDGCAMQ

SEQ ID NO: 2468 - protein, 93 aa, Meleagris gallopavo
ETDDEPSEKDALQPGRKIVAAGYALYGSATLVALSTGQGVDCFMLDPGLGEFILVDRDVKIKKKGKIYSLNEGYAKYFDPAMTEYLKKKKFPE

SEQ ID NO: 2469 - protein, 195 aa, Meleagris gallopavo
TMAERRVPFTFLSSPSWEPFRDWYHGSRLFDQSFGMPHIPEDWYKWPSGSAWPGYFRLLPSESALLPAPGSPYSRALSRQLSSGISEIRQSADSWKVTLDVNHFAPEELVVKTKDNIVEITGKHEEKQDEHGFISRCFTRKYTLPPGVEATAVRSSLSPDGMLTVEAPLPKPAIQSSEITIPVTVEAKKEEPAKK

SEQ ID NO: 2470 - protein, 259 aa, Meleagris gallopavo
MTKYKLVLLRHGEGAWNKENRFCSWVDQKLSSDGIKEAQNCGRQLKALGFEFDLVFTSVLSRSIQTAWLVLEEMGQEWVPIQSSWRLNERHYGALIGLNRAEMALNHGEEQVKIWRRSYDVTPPPITESHPYYEEIYNDRRYKFTDVSQDNLPKAESLKDVLDRLLPYWNEKIVPELRSGKMILISAHGNSSRALLKHLEGISDKDIMNVTLPTGVPVLLELDENLRPLGPHQFLGDQEAIQAAIKKVEDQGKVKSAEK

SEQ ID NO: 2471 - protein, 272 aa, Meleagris gallopavo
QSDQQLDCALDLMRRLPPQQIEKNLSDLIDLVPSLCEDLLSSVDQPLKIARDKVVGKDYLLCDYNRDGDSYRSPWSNKYDPPLEDGAMPSARLRKLEVEANNAFDQYRDLYFEGGVSSVYLWDLDHGFAGVILIKKAGDGSKKIKGCWDSIHVVEVQEKSSGRTAHYKLTSTVMLWLQTNKTGSGTMNLGGSLTRQMEKDETVSDSSPHIANIGRLVEDMENKIRSTLNEIYFGKTKDIVNGLRSVQTFADKSKQEALKNDLVEALKRKQQS

SEQ ID NO: 2472 - protein, 334 aa, Meleagris gallopavo
QGEPIRVLVTGAAGQIAYSLLYSIAKGDVFGKEQPLVLVLLDITPMMTVLEGVVMELQDCALPLLREVIPTDKEEVAFKDLDIAILVGSMPRREGMERKDLLKANVKIFKSQGAALDKYAKKTVKVVVVGNPANTNCLIASKSAPSIPKENFSCLTRLDHNRAKSQIALKLGVTSNDVKNVIIWGNHSSTQYPDVNHAKVNVKGKEVGVYEAIKDDSWLKGDFILTVQQRGAAVIKARKLSSAMSAAKAICDHVRDIWFGTPAGEFVSMGVISDGNSYGVPEDLLYSFPVVIKDKTWKFVEGLPINDFSREKMDLTAKELTEEKETAVEFLSSA

SEQ ID NO: 2473 - protein, 327 aa, Meleagris gallopavo
CARRLTLWLLSLFQVGSVQGLGGTGALRIGAEFLRRWYNGNNNTSTPVYVSSPTWENHNSVFMDAGFKDIRTYRYWDAAKRGLDLQGLLDDMEKAPEFSIFILHACAHNPTGTDPTPDQWKQIAAVMKRRCLFPFFDSAYQGFASGSLDKDAWAVRYFVSEGFELFCAQSFSKNFGLYNERVGNLTVVGKDEDNVQRVLSQMEKIVRTTWSNPPSQGARIVATTLTSPQLFAEWKDNVKTMADRVLLMRSELRSRLESLGTPGTWNHITDQIGMFSFTGLNPKQVEYMIKEKHIYLMASGRINMCGLTTKNLDYVAKSIHEAVTKIQ

SEQ ID NO: 2474 - protein, 339 aa, Meleagris gallopavo
MSTVHEILSKLSLEGDHSLPPSAYATVKAYSNFDADRDAAALEAAIKTKGVDEVTIINILTNRSNEQRQDIAFAYQRRTKKELSAALKSALSGHLEAVILGLLKTPSQYDASELKAAMKGLGTDEDTLIEIICSRTNQELNEINRVYREMYKTELEKDIISDTSGDFRKLMVALAKGKRCEDTSVIDYELIDQDARELYDAGVKRKGTDVPKWINIMTERSVPHLQKVFERYKSYSPYDMLESIKKEVKGDLENAFINLVQCIQNKQLYFADRLYDSMKGKGTRDKVLIRIMVSRCEVDMLKIKSEFKRKYGKSLYYFIQQDTKGDYQRALLNLCGGED

SEQ ID NO: 2475 - protein, 401 aa, Meleagris gallopavo
ADSVERFQGGNNAGHTVVVDGKEYDFHLFPSGIINPKAISFIGNGVVIHLPGLFEEAEKNEKKGLKDWEKRLIISDRAHIVFDFHQAVDGLQEVQRQAQEGKNIGTTKKGIGPTYSSKAARTGLRICDLLSDFDEFSSRFKNLAQQYKSMFPTLEIDIEGQLKKLKGYAEKIRPMVRDGVYFMYEALHGSPKKILVEGANAALLDIDFGTYPFVTSSNCTVGGVCTGLGVPPQHVGDVYGVVKAYTTRVGIGAFPTEQINEIGDLLQSRGHEWGVTTGRKRRCGWLDLVILKYAHMINGFTALALTKLDILDVLDEIKIGVAYKLGGKRIPYFPANQEILQKVEVEYETMPGWKTDTTGARKWEDLPPKAQNYIRCVENHVGVPVKWVGVGKSRESMIQLF

SEQ ID NO: 2476 - protein, 405 aa, Meleagris gallopavo
LTRLLFSRRDHGGPEGMEPDGVIESNWNEIVDNFDDMNLKESLLRGIYAYGFEKPSAIQQRAIIPCIKGRYDVIAQAQSGTGKTATFAISILQQLEIDLKETQALVLAPTRELAQQIQKVILALGDYMGATCHACIGGTNVRNEMQKLQAEAPHIVVGTPGRVFDMLNRRYLSPKWIKMFVLDEADEMLSRGFKDQIYEIFQKLSTNIQVVLLSATMPMDVLEVTKKFMREPIRILVKKEELTLEGIKQFYINVEREEWKLDTLCDLYETLTITQAVIFLNTRRKVDWLTEKMHARDFTVSALHGDMDQKERDVIMREFRSGSSRVLITTDLLSLDINVSKVNGVVNLCINVFSVLCRIGRGGRFGRKGVAINFVTEEDKRILRDIETFYNTTVEEMPMNVADLI

SEQ ID NO: 2477 - protein, 486 aa, Meleagris gallopavo
RLACFLTGATKYTDKDNGGMLVWSPYHNIPDAKLDEYIAIAKEKHGYNVEQALGMLFWHKHNIEKSLADLPNFTPFPDEWTVEDKVLFEQAFSFHGKSFHRIQQMLPDKTIASLVKYYYSWKKTRSRTSLMDRQARKLANRNNQGDSDDDVEEPHPMDGNDSDYDPKKEAKKEGNNEQPVQTSKIGLGRREYQSLQHRHHSQRSKCRPPKGMYLTQEDVIAVSCSPNAANTILRQLDMELISLKRQVQNAKQVNSALKQKMEGGIEEFKPPESNQKINARWTTEEQLLAVQGVRKYGKDFQAIADVIGNKTVGQVKNFFVNYRRRFNLEEVLQEWEAEQGTLASNGDASALGEDTKNTSNVPSGKSTDEEDEAQSTPTTQCLGPSPPAQASAPAPTAPMATLNQPPPLLRPALPAAPALHRQPPPLQQQARFIQPRPTLNQPPPPLIRPANSMPPRLNPRPVLTTVSGQQPPSLIGIQTESQSTLH

SEQ ID NO: 2478 - protein, 677 aa, Meleagris gallopavo
PYFYLQVPSTKRADPAELRSIFLQYASVEKDGERYMTPEDFVQKYLGLYTDPRYNPKTVQLLAGVADQTKDGLISFQEFLAFESVLCTPDAIFVVAFQLFDKNGNGEVTFANVKEVFEQTTIHHQIPFNWDCEFIRLHFGHNRKKHLNYTEFTQFLQELQAEHARQAFALKDKNKSGMITGLDFSDVMVTLHSHMLTPFVEENLVSVAGGTVSRQVSFSYFNAFNALLNNMDLIRKIYSNIAGTRKDVEVTKEEFTQSAIRFGQVTPLEIDILYQLTGLYSVTGRLTLADIERIAPLAEGALPYNLAELQRQQSFGELGRPIWLQIAESAYRFTLGSIAGAVGATAVYPIDLVKTRMQNQRSTGSVVGELMYKNSFDCFKKVLRFEGFFGLYRGLLPQLIGVAPEKAIKLTVNDFVRDKFTKKDGSIPLPAEILAGGCAGASQVIFTNPLEIVKIRLQVAGEITTGPRVSALSVMKDLGLLGLYKGAKACFLRDIPFSAIYFPVYAHSKLMLADENGHVGGLNLLAAGAIAEGVPAASLVTPADVIKTRLQVAARAGQTTYSGVIDCFGKILREEGPSAFWKGAAARVFRSSPQFGVTLVTYELLQRWFYVDFGGIKPSGSEPIPKTRILDLPPVNPEHIGGYRLATATFAGIENKFGLYLPKFRSSGTVSAQPKSS

SEQ ID NO: 2479 - protein, 687 aa, Meleagris gallopavo
EKKWKTVIPSWTFNPRLNKGIYKVLQKLGKADETKDEQFEQCVQNFNKQLSEGTRLQKDLRTYLASVKAMHEASKKLTECLQEVYEPDWPGRDDTNKIAENNDLLWTDFHQKLVDQALLTMDTYLGQFPDIKSRIAKRGRKLVDYDSARHHFEALQTAKKKDETKIAKAEEELVKAQKVFEEMNIDLQEELPSLWNSRVGFYVNTFQSIAGLEENFHKEMSKLNQNLHDVLLGLDKQYSGNAFPIKAQPSDSTPAKANKSPSPPPDGSPITSPETKTVNHELEPSTLEAPGASIPKSPSQLRKGPPVPPPPKVTPSKEIKQENIISLFDDNFVPEISVTTPSQARIPEMKSIEGTSLLDLDFDPIKPDATMGKTPTPASQSLPWDLWELSSLITYCARACAIPACICLISLSAFPLCTPQTKVSPYEEEPTCSASEPKQSTHLCPLDLSSLGMSQSTANSPLGDASRLVFCLCDAAVGTNKAFKLAAAPRSDEGRWKKGMVKACKNLFIHVLKMGSVSISSLCCASLKQESISMFNPEKKGIQVLPTEAAHAGAEAAGSEAAAGAEASKTEGDSGSVSTSRSSLPAVVVETFPATVNGTVEGGASSERADMPPGFLFKVQAMHDYTATDSDELQLKAGDVVLVIPFENPEEQDEGWLMGVKESDWIQHKELDQCRGVFPENFTERVQ

SEQ ID NO: 2480 - protein, 728 aa, Meleagris gallopavo
MPEAVQTQDQPMEEEVETFAFQAEIAQLMSLIINTFYSNKEIFLRELISNSSDALDKIRYESLTDPSKLDSGKDLKINLIPNKHDRTLTIVDTGIGMTKADLVNNLGTIAKSGTKAFMEALQAGADISMIGQFGVGFYSAYLVAEKVTVITKHNDDEQYAWESSAGGSFTVRLDNGEPLGRGTKVILHLKEDQTEYLEERRIKEIVKKHSQFIGYPIRLFVEKERDKEVSDDEAEEKEEEKEEKEEKTEDKPEIEDVGSDEEEEKKDGDKKKKKKIKEKYIDEEELNKTKPIWTRNPDDITNEEYGEFYKSLTNDWEDHLAVKHFSVEGQLEFRALLFVPRRAPFDLFENRKKKNNIKLYVRRVFIMDNCEELIPEYLNFMRGVVDSEDLPLNISREMLQQSKILKVIRKNLVKKCLELFTELAEDKENYKKFYEQFSKNIKLGIHEDSQNRKKLSELLRYYTSASGDEMVSLKDYCTRMKENQKHVYYITGETKDQVANSAFVERLRKHGLEVIYMIEPIDEYCVQQLKEFEGKTLVSVTKEGLELPEDEEEKKKQEEKKAKFENLCKIMKDILEKKVEKVVVSNRLVTSPCCIVTSTYGWTANMERIMKAQALRDNSTMGYMAAKKHLEINPDHSIIETLRQKAEADKNDKSVKDLVILLYETALLSSGFSLEDPQTHANRIYRMIKLGLGIDEDDTAAEEASPAVTEEMPPLEGDDDTSRMEEVD

SEQ ID NO: 2481 - protein, 126 aa, Meleagris gallopavo
MPEPAKSTSAPKKGSKKAVTKTQKKGDKKRHKSRKESYSIYVYKVLKQVHPDTGISSKAMGIMNSFVNDIFERIAGEASRLAHYNKRSTITSREIQTAVRLLLPGELAKHAVSEGTKAVTKYTSSK

SEQ ID NO: 2482 - protein, 171 aa, Meleagris gallopavo
RLCVRVPAEDEMFSDIYKIREVANGLCLEVEGKMVTRTEGQIDDSLIGGNASAEGPEGEGTEATVITGVDIVINHHLQETSFTKESYKKYIKDYMKAIKARLEEHKPERVKPFMTGAAEQIKHILANFKNYQFFVGENMNPDGMVALLDFREDGVTPYMIFFKDGLEIEKC

SEQ ID NO: 2483 - protein, 221 aa, Meleagris gallopavo
LVQVTELNEPLSNEERNLLSVAYKNVVGARRSSWRVISSIEQKTSADGNEKKIEMVRAYREKIEKELEAVCQDVLSLLDNYLIKNCSETQYESKVFYLKMKGDYYRYLAEVATGEKRATVVESSEKAYSEAHEISKEHMQPTHPIRLGLALNYSVFYYEIQNAPEQACHLAKTAFDDAIAELDTLNEDSYKDSTLIMQLLRDNLTLWTSDQQDDDGGEGNN

SEQ ID NO: 2484 - protein, 228 aa, Meleagris gallopavo
VPIAEKMAEKQEEPSNTQNGEPDNAEEGEGKKKKKVKREDLPPFEIVTGERLPAIFFKFQFRNVEYSSGRNKTFLCYVVETQGKESTTSRGYLEDEHAASHAEIAFFNTILPKCESSLRYNITWYVSSSPCVTCADRISETLRKNKNLRLTIMVGRLFMWEEPEMQAALKKMKSAGCKLRIMKPQDFEYVWQNFVEQEEGEEAKAFVPWEDIQENFQYYEEKLAEILQ

SEQ ID NO: 2485 - protein, 295 aa, Meleagris gallopavo; identical to SEQ ID NO: 858

SEQ ID NO: 2486 - protein, 311 aa, Meleagris gallopavo
AAEYSCEYGSLKFYALCGVGGVLSCGLTHTAVVPLDLVKCRMQVDPQKYKSIFNGFSVTIKEDGFRGLAKGWAPTFIGYSMQGLCKFGFYEVFKILYGNMLGEENAYLWRTSLYLAASASAEFFADIALAPMEAAKVRIQTQPGYANTLRQAVPKMFGEEGIWAFYKGVAPLWMRQIPYTMMKFACFERTVEALYKYVVPKPRSECTKGEQLIVTFIAGYIAGVFCAIVSHPADSVVSVLNKEKGSSASQVLKRLGFRGVWKGLFARIIMIGTLTALQWFIYDSVKVYFRLPRPPPPEMPESLKKKLGLTQ

SEQ ID NO: 2487 - protein, 324 aa, Meleagris gallopavo
SLIAVCEAMATYVQLNTGAKMPILGLGTWKSPPGQVTAAVMAAIDAGYRHFDCAYVYQNENEVGEGIQKKIKEGVVKREDLFVVSKLWCTFHEKSLVKGACQKTLASLKLDYLDLYLIHWPVGFKAGEDLFPADDKGMSIPGNTDLLQTWEAMEELVDAGLAKAVGISNFNHEQIERILNKPGLKYKPANNQVECHPYLTQEKLINYCQSKGISVTAYSPLGSPDRPWAKPEDPSLLDDPKIKEIAAKHNKTAAQVLIRFHIQRNVIVIPKSVTPQRIVENFKVFDFELTKEEMATILSFNRNWRACAMSMSQNHKEYPFNAEY

SEQ ID NO: 2488 - protein, 394 aa, Meleagris gallopavo
  MOD_RES (219)..(219): Any amino acid
QGILERLDAGEIVIGDGGFVFALEKRGYVKAGPWTPEATVEHPEAVTEYCGYNNICLGSNEIQTDTLLIRPFFLSKCGQETPEWVYCQKVNEAACDIAREVASEGDAVVAGGVSQTPSYLSCKDKAEVKAVFRKQLDIFMKKNVDFLIAEYFEHVEEAVWAVEVLKESGKPVAATMCIGPEGDMHGVPPGQCAVQLVKAGASIVGVNCHFDPDTALETXAISIQSLKCHCLMAYLHLGCKRSHSPKTLERGTIYSQNFPEGLEPRIITRWDVQKYARKAYDLGIRYIGGCCGFEPYHIRAIAEELAPERGFLPEASEKHGSWGNSLSMHTKPWVRARARKEYWENLKPASGRPYCPSMSKPDGWGVTKGARELMQQKEATTEQQLKELFQKQKF

SEQ ID NO: 2489 - protein, 419 aa, Meleagris gallopavo
MNKNQKPVLTGQRFKTRKRDEKEKFEPTVFRDTIVQGLNEAGSDLEAIAKFLDSAGSRLDYRRYADTLFDILVAGSMLAPGGTRIDDNDKTKMTRHCVFFAEEDHDAIRNYAQVFNKLIRRYKYLEKAFEDEIKKLLLFLKAFSETEQTKLAMLSGILLANGTLPATILTSLFTDNIVKEGIAASFAVKLFKAWMAEKDANSVTSALRKANLDKRLLELFPANRQNVDHFAKYFTEAGLKELSDFLRVQQSLGTRKELQKELQERLSQECPIKEMVLYVKEEMKRNELPEPAVIGLLWTCVMNAVEWNKKEELVAEQALKHLKQYAPLLAVFSTQGQSELILLQKVQEYCYDNIHFMKAFQKIVVLFYKADVLSEEAILKWYKEAHVAKGKSVFLDQMKKFVEWLQNAEEESESEGEEN

SEQ ID NO: 2490 - protein, 650 aa, Meleagris gallopavo
NMLIFTQLFCSFQFSGLDLNSSDSQSEGTATSKGRYIPPHLRNREASKQGFDSGGWSSSRDKDAYSSFGARSDRGAKSSFFDRGNGSRGGRYEERGRGSDYDRSGFGRFDRGGNSRWCDKSDEDDWSKPLPPSERLEQELFSGSNTGINFEKYDDIPVEATGSNCPPHIESFSDVDMGEIIMGNIELTRYTRPTPVQKHAIPIIKEKRDLMACAQTGSGKTAAFLLPILSQIYADGPGDALRAMKENGRYGRRKQYPISLVLAPTRELAVQIYEEARKFAYRSRVRPCVVYGGADIGQQIRDLERGCHLLVATPGRLVDMMERGKIGLDFCKYLVLDEADRMLDMGFEPQIRRIVEQDTMPPKGVRHTMMFSATFPKEIQMLARDFLDEYIFLAVGRVGSTSENITQKVVWVEELDKRSFLLDLLNATGKDSLTLVFVETKKGADALEDFLYHEGYACTSIHGDRSQRDREEALHQFRSGKSPILVATAVAARGLDISNVKHVINFDLPSDIEEYVHRIGRTGRVGNLGLATSFFNERNINITKDLLDLLVEAKQEVPSWLENMAYEQHHKGGGSRGRSKSSRFSGGFGARDYRTSSGAGSSSFNSSRSTSSRSGGSGSRGFGGGGYGGFYNSDGYGGNYNSQGVDWWGN

SEQ ID NO: 2491 - protein, 771 aa, Meleagris gallopavo
MAAAVRAIGSLGRFAAAAKYCPPRRPATEGYACRNVSTSTALQARTHVSYDIKGDVAVVRFNTPNSKVNTLSKQLNAEFTEVMNEIWANEAVKSAVLISSKPGSFIAGADIDMIAACKTSQEVTQLSQEGQKMLEKIEQSPKPIVAAISGSCLGGGLEVAIACHYRIATKDRKTILGTPEVLLGLLPGAGGTQRLPKMVGLPAAFDMMLTGRNIHADRAKKMGLVDQLVDPLGPGVKAPEARTIEYLEEVAIGFARGLANKTVSAKRSKGLVQKITDYAMALPFVRQQVYKTVESKVQKQTKGLYPAPLKIIEVVKAGLDQGRETGYLTESQNFGHLAMTNESKALIGLYHGQVRCKKNKFGAPQREVKTLAVLGAGLMGAGIAQVSVDKGLKTILKDTTQQGLDRGQQQVFKGLNGKVKKKSLTSFERDSILSNMTGQLDYKGFEKADMVIEAVFEDINIKHKVLKEVEAVIPPHCIFASNTSALPINQIAAVSQRPDKVIGMHYFSPVDKMQLLEIITTDKTSQDTAASAVAVGLKQGKVVIVVKDGPGFYTTRCLGPMLAEVGRVLQEGIDPKKVDAISTAFGFPVGAATLIDEVGVDVATHVAEDLGKAFGERFGGGSIGLFKLMVQKGFLAGRKAGKGFYIYQEGVKNRSLNSGMDEILAQFKLPAKPEVCTDEDIQMRLVTRFVNEAAMCLQEGILSNPVEGDIGAVFGLGFPPCLGGPFRYADSYGAKQLVDKLRKYEAVYGSQFTPCQLLLDYANSPGKKFHQ

SEQ ID NO: 2492 - protein, 1022 aa, Meleagris gallopavo
MSRRTAEMFQQAFLSTLLCVALVPLHAQFDDEPVTSCTEKTDCPISVYFVIDTSESIALQTVPIQSLVDQIKQFIPRFIEKLENEVYQNQVSITWMFGGLHYSDVVEIYSPLTRSKDTYLTKLRAINYLGRGTFTDCAISNMTQQFQSQTARDVKFAVVITDGHVTGSPCGGMKMQAERARDMGIKLFAVAPSEDVYEQGLREIASPPHDLYRSNYTITPKDALHIDENTIERIIKAMKHEAYAECYKMSCLEIAGPAGPKGYRGQKGAKGNMGEPGSPGLKGRQGDPGIEGPIGYPGPKGVPGLKGEKGEIGSDGRRGAAGLAGRNGTDGQKGKLGRIGPPGCKGDRGDKGPDGYPGDAGDQGERGDEGMKGDPGRPGRSGPPGPPGEKGSPGIPGNPGAQGPGGSKGRKGEIGPPGPKGEPGRRGDPGTKGSKGSPGTKGERGDPGPEGPRGLPGEVGNKGARGDQGLPGPRGPTGAVGEPGNIGSRGDPGDLGPRGDAGPPGPKGDRGRPGFSYPGPRGPQGDKGEKGQPGPKGGRGELGPKGTQGTKGEKGEPGDPGPRGEPGSRGPTGEAGPEGTPGPPGDPGLTDCDVMTYVRETCGCCDCEKRCGALDIMFVIDSSESIGYTNFTLEKNFVVNVVSRLGSIAKDPKSETGARVGVVQYSHEGTFEAIKLDDERINSLSSFKEAVKRLEWIAGGTWTPSALQFAYNKLIKESRREKAQVFAVVITDGRYDPRDDDKNLGALCGRDVLVNTIGIGDIFDQPEQSETLVSIACNEPQRVQKMRLFSDLVAEEFIDKMEDMLCPDPQIVCPELPCQTELAVAQCTQRPVDIVFLLDGSERIGEQNFHRAHHFVEQVAQQLTLARRNDDNMNARIALLQYGSESEQNVVFPLTYNLTEISNALAQIKYLDSSSNIGSAIIHAINNIVLSPGNGQRVARRNAELSFVFITDGITGSKNLEEAINSMKKQDVMPTVVALGSDVDMDVLLKLGLGDRAAIFREKDYESLSQPSFFDRFIRWIC

SEQ ID NO: 2493 - protein, 1213 aa, Meleagris gallopavo
SDVAVVDMSDISKQPSLFYHLGVRESFDMANNVILYHGTDDDTAQSLKDMVSQKNTASSGNYYFIPYIVTPCADYFCCESDAQRRASEYMQPSWDNILGPLCVPLVDRFISLLKDVHVTSCAYYKETLLNDIRKAREKYQGDELAKELARIKLRIDNTEVLTSDIVINLLLSYRDIQDYDAMVKLVETLEMLPTCDLADQHNIKFHYAFALNRRNNAGDREKALQVMLQVLQTCDHPAPDMFCLCGRIYKDMFLDSDCKDVNSRDHAIEWYRKGFELQSTLYSGINLAVLLLVEGQQFESSMELRKIGVRLNSLLGRKGSLEKMNNYWDVGQFFSVSMLANDVSKAVQAAEKLFKLKPPVWYLKSLVQNLMLIQRFKKFTIEHSPKQERLTFWLDIIFEATKETTNGLRFPVLVIEPTKVYQPAYVSINSEEDERSLSLWHVSPTEMKQIHEWNFAASSIRGISISKFDERCCFLYVHDNSDDFQIYFSTENQCSRFCGLVKEILSDAVGSTLELEGEIDGETLEYEYDYDEKGDRVVLGKGTYGIVYAGRDLSNQVRIAIKEIPERDSRYSQPLHEEIALHKYLKHRNVVQYLGSISEDGYIKIFMEQVPGGSLSALLRSKWGPMKEPTIKFYTKQILEGLKYLHENQIVHRDIKGDNVLVNTYSGVVKISDFGTSKRLAGINPCAETFTGTLQYMAPEIIDKGPRGYGAPADIWSLGCTMIEMATGKPPFHELGEPQAAMFKVGMFKIHPEIPESLSAEAKAFILLCFEPDPCKRATASDLLRDSFLKQVNKGKKSRIAFKPSDYNRNTSLPLSIHGEQAGSSSSEHGSVSPDSDVQHDVFFERPKRSISEIQTRHPIAHLLSVPDESLALEDRSFSPSSEDKDSGLFLLRKDSERRAILYKILKEEQNKVASNLQDCIAQSSEELQLSMAHIKQIIGILRDFIHSPEHRVMASTISKLKMDLDFDSTSINQIHLVLFGFQDAVNKVLRNHLIRPHWMFAMDNIIRRAVQAAVTILIPELRAHFEPASETEGGDKDCDEVEESFRPSEQNGTEDAAVTSGVSTLSSEVSHEAQQQLCLELGRLKQETIRLLEKLVQKEKEYQTLLQQSLEQKTQELHLLQLRFKPRVLLLFSVKDWQWPSSTLKENADPELTNWLKQQGADPDTIRRFAEEDYTLSTVLNDITKDDLRCLQLRGGLLCRIWNAILTHRQMP

SEQ ID NO: 2494 - protein, 499 aa, Oryza sativa
  subsp. japonica
MASINRPIVFFTVCLFLLCNGSLAQQLLGQSTSQWQSSRRGSPRECRFDRLQAFEPIRSVRSQAGTTEFFDVSNEQFQCTGVSVVRRVIEPRGLLLPHYTNGASLVYIIQGRGITGPTFPGCPESYQQQFQQSGQAQLTESQSQSQKFKDEHQKIHRFRQGDVIALPAGVAHWCYNDGEVPVVAIYVTDLNNGANQLDPRQRDFLLAGNKRNPQAYRREVEERSQNIFSGFSTELLSEALGVSSQVARQLQCQNDQRGEIVRVEHGLSLLQPYASLQEQEQGQVQSRERYQEGQYQQSQYGSGCSNGLDETFCTLRVRQNIDNPNRADTYNPRAGRVTNLNTQNFPILSLVQMSAVKVNLYQNALLSPFWNINAHSVVYITQGRARVQVVNNNGKTVFNGELRRGQLLIIPQHYAVVKKAQREGCAYIAFKTNPNSMVSHIAGKSSIFRALPNDVLANAYRISREEAQRLKHNRGDEFGAFTPIQYKSYQDVYNAAESS

SEQ ID NO: 2495 - protein, 499 aa, Oryza sativa
  subsp. japonica
MASINRPIVFFTVCLFLLCDGSLAQQLLGQSTSQWQSSRRGSPRGCRFDRLQAFEPIRSVRSQAGTTEFFDVSNELFQCTGVSVVRRVIEPRGLLLPHYTNGASLVYIIQGRGITGPTFPGCPETYQQQFQQSGQAQLTESQSQSHKFKDEHQKIHRFRQGDVIALPAGVAHWCYNDGEVPVVAIYVTDINNGANQLDPRQRDFLLAGNKRNPQAYRREVEEWSQNIFSGFSTELLSEAFGISNQVARQLQCQNDQRGEIVRVERGLSLLQPYASLQEQEQGQMQSREHYQEGGYQQSQYGSGCPNGLDETFCTMRVRQNIDNPNRADTYNPRAGRVTNLNSQNFPILNLVQMSAVKVNLYQNALLSPFWNINAHSIVYITQGRAQVQVVNNNGKTVFNGELRRGQLLIVPQHYVVVKKAQREGCAYIAFKTNPNSMVSHIAGKSSIFRALPTDVLANAYRISREEAQRLKHNRGDEFGAFTPLQYKSYQDVYNVAESS

SEQ ID NO: 2496 - protein, 499 aa, Oryza sativa
  subsp. japonica
MASSVFSRFSIYFCVLLLCHGSMAQLFNPSTNPWHSPRQGSFRECRFDRLQAFEPLRKVRSEAGVTEYFDEKNELFQCTGTFVIRRVIQPQGLLVPRYTNIPGVVYIIQGRGSMGLTFPGCPATYQQQFQQFSSQGQSQSQKFRDEHQKIHQFRQGDIVALPAGVAHWFYNDGDAPIVAVYVYDVNNNANQLEPRQKEFLLAGNNNRAQQQQVYGSSIEQHSGQNIFSGFGVEMLSEALGINAVAAKRLQSQNDQRGEIIHVKNGLQLLKPTLTQQQEQAQAQDQYQQVQYSERQQTSSRWNGLEENFCTIKVRVNIENPSRADSYNPRAGRITSVNSQKFPILNLIQMSATRVNLYQNAILSPFWNVNAHSLVYMIQGRSRVQVVSNFGKTVFDGVLRPGQLLIIPQHYAVLKKAEREGCQYIAIKTNANAFVSHLAGKNSVFRALPVDVVANAYRISREQARSLKNNRGEEHGAFTPRFQQQYYPGLSNESESETSE

SEQ ID NO: 2497 - protein, 495 aa, Oryza sativa
  subsp. japonica
MATTIFSRFSIYFCAMLLCQGSMAQLFNPSTNPWHSPRQGSFRECRFDRLQAFEPLRKVRSEAGVTEYFDEKNELFQCTGTFVIRRVIQPQGLLVPRYSNTPGLVYIIQGRGSMGLTFPGCPATYQQQFQQFSSQGQSQSQKFRDEHQKIHQFRQGDVVALPAGVAHWFYNDGDASVVAIYVYDINNSANQLEPRQKEFLLAGNNNRVQQVYGSSIEQHSSQNIFNGFGTELLSEALGINTVAAKRLQSQNDQRGEIVHVKNGLQLLKPTLTQQQEQAQAQYQEVQYSEQQQTSSRWNGLEENFCTIKARVNIENPSRADSYNPRAGRISSVNSQKFPILNLIQMSATRVNLYQNAILSPFWNVNAHSLVYMIQGQSRVQVVSNFGKTVFDGVLRPGQLLIIPQHYAVLKKAEREGCQYIAIKTNANAFVSHLAGKNSVFRALPVDVVANAYRISREQARSIKNNRGEEHGAFTPRFQQQYYPGFSNESESETSE

SEQ ID NO: 2498 - protein, 500 aa, Oryza sativa
  subsp. japonica
MATIAFSRLSIYFCVLLLCHGSMAQLFGPNVNPWHNPRQGGFRECRFDRLQAFEPLRRVRSEAGVTEYFDEKNEQFQCTGTFVIRRVIEPQGLLVPRYSNTPGMVYIIQGRGSMGLTFPGCPATYQQQFQQFLPEGQSQSQKFRDEHQKIHQFRQGDIVALPAGVAHWFYNEGDAPVVALYVFDLNNNANQLEPRQKEFLLAGNNNREQQMYGRSIEQHSGQNIFSGFNNELLSEALGVNALVAKRLQGQNDQRGEIIRVKNGLKLLRPAFAQQQEQAQQQEQAQAQYQVQYSEEQQPSTRCNGLDENFCTIKARLNIENPSHADTYNPRAGRITRLNSQKFPILNLVQLSATRVNLYQNAILSPFWNVNAHSLVYIVQGHARVQVVSNLGKTVFNGVLRPGQLLIIPQHYVVLKKAEHEGCQYISFKTNANSMVSHLAGKNSIFRAMPVDVIANAYRISREQARSLKNNRGEELGAFTPRYQQQTYPGFSNESENEALE

SEQ ID NO: 2499 - protein, 496 aa, Oryza sativa
  subsp. japonica
MATIKFPIVFSVVCLFLLCNGSLAQLLSQSTSQWQSSRRGSPRECRFDRLQAFEPIRTVRSQAGTTEFFDVSNELFQCTGVFVVRRVIEPRGLLLPHYSNGATLVYVIQGRGITGPTFPGCPETYQQQFQQSEQDQQLEGQSQSHKFRDEHQKIHRFQQGDVVALPAGVAHWCYNDGDAPIVAIYVTDIYNSANQLDPRHRDFFLAGNNKIGQQLYRYEARDNSKNVFGGFSVELLSEALGISSGVARQLQCQNDQRGEIVRVEHGLSLLQPYASLQEQQQEQVQSRDYGQTQYQQKQLQGSCSNGLDETFCTMRVRQNIDNPNLADTYNPRAGRITYLNGQKFPILNLVQMSAVKVNLYQNALLSPFWNINAHSVVYITQGRARVQVVNNNGKTVFDGELRRGQLLIIPQHHVVIKKAQREGCSYIALKTNPDSMVSHMAGKNSIFRALPDDVVANAYRISREEARRLKHNRGDELGVFTPSHAYKSYQDISVSA

SEQ ID NO: 2500 - protein, 820 aa, Oryza sativa
  subsp. japonica
MLCLTSSSSSAPAPLLPSLADRPSPGIAGGGGNVRLSVVSSPRRSWPGKVKTNFSVPATARKNKTMVTVVEEVDHLPIYDLDPKLEEFKDHFNYRIKRYLDQKCLIEKHEGGLEEFSKGYLKFGINTVDGATIYREWAPAAQEAQLIGEFNNWNGAKHKMEKDKFGIWSIKISHVNGKPAIPHNSKVKFRFRHGGGAWVDRIPAWIRYATFDASKFGAPYDGVHWDPPACERYVFKHPRPPKPDAPRIYEAHVGMSGEEPEVSTYREFADNVLPRIRANNYNTVQLMAIMEHSYYASFGYHVTNFFAVSSRSGTPEDLKYLVDKAHSLGLRVLMDVVHSHASNNVTDGLNGYDVGQNTHESYFHTGDRGYHKLWDSRLFNYANWEVLRFLLSNLRYWMDEFMFDGFRFDGVTSMLYHHHGINKGFTGNYKEYFSLDTDVDAIVYMMLANHLMHKLLPEATIVAEDVSGMPVLCRPVDEGGVGFDFRLAMAIPDRWIDYLKNKEDRKWSMSEIVQTLTNRRYTEKCIAYAESHDQSIVGDKTIAFLLMDKEMYTGMSDLQPASPTINRGIALQKMIHFITMALGGDGYLNFMGNEFGHPEWIDFPREGNNWSYDKCRRQWSLVDTDHLRYKYMNAFDQAMNALEEEFSFLSSSKQIVSDMNEKDKVIVFERGDLVFVFNFHPNKTYKGYKVGCDLPGKYRVALDSDALVFGGHGRVGHDVDHFTSPEGMPGVPETNFNNRPNSFKVLSPPRTCVAYYRVDEDREELRRGGAVASGKIVTEYIDVEATSGETISGGWKGSEKDDCGKKGMKFVFRSSDEDCK

SEQ ID NO: 2501 - protein, 484 aa, Oryza sativa
  subsp. japonica
MATTTSLLSSCLCALLLAPLFSQGVDAWESRQGASRQCRFDRLQAFEPLRKVRSEAGDTEYFDERNEQFRCAGVFVIRRVIEPQGLVVPRYSNTPALAYIIQGKGYVGLTFPGCPATHQQQFQLFEQRQSDQAHKFRDEHQKIHEFRQGDVVALPASVAHWFYNGGDTPAVVVYVYDIKSFANQLEPRQKEFLLAGNNQRGQQIFEHSIFQHSGQNIFSGFNTEVLSEALGINTEASKRLQSQNDQRGDIIRVKHGLQLLKPTLTQRQEEHRQYQQVQYREGQYNGLDENFCTIKARVNIENPSRADYYNPRAGRITLLNNQKFPILNLIGMGAARVNLYQNALLSPFWNINAHSVVYIIQGSVRVQVANNQGRSVFNGVLHQGQLLIIPQNHAVIKKAEHNGCQYVAIKTISDPTVSWVAGKNSILRALPVDVIANAYRISRDEARRLKNNRADEIGPFTPRFPQKSQRGYQFLTEGLSLIGM

SEQ ID NO: 2502 - protein, 510 aa, Oryza sativa
  subsp. japonica
MASMSTILPLCLGLLLFFQVSMAQFSFGGSPLQSPRGFRGDQDSRHQCRFEHLTALEATHQQRSEAGFTEYYNIEARNEFRCAGVSVRRLVVESKGLVLPMYANAHKLVYIVQGRGVFGMALPGCPETFQSVRSPFEQEVATAGEAQSSIQKMRDEHQQLHQFHQGDVIAVPAGVAHWLYNNGDSPVVAFTVIDTSNNANQLDPKRREFFLAGKPRSSWQQQSYSYQTEQLSRNQNIFAGFSPDLLSEALSVSKQTVLRLQGLSDPRGAIIRVENGLQALQPSLQVEPVKEEQTQAYLPTKQLQPTWLRSGGACGQQNVLDEIMCAFKLRKNIDNPQSSDIFNPHGGRITRANSQNFPILNIIQMSATRIVLQNNALLTPHWTVNAHTVMYVTAGQGHIQVVDHRGRSVFDGELHQQQILLIPQNFAVVVKARREGFAWVSFKTNHNAVDSQIAGKASILRALPVDVVANAYRLSREDSRHVKFNRGDEMAVFAPRRGPQQYAEWQINEK

SEQ ID NO: 2503 - protein, 495 aa, Oryza sativa
  subsp. japonica
AFSRFSICFCVLLLCHGSMAQIFSLGINPWQNPRQGGSRECRFDRLQAFEPLRKVRHEAGVTEYFDEKNEQFQCTGTLVIRRIIEPQGLLLPRYSNTPGLVYIIQGTGVLGLTFPGCPATYQKQFRHFGLEGGSQRQGKKLRDENQKIHQFRQGDVVALPSGIPHWFYNEGDTPVVALFVFDVNNNANQLEPRQKEFLLAGNNIEQQVSNPSINKHSGQNIFNGFNTKLLSEALGVNIEVTRRLQSQNDRRGDIIRVKNGLRLIKPTITQQQEQTQDQYQQIQYHREQRSTSKYNGLDENFCAIRARLNIENPNHADTYNPRAGRITNLNSQKFSILNLVQMSATRVNLYQNAILSPFWNINAHSLVYTIQGRARVQVVSNHGKAVFNGVLRPGQLLIIPQNYVVMKKAELEGFQFIAFKTNPNAMVNHIAGKNSVLRAMPVDVIANAYRISRQEARSLKNNRGEEIGAFTPRYQQQKIHQEYSNPNESETQEVI

SEQ ID NO: 2504 - protein, 825 aa, Oryza sativa
  subsp. japonica
MAAPASAVPGSAAGLRAGAVRFPVPAGARSWRAAAELPTSRSLLSGRRFPGAVRVGGSGGRVAVRAAGASGEVMIPEGESDGMPVSAGSDDLQLPALDDELSTEVGAEVEIESSGASDVEGVKRVVEELAAEQKPRVVPPTGDGQKIFQMDSMLNGYKYHLEYRYSLYRRLRSDIDQYEGGLETFSRGYEKFGFNHSAEGVTYREWAPGAHSAALVGDFNNWNPNADRMSKNEFGVWEIFLPNNADGSSPIPHGSRVKVRMETPSGIKDSIPAWIKYSVQAAGEIPYNGIYYDPPEEEKYIFKHPQPKRPKSLRIYETHVGMSSTEPKINTYANFRDEVLPRIKKLGYNAVQIMAIQEHAYYGSFGYHVTNFFAPSSRFGTPEDLKSLIDKAHELGLVVLMDVVHSHASNNTLDGLNGFDGTDTHYFHSGSRGHHWMWDSRLFNYGNWEVLRFLLSNARWWLEEYKFDGFRFDGVTSMMYTHHGLQVAFTGNYSEYFGFATDADAVVYLMLVNDLIHGLYPEAITIGEDVSGMPTFALPVQDGGVGFDYRLHMAVPDKWIELLKQSDESWKMGDIVHTLTNRRWSEKCVTYAESHDQALVGDKTIAFWLMDKDMYDFMALDRPATPSIDRGIALHKMIRLITMGLGGEGYLNFMGNEFGHPEWIDFPRAPQVLPNGKFIPGNNNSYDKCRRRFDLGDADYLRYRGMLEFDRAMQSLEEKYGFMTSDHQYISRKHEEDKMIIFEKGDLVFVFNFHWSNSYFDYRVGCLKPGKYKVVLDSDAGLFGGFGRIHHTAEHFTADCSHDNRPYSFSVYSPSRTCVVYAPAE

SEQ ID NO: 2505 - protein, 954 aa, Oryza sativa
  subsp. japonica
MAVGEECAAAVASQVRHRWLAAAFFSSVDVAIVAGLPRVPTNYRDAPTCGMWGPHVSRCFIATFFNKPLGVLLGFVTDARAYWVTRSLIAWNVNDQDTSLFLYASRDATMHVSDGAIHGYDSKIELEPEHASLPDNVAEKFPFIRSYRTFRVPSSVDVASLVKCQLAVASYDAHGRHQDVTGLQLPGVLDDMFAYTGPLGAVFSDKDVDLYLWAPTAQDVRVCFYDGPAGPLLQTVQLKELNGVWSVTVPRYRENQYYLYEVKVYHPSTSQVEKCLADDPYARGLSANGTRTWLVDINSETLKPASWDELSDEKPNLESFSDISIYELHIRDFSAHDSTVDCNSRGGFRAFTFQDSAGIRHLRKLSAAGLTHVHLLPSFHFASVDDNKSNWKFVDEAQLAKLPPGSDEQQAAIVSIQQEDPYNWGYDPVLWGVPKGSYASNPDGPSRIIEYRQMVQALNRIGLRVVMDVVYNHLDSSGPFGVSSVLDKIVPGYYLRRNVNGQIENSAAMNNTASEHFMVDRLIVDDLLNWAINYKVDGFRFDLMGHIMKSTMIRAKSAIRSLTRDVHGVDGSKIYLYGEGWDFGEVAQNKRGINASQINMSGTGIGSFNDRIRDSVNGGNPFGNPLQQGFSTGLFLEPNGYYQGNEADTRRELATYADHIQIGLAGNLKDYVLRTHTGEAKKGSDIYTFDGSPVGYTSSPVETINYVSAHDNETLFDIVSIKTPIGLSIDEKCRINHLASSMIALSQGIPFFHAGDEILRSKSLDRDSYNSGDWFNKLDFTYETNNWGVGLPPRDKNEENWHLIKPRLENPSFRPLKNHILSVFDNFVDILKIRYSSPLFRLSTASDIEQRVRFHNTGPSMVPGVIVMSIKDAQNEKCKMAQLDKNFSYVVTIFNVCPHEVSIEIHDLASLGLELHPIQVNSSDALVRQSAYEASKGRFTVPRRTTAVFVQPRC

SEQ ID NO: 2506 - protein, 609 aa, Oryza sativa
  subsp. japonica
MSALTTSQLATSATGFGIADRSAPSSLLRHGFQGLKPRSPAGGDATSLSVTTSARATPKQQRSVQRGSRRFPSVVVYATGAGMNVVFVGAEMAPWSKTGGLGDVLGGLPPAMAANGHRVMVISPRYDQYKDAWDTSVVAEIKVADRYERVRFFHCYKRGVDRVFIDHPSFLEKVWGKTGEKIYGPDTGVDYKDNQMRFSLLCQAALEAPRILNLNNNPYFKGTYGEDVVFVCNDWHTGPLASYLKNNYQPNGIYRNAKVAFCIHNISYQGRFAFEDYPELNLSERFRSSFDFIDGYDTPVEGRKINWMKAGILEADRVLTVSPYYAEELISGIARGCELDNIMRLTGITGIVNGMDVSEWDPSKDKYITAKYDATTAIEAKALNKEALQAEAGLPVDRKIPLIAFIGRLEEQKGPDVMAAAIPELMQEDVQIVLLGTGKKKFEKLLKSMEEKYPGKVRAVVKFNAPLAHLIMAGADVLAVPSRFEPCGLIQLQGMRYGTPCACASTGGLVDTVIEGKTGFHMGRLSVDCKVVEPSDVKKVAATLKRAIKVVGTPAYEEMVRNCMNQDLSWKGPAKNWENVLLGLGVAGSAPGIEGDEIAPLAKENVAAP

SEQ ID NO: 2507 - protein, 947 aa, Oryza sativa
  subsp. japonica
MPSVSRAVCVQRASGNNGRRCRDGAAAAGRRSVVAQRARHGKPEVAIRSGSGGSARGGHCSPLRAVAAPIPTTKKRVFHFGKGKSEGNKAMKDLLGGKGANLAEMASIGLSVPPGFTVSTEACQQYQAAGKTLPAGLWEEIVEGLQWVEEYMAARLGDPARPLLLSVRSGAAVSMPGMMDTVLNLGLNDEVAAGLAAKSGDRFAYDSYRRFLDMFGNVVMDIPHALFEEKLEAMKAVKGLHNDTDLTATDLKELVAQYKDVYVEAKGEPFPSDPKKQLQLAVLAVFNSWDSPRAIKYRSINKITGLKGTAVNVQTMVFGNMGNTSGTGVLFTRNPSTGEKKLYGEFLVNAQGEDVVAGIRTPEDLDAMRDHMPEPYEELVENCKILESHYKEMMDIEFTVQENRLWMLQCRTGKRTGKGAVKIAVDMVNEGLVERRTALKMVEPGHLDQLLHPQFENPSGYKDKVIATGLPASPGAAVGQIVFTAEDAEAWHAQGKDVILVRTETSPEDVGGMHAAVGILTARGGMTSHAAVVARGWGKCCVSGCSSVRVNDASKIVVIEDKALHEGEWLSLNGSTGEVIIGKQPLCPPALSGDLETFMSWVDEVRKLKVMANADTPEDATTARQNGAEGIGLCRTEHMFFASDERIKAVRQMIMASSLELRQKALDRLLPYQRSDFEGIFRAMDGLPVTIRLLDPPLHEFLPEGHVEDMVRELCSETGAAQDDVLARVEKLSEVNPMLGFRGCRLGISYPELTEMQARAIFEAAITMTNQGIQVFPEIMVPLVGTPQELGHQVDVIRQIANKVFTDMGKTIGYKVGTMIEIPRAALVADEIAEQAEFFSFGTNDLTQMTFGYSRDDVGKFLPIYLSQGILQHDPFEVLDQRGVGELVKLATERGRKARPNLKVGICGEHGGEPLSVAFFAKAGLDYVSCSPFRVPIARLAAAQVLL

SEQ ID NO: 2508 - protein, 816 aa, Oryza sativa
  subsp. japonica
MGETTGERALTRLHSMRERIGDSLSAHTNELVAVFSRLVNQGKGMLQPHQIIAEYNAAIPEGEREKLKDSALEDVLRGAQEAIVIPPWIALAIRPRPGVWEYLRINVSQLGVEELSVPEYLQFKEQLVDGSTQNNFVLELDFEPFNASFPRPSLSKSIGNGVQFLNRHLSSKLFHDKESMYPLLNFLRAHNYKGMTMMLNDRIRSLDALQGALRKAEKHLAGITADTPYSEFHHRFQELGLEKGWGDCAQRVRETIHLLLDLLEAPEPSALEKFLGTIPMVFNVVILSPHGYFAQANVLGYPDTGGQVVYILDQVRAMENEMLLRIKQQGLNITPRILIVTRLLPDAHGTTCGQRLEKVLGTEHTHILRVPFRTENGTVRKWISRFEVWPYLETYTDDVAHEISGELQATPDLIIGNYSDGNLVACLLAHKLGVTHCTIAHALEKTKYPNSDLYWKKFEDHYHFSCQFTADLIAMNHADFIITSTFQEIAGNKETVGQYESHMAFTMPGLYRVVHGIDVFDPKFNIVSPGADMSIYFPFTESQKRLTSLHLEIEELLFSDVENTEHKFVLKDKKKPIIFSMARLDHVKNLTGLVELYGRNPRLQELVNLVVVCGDHGKESKDKEEQAEFKKMFNLIEQYNLNGHIRWISAQMNRVRNGELYRYICDMRGAFVQPALYEAFGLTVIEAMTCGLPTFATAYGGPAEIIVHGVSGYHIDPYQNDKASALLVEFFEKCQEDPNHWIKISQGGLQRIEEKYTWKLYSERLMTLSGVYGFWKYVTNLDRRETRRYLEMLYALKYRKMATTVPLAIEGEASTK

SEQ ID NO: 2509 - protein, 514 aa, Oryza sativa
  subsp. japonica
MPLDTNACAQPMRRAGEGAGTERLMERLNIGGMTQEKALRKRCFGDGVTGTARCVFTSDADRDTPHLRTQSSRKNYADASHVSAVILGGGTGVQLFPLTSTRATPAVPVGGCYRLIDIPMSNCFNSGINKIFVMTQFNSASLNRHIHHTYLGGGINFTDGSVQVLAATQMPDEPAGWFQGTADAIRKFMWILEDHYNQNNIEHVVILCGDQLYRMNYMELVQKHVDDNADITISCAPIDGSRASDYGLVKFDDSGRVIQFLEKPEGADLESMKVDTSFLSYAIDDKQKYPYIASMGIYVLKKDVLLDILKSKYAHLQDFGSEILPRAVLEHNVKACVFTEYWEDIGTIKSFFDANLALTEQPPKFEFYDPKTPFFTSPRYLPPARLEKCKIKDAIISDGCSFSECTIEHSVIGISSRVSIGCELKDTMMMGADQYETEEETSKLLFEGKVPIGIGENTKIRNCIIDMNARIGRNVIIANTQGVQESDHPEEGYYIRSGIVVILKNATIKDGTVI

SEQ ID NO: 2510 - protein, 514 aa, Oryza sativa
  subsp. japonica
MAMAAAMGVASPYHAAHAAASTSCDSLRLLVAEGRPRRPRGVASSSSSSSSAGRRRRPLVFSPRAVSDSKSSQTCLDPDASTSVLGIILGGGAGTRLYPLTKKRAKPAVPLGANYRLIDIPVSNCLNSNISKIYVLTQFNSASLNRHLSRAYGNNIGGYKNEGFVEVLAAQQSPDNPNWFQGTADAVRQYLWLFEEHNVMEFLILAGDHLYRMDYEKFIQAHRETDSDITVAALPMDEKRATAFGLMKIDEEGRIVEFAEKPKGEQLKAMMVDTTILGLDDVRAKEMPYIASMGIYVISKNVMLQLLREQFPGANDFGSEVIPGATNIGMRVQAYLYDGYWEDIGTIEAFYNANLGITKKPVPDFSFYDRSAPIYTQPRHLPPSKVLDADVTDSVIGEGCVIKNCKIHHSVVGLRSCISEGAIIEDSLLMGADYYETEADKKLLGEKGGIPIGIGKNCHIRRAIIDKNARIGDNVKIINVDNVQEAARETDGYFIKSGIVTVIKDALLPSGTVI

SEQ ID NO: 2511 - protein, 808 aa, Oryza sativa
  subsp. japonica
MAAKLARLHSLRERLGATFSSHPNELIALFSRYVNQGKGMLQRHQLLAEFDALIEADKEKYAPFEDILRAAQEAIVLPPWVALAIRPRPGVWDYIRVNVSELAVEELSVSEYLAFKEQLVDGHTNSNFVLELDFEPFNASFPRPSMSKSIGNGVQFLNRHLSSKLFQDKESLYPLLNFLKAHNHKGTTMMLNDRIQSLRGLQSSLRKAEEYLMGIPQDTPYSEFNHRFQELGLEKGWGDCAKRVLDTIHLLLDLLEAPDPANLEKFLGTIPMMFNVVILSPHGYFAQSNVLGYPDTGGQVVYILDQVRALENEMLLRIKQQGLDITPKILIVTRLLPDAVGTTCGQRVEKVIGTEHTDILRVPFRSENGILRKWISRFDVWPFLETYTEDVANEIMREMQAKPDLIIGNYSDGNLVATLLAHKLGVTQCTIAHALEKTKYPNSDIYLDKFDSQYHFSCQFTADLIAMNHTDFIITSTFQEIAGSKDTVGQYESHIAFTLPGLYRVVHGIDVFDPKFNIVSPGADMSVYFPYTEADKRLTAFHPEIEELLYSEVENDEHKFVLKDKNKPIIFSMARLDRVKNMTGLVEMYGKNAHLRDLANLVIVCGDHGNQSKDREEQAEFKKMYGLIDQYKLKGHIRWISAQMNRVRNGELYRYICDTKGVFVQPAFYEAFGLTVIEAMTCGLPTIATCHGGPAEIIVDGVSGLHIDPYHSDKAADILVNFFEKCKQDSTYWDNISQGGLQRIYEKYTWKLYSERLMTLTGVYGFWKYVSNLERRETRRYIEMFYALKYRSLASAVPLAVDGESTSK

SEQ ID NO: 2512 - protein, 809 aa, Oryza sativa
  subsp. japonica
MSGPKLDRTPSIRDRVEDTLHAHRNELVALLSKYVSQGKGILQPHHILDALDEVQSSGGRALVEGPFLDVLRSAQEAIVLPPFVAIAVRPRPGVWEYVRVNVHELSVEQLTVSEYLRFKEELVDGQYNDPYILELDFEPFNASVPRPNRSSSIGNGVQFLNRHLSSIMFRNKDCLEPLLDFLRGHRHKGHVMMLNDRIQSLGRLQSVLTKAEEHLSKLPADTPYSQFAYKFQEWGLEKGWGDTAGYVLEMIHLLLDVLQAPDPSTLETFLGRIPMIFNVVVVSPHGYFGQANVLGLPDTGGQIVYILDQVRALENEMVLRLKKQGLDFTPKILIVTRLIPEAKGTSCNQRLERISGTQHTYILRVPFRNENGILRKWISRFDVWPYLEKFAEDAAGEIAAELQGTPDFIIGNYSDGNLVASLLSYKMGITQCNIAHALEKTKYPDSDIYWTKYDEKYHFSCQFTADIIAMNNADFIITSTYQEIAGSKNTVGQYESHTAFTLPGLYRIVHGIDVFDPKFNIVSPGADMSIYFPYTEKAKRLTSLHGSLENLISDPEQNDEHIGHLDDRSKPILFSMARLDRVKNITGLVEAYAKNARLRELVNLVVVAGYNDVKKSKDREEIAEIEKMHELIKTYNLFGQFRWISAQTNRARNGELYRYIADTHGAFVQPAFYEAFGLTVVEAMTCGLPTFATVHGGPAEIIEHGISGFHIDPYHPDQAANLIADFFEQCKQDPNHWVEVSNRGLQRIYEKYTWKIYSERLMTLAGVYGFWKYVSKLERRETRRYLEMFYILKFRELAKTVPLAVDEAH

SEQ ID NO: 2513 - protein, 150 aa, Oryza sativa
  subsp. japonica
MKIIFVFALLAIAACSASAQFDVLGQSYRQYQLQSPVLLQQQVLSPYNEFVRQQYGIAASPFLQSAAFQLRNNQVWQQLALVAQQSHYQDINIVQAIAQQLQLQQFGDLYFDRNLAQAQALLAFNVPSRYGIYPRYYGAPSTITTLGGVL

SEQ ID NO: 2514 - protein, 951 aa, Oryza sativa
  subsp. japonica
MATASAPLQLATASRPLPVGVGCGGGGGGGLHVGGARGGGAAPARRRLAVRSVASDRGVQGSVSPEEEISSVLNSIDSSTIASNIKHHAEFTPVFSPEHFSPLKAYHATAKSVLDTLIMNWNATYDYYDRTNVKQAYYLSMEFLQGRALTNAVGNLELTGQYAEALQQLGHSLEDVATQEPDAALGNGGLGRLASCFLDSLATLNYPAWGYGLRYKHGLFKANHTKDGQEEVAENWLEMGNPWEIVRTDVSYPVKFYGKVVEGTDGRMHWIGGENIKVVAHDIPIPGYKTKTTNNLRLWSTTVPSQDFDLEAFNAGDHASAYEAHLNAEKPHYRDIIARFERRAGDSLSWEDFPSKVAVQMNDTHPTLCIPELMRILIDVKGLSWNEAWSITERTVAYTNHTVLPEALEKWSLDIMQKLLPRHVEIIEKIDGELMNIIISKYGTEDTSLLKKKIKEMRILDNIDLPDSIAKLFVKPKEKKESPAKLKEKLLVKSLEPSVVVEEKTVSKVEINEDSEEVEVDSEEVVEAENEDSEDELDPFVKSDPKLPRVVRMANLCVVGGHSVNGVAAIHSEIVKEDVFNSFYEMWPAKFQNKTNGVTPRRWIRFCNPELSAIISKWIGSDDWVLNTDKLAELKKFADDEDLQSEWRAAKKANKVKVVSLIREKTGYIVSPDAMFDVQVKRIHEYKRQLLNILGIVYRYKKMKEMSAKDRINSFVPRVCIFGGKAFATYVQAKRIVKFITDVAATVNHDPEIGDLLKVVFIPDYNVSVAEALIPASELSQHISTAGMEASGTSNMKFAMNGCILIGTLDGANVEIREEVGEENFFLFGAEAHEIAGLRKERAQGKFVPDPRFEEVKRFVRSGVFGTYNYDDLMGSLEGNEGYGRADYFLVGKDFPSYIECQEKVDKAYRDQKLWTRMSILNTASSSKFNSDRTIHEYAKDIWDIKPVILP

SEQ ID NO: 2515 - protein, 665 aa, Oryza sativa
  subsp. japonica
MDRVRGCAFLLGVLLAGSLFAFSVAKEETKKLGTVIGIDLGTTYSCVGVYKNGHVEIIANDQGNRITPSWVAFTDSERLIGEAAKNQAAVNPERTIFDVKRLIGRKFEDKEVQRDMKLVPYKIVNKDGKPYIQVKIKDGENKVFSPEEVSAMILGKMKETAEAYLGKKINDAVVTVPAYFNDAQRQATKDAGVIAGLNVARIINEPTAAAIAYGLDKKGGEKNILVFDLGGGTFDVSILTIDNGVFEVLATNGDTHLGGEDFDQRIMEYFIKLIKKKYSKDISKDNRALGKLRREAERAKRALSNQHQVRVEIESLFDGTDFSEPLTRARFEELNNDLFRKTMGPVKKAMDDAGLEKSQIHEIVLVGGSTRIPKVQQLLRDYFEGKEPNKGVNPDEAVAYGAAVQGSILSGEGGDETKDILLLDVAPLTLGIETVGGVMTKLIPRNTVIPTKKSQVFTTYQDQQTTVSIQVFEGERSMTKDCRLLGKFDLSGIPAAPRGTPQIEVTFEVDANGILNVKAEDKGTGKSEKITITNEKGRLSQEEIDRMVREAEEFAEEDKKVKERIDARNQLETYVYNMKNTVGDKDKLADKLESEEKEKVEEALKEALEWLDENQTAEKEEYEEKLKEVEAVCNPIISAVYQRTGGAPGGGADGEGGVDDEHDEL

SEQ ID NO: 2516 - protein, 407 aa, Oryza sativa
  subsp. japonica
MASSSVFAGLAQAPEDPILGVTVAYNKDPSPVKVNLGVGAYRTEEGKPLVLNVVRRAEQMLINNPSRVKEYLPITGLADFNKLSAKLIFGADSPAIQENRVATVQCLSGTGSLRVGGEFLARHYHERTIYIPQPTWGNHPKVFTLAGLTVRSYRYYDPATRGLDFQGLLEDLGSAPSGAIVLLHACAHNPTGVDPTLDQWEQIRQLMRSKALLPFFDSAYQGFASGSLDQDAQSVRMFVADGGELLMAQSYAKNMGLYGERVGALSIVCGSADVAVRVESQLKLVIRPMYSNPPIHGASIVATILKDSAMFNEWTVELKGMADRIISMRQQLFDALKTRETPGDWSHIIKQIGMFTFTGLNSDQVAFMRQEYHIYMTSDGRISMAGLSGRTIPHLADAIHAAVTKLK

SEQ ID NO: 2517 - protein, 337 aa, Oryza sativa
  subsp. japonica
MGKIKIGINGFGRIGRLVARVALQSEDVELVAVNDPFITTEYMTYMFKYDTVHGQWKHHEVKVKDSKTLIFGTKEVAVFGCRNPEEIPWAAAGAEYVVESTGVFTDKDKAAAHLKGGAKKVVISAPSKDAPMFVVGVNEKEYKSDVNIVSNASCTTNCLAPLAKVINDRFGIVEGLMTTVHAITATQKTVDGPSMKDWRGGRAASFNIIPSSTGAAKAVGKVLPALNGKLTGMAFRVPTVDVSVVDLTVRLEKPASYDQIKAAIKEEAEGKLKGILGYVEEDLVSTDFQGDSRSSIFDAKAGIALSDTFVKLVSWYDNEWGYSTRVIDLIRHMHSTN

SEQ ID NO: 2518 - protein, 425 aa, Oryza sativa
  subsp. japonica
MAAMMAVTTMVTRNNAVGGGAVAVVDRKGWFVPEVSFPWSSVEGECINSSSKRLEFPRRTAAPPLFASVGLSLPSAAKGRDNCDVARQLAAAEAEEAAGKKRQGRKMKGGGGLLSLRKVRVKIGNPHLRRLVSGAIAGAVSRTFVAPLETIRTHLMVGSCGAGSMAEVFRWIMRTEGWTGLFRGNAVNVLRVAPSKAIEHFTYDTAKKYLTPEDGEPAKIPIPVPLVAGALAGVASTLCTYPMELVKTRLTIEKDVYDNVLHAFVKIVREGGPGELYRGLAPSLIGVVPYAATNFYAYETLRRLYRRATGRADVGPAATLLIGSAAGAIASTATFPLEVARKQMQVGAVGGRQVYRHVLHAMYCILRGEGAAGLYRGLGPSCIKLMPAAGISFMCYEALKKVLVEEEAAPELEAECAEEIKEKVA

SEQ ID NO: 2519 - protein, 562 aa, Oryza sativa
  subsp. japonica
MATRARATILLLLAAVLFAAAAAASGEDRRRETSLRRCLQRCEQDRPPYERARCVQECKDQQQQQQERRREHGGHDDDRRDRDRRGEGSSEEEDEGRERGSRRRPYVFGRRSFRQVVRSDQGSVRLLPPFHQASSLLRGIKNYRVAVLEANPRSFVMPTHTDAHCICYVAQGEGVVAIIENGEKWSYAIRQGDVFVAPAGTINYLANTDGRRKLIVTKILHTISVPGQIQFFFAPGGRNPESFLSSFSKGVQRAAFKISEEKLEKLLGKQDKGVIIRASEEQVRELRRHASEGGHGPHWPLPPFGESSRGPFNILEQRPRFANRHGRLYEADARSFHDLAEHDIRVAVVNITAGSMNAPFYNTRSVKVAYVLDGEGEAEIVCPHLSRGGRGGESEERRRERGKGKWREEEEEEEEQQKGQEEEEEEQVGQGYETIRARLSRGTVFVVPSGHPIVVTSSRDSTLQIVCFDVHANNNERMYLAGMNSVLKKLDPQAKELAFAASAREVDELLNAQQESAFLAGPEKSGRRGEESEDEDRRRRRSHRGRGDEAVETLLRMAAAAV

SEQ ID NO: 2520 - protein, 698 aa, Oryza sativa
  subsp. japonica
MASFTSQLGAMACGAAPSTSPLAARRSGQLFVGRKPAAASVQMRVPRAGRARGVAMRVACEKVVGIDLGTTNSAVAAMEGGKPTVITNAEGQRTTPSVVAYTKGGERLVGQIAKRQAVVNPENTFFSVKRFIGRKMAEVDDEAKQVSYHVVRDDNGNVKLDCPAIGKQFAAEEISAQVLRKLVDDASKFLNDKITKAVVTVPAYFNDSQRTATKDAGRIAGLEVLRIINEPTAASLAYGFEKKNNETILVFDLGGGTFDVSVLEVGDGVFEVLSTSGDTHLGGDDFDKKVVDWLASNFKKDEGIDLLKDKQALQRLTEAAEKAKMELSTLSQTNISLPFITATADGPKHIETTLSRAKFEELCSDLIDRLKTPVTNALRDAKLSVDNLDEVILVGGSTRIPSVQELVKKITGKDPNVTVNPDEVVSLGAAVQGGVLAGDVKDVVLLDVTPLSLGLETLGGVMTKIIPRNTTLPTSKSEVFSTAADGQTSVEINVLQGEREFVRDNKSLGSFRLDGIPPAPRGVPQIEVKFDIDANGILSVAAIDKGTGKKQDITITGASTLPKDEVERMVEEADKFAQEDKEKRDAIDTKNQADSVVYQTEKQLKELGDKVPAPVKEKVDAKLNELKEAIAGGSTQSMKDAMAALNEEVMQIGQAMYNQQPNAGAAGPTPGADAGPTSSGGKGPNDGDVIDADFTDSN

SEQ ID NO: 2521 - protein, 817 aa, Oryza sativa
  subsp. japonica
MALTSQSLFFSPLAAGPSRRVRGRGRSTSVSAAASASSHNSQPHGHPQQPLAVASSSSKSESKGSKTFALASAITAAASGAFLLASSGGGFGGGAGGPLGGGGGGWGAGGGGGGGGGGGGGGFWSRIFSGGAAHADEKSSGDWDPHGLPANINVPMTKLSGLKRYKISELKFFDRAAGGGGAFTGPEDSFFEMVTLQPGGVYTKSQLLKELETLVSCGMFERVDLEGKAKPDGTLGLTVSFVESVWSAAKQFKCINVGLMSQSGQVDFDQDMTEREKMDYLRKQERDYQQRVRGAKPCILPDNVRGEVLGMMKKQEKVSARLLQRIRDHVQKWYHNEGFVCAQVVNFGNLNTSEVVCEVVEGDITKVEYQFQDKLGNFVEGNTQIPIIDRELPQQLRPGHIFNIGAGKQALKNINSLALFSNIEVNPRPDETKEGGIVVEIKLKELEPKSAEVSTEWSIVPGREGRPTLASIQPGGTVSFEHRNIYGLNRSIVGSVTSSNLLNPQDDLSFKLEYVHPYLDGVDDRNKNRTFKTSCFNTRKLSPVFVAGPNMDEAPPVWVDRVGFKANITESFTRQSKFTYGLVVEEITTRDETNSICTHGSRAMPSGGLSMDGPPTTLSGTGIDRMAFLQANITRDNTEFVNGAVIGDRCIFQLDQGLGIGSKNPFFNRHQLTLTKFVNLNKQEKGAGKPLPAVLVLHGHYAGCVGDLPSYDAFTLGGPYSVRGYGMGELGASRNVLEVASELRIPVRNTYVYGFVEHGTDLGSSKDVKGNPTEFFRRVGHGSSYGLGVKLGLVRGEYIVDHNAGTGTVFFRFGERF

SEQ ID NO: 2522 - protein, 447 aa, Oryza sativa; identical to SEQ ID NO: 767
  subsp. japonica

SEQ ID NO: 2523 - protein, 495 aa, Oryza sativa
  subsp. japonica
MTISVFSRFSIYFCVLLLCNGSMAQLFDPATNQWQTHRQGSFRECRFERLQAFEPLQNVRSEAGVTEYFDETNELFQCTGTFVIRRVIQPQGLLIPRYANTPGMVYIIQGRGSMGLTFPGCPATYQQQSQQFLFQGESQSQKFIDEHQKIHQFRQGDIVVLPTGVAHWFYNDGDTPVVALYVYDINNSANQLEPRHREFLLAGKNNRVQQVYGRSIQQHSGQNIFNGFSVEPLSEALNINTVTTKRLQSQNDQRGEIIHVKNGLQLLKPTLTQRQEQEQAQYQEVQYSEKPQTSSRWNGLEENLCTIKTRLNIENPSRADSYDPRAGRITSLDSQKFPILNIIQMSATRVNLYQNAILTPFWNVNAHSLMYVIRGRARVQVVSNFGKTVFDGVLRPEQLLIIPQNYVVLKKAQHEGCQYIAINTNANAFVSHLAGVDSVFHALPVDVIANAYCISREEARRLKNNRGDEYGPFPPRLQQQIYPEFSNESKGETSE

SEQ ID NO: 2524 - protein, 186 aa, Oryza sativa
  subsp. japonica
MASKVVFFAAALMAAMVAISGAQLSESEMRFRDRQCQREVQDSPLDACRQVLDRQLTGRERFQPMFRRPGALGLRMQCCQQLQDVSRECRCAAIRRMVRSYEESMPMPLEQGWSSSSSEYYGGEGSSSEQGYYGEGSSEEGYYGEQQQQPGMTRVRLTRARQYAAQLPSMCRVEPQQCSIFAAGQY

SEQ ID NO: 2525 - protein, 358 aa, Oryza sativa
  subsp. japonica
MSAYCGKYKDELIKNAAYIGTPGKGILAADESTGTIGKRFASINVENVEENRRSLRELLFTTPGALQHLSGVILFEETLYQKTKDGKPFVDVLKEGGVLPGIKVDKGTVEVAGTNKETTTQGHDDLGKRCAKYYEAGARFAKWRAVLKIGPNEPSQLSIDLNAQGLARYAIICQENGLVPIVEPEILVDGSHDIERCAYVTEKVLAACYKALNEHHVLLEGSLLKPNMVTPGSESKKVSPQLIAEYTVRALQRTVPAAVPAIVFLSGGQSEEEATVNLNAMNKLSTKKPWALSFSFGRALQQSTLKAWGGKTENVVKAQKAFITRCKANSEATLGTYQGDAVLGEGASESLHVKDYKY

SEQ ID NO: 2526 - protein, 369 aa, Oryza sativa
  subsp. japonica
MGKGGKGAEAAAAAVAGAGEEENMAAWLVAKNTLKIMPFKLPPVGPYDVRVRMKAVGICGSDVHYLREMRIAHFVVKEPMVIGHECAGVIEEVGSGVTHLAVGDRVALEPGISCWRCRHCKGGRYNLCEDMKFFATPPVHGSLANQIVHPGDLCFKLPENVSLEEGAMCEPLSVGVHACRRADVGPETGVLIMGAGPIGLVTLLAARAFGATRVVIVDVDEHRLSVARSLGADAAVRVSARAEDVGEEVERIRAAMGGDIDVSLDCAGFSKTVATALEATRGGGKVCLVGMGHNEMTVPLTSAAIREVDVVGIFRYKDTWPLCIEFLRSGKIDVKPLITHRFGFSQEDVEEAFEVSARGRDAIKVMFNL

SEQ ID NO: 2527 - protein, 483 aa, Oryza sativa
  subsp. japonica
MAAPSVAVDNLNPKVLNCEYAVRGEIVIHAQRLQQQLQTQPGSLPFDEILYCNIGNPQSLGQKPVTFFREVIALCDHPCLLEKEETKSLFSADAISRATTILASIPGRATGAYSHSQGIKGLRDAIAAGIASRDGYPANADDIFLTDGASPGVHMMMQLLIRNEKDGILCPIPQYPLYSASIALHGGALVPYYLNESTGWGLEISDLKKQLEDSRLKGIDVRALVVINPGNPTGQVLAEENQRDIVKFCKNEGLVLLADEVYQENIYVDNKKFNSFKKIARSMGYNEDDLPLVSFQSVSKGYYGECGKRGGYMEITGFSAPVREQIYKVASVNLCSNITGQILASLVMNPPKAGDASYASYKAEKDGILQSLARRAKALENAFNSLEGITCNKTEGAMYLFPQLSLPQKAIDAAKAANKAPDAFYALRLLEATGIVVVPGSGFGQVPGTWHIRCTILPQEEKIPAIISRFKAFHEGFMAAYRD

SEQ ID NO: 2528 - protein, 512 aa, Oryza sativa
  subsp. japonica
MAISKAWISLLLALAVVLSAPAARAEEAAAAEEGGDAAAEAVLTLDADGFDEAVAKHPFMVVEFYAPWCGHCKKLAPEYEKAAQELSKHDPPIVLAKVDANDEKNKPLATKYEIQGFPTLKIFRNQGKNIQEYKGPREAEGIVEYLKKQVGPASKEIKSPEDATNLIDDKKIYIVGIFSELSGTEYTNFIEVAEKLRSDYDFGHTLHANHLPRGDAAVERPLVRLFKPFDELVVDSKDFDVTALEKFIDASSTPKVVTFDKNPDNHPYLLKFFQSSAAKAMLFLNFSTGPFESFKSVYYGAAEEFKDKEIKFLIGDIEASQGAFQYFGLREDQVPLIIIQDGESKKFLKAHVEPDQIVSWLKEYFDGKLSPFRKSEPIPEVNDEPVKVVVADNVHDFVFKSGKNVLVEFYAPWCGHCKKLAPILDEAATTLKSDKDVVIAKMDATANDVPSEFDVQGYPTLYFVTPSGKMVPYESGRTADEIVDFIKKNKETAGQAKEKAESAPAEPLKDEL

SEQ ID NO: 2529 - protein, 166 aa, Oryza sativa
  subsp. japonica
MASNKVVFSALLLIIVSVLAATATMADHHKDQVVYSLGERCQPGMGYPMYSLPRCRAVVKRQCVGHGAPGGAVDEQLRQDCCRQLAAVDDSWCRCSALNHMVGGIYRELGATDVGHPMAEVFPGCRRGDLERAAASLPAFCNVDIPNGTGGVCYWLGYPRTPRTGH

SEQ ID NO: 2530 - protein, 337 aa, Oryza sativa
  subsp. japonica
MAKIKIGINGFGRIGRLVARVALQSDDVELVAVNDPFITTDYMTYMFKYDTVHGQWKHHEVKVKDSKTLLFGEKEVTVFGCRNPEEIPWGETGAEFVVESTGVFTDKDKAAAHLKGGAKKVVISAPSKDAPMFVVGVNEKEYKPDIDIVSNASCTTNCLAPLAKVINDRFGIVEGLMTTVHAITATQKTVDGPSSKDWRGGRAASFNIIPSSTGAAKAVGKVLPALNGKLTGMAFRVPTVDVSVVDLTVRLEKPASYDQIKAAIKEESEGKLKGILGYVEEDLVSTDFQGDNRSSIFDAKAGIALNDNFVKLVSWYDNEWGYSSRVVDLIRHMYNTQ

SEQ ID NO: 2531 - protein, 470 aa, Oryza sativa
  subsp. japonica
MAKKKTSSSMARSQLAALLISLCFLSLASNAVGWSRRGEREEEDERRRHGGEGGRPYHLGEESFRHWTRTRHGRFSVLERFPDEQVVGAAVGGYRVAVLEAAPRAFLQPSHYDADEVFYVKEGEGVIVLLREGRRESFCVREGDAMVIPAGAIVYSANTHSSKWFRVVMLLNPVSTPGHFEEYFPVGGDRPESFFSAFSDDVLQAAFNTRREELEKVFERQREGGEITTAPEEQIRELSKSCSRGGGGGSGSEWEIKPSSLTGKSPYFSNNHGKLFELTGDECRHLKKLDLQIGLANITRGSMIAPNYNTRATKLAVVLQGSGYFEMACPHVSGGGSSERREREREHGRRREEEQGEEEHGERGEKARRYHKVRAQVREESVIVIPASHPATIVASEGESLAVVCFFVGANHDEKVFLAGRNSPLRQLDDPAKKLVFGGSAAREADRVLAAQPEQILLRGPHGRGSVSDM

SEQ ID NO: 2532 - protein, 843 aa, Oryza sativa
  subsp. japonica
MVKFTVEELRRIMDKKNNIRNMSVIAHVDHGKSTLTDSLVAAAGIIAQEVAGDVRMTDTRADEAERGITIKSTGISLFYEMSDESLKLYKGERDGNEYLINLIDSPGHVDFSSEVTAALRITDGALVVVDCIEGVCVQTETVLRQALGERIRPVLTVNKMDRCFLELQVEGEEAYQTFSRVIENANVIMATYEDTLLGDVQVYPEKGTVAFSAGLHGWAFTLSSFAKMYASKFGVDEFKMMERLWGENFFDPATKKWTNKNTGSATCKRGFVQFCYEPIKQIINTCMNDQKDKLWPMLQKLGVVMKADEKELMGKALMKRVMQTWLPASNALLEMMIYHLPSPSKAQRYRVENLYEGPLDDVYATAIRNCDPEGPLMLYVSKMIPASDKGRFFAFGRVFSGRVATGMKVRIMGPNYVPGQKKDLYVKSVQRTVIWMGKKQESVEDVPCGNTVAMVGLDQFITKNATLTNEKESDACPIRAMKFSVSPVVRVAVQCKVASDLPKLVEGLKRLAKSDPMVLCTIEESGEHIIAGAGELHLEICLKDLQEDFMGGAEIIVSPPVVSFRETVLEKSCRTVMSKSPNKHNRLYMEARPLEEGLAEAIDDGRIGPRDDPKVRSKILSEEFGWDKDLAKKIWCFGPETTGPNMVVDMCKGVQYLNEIKDSVVAGFQWASKEGALAEENMRGICFEVCDVVLHADAIHRGGGQVIPTARRVIYASQLTAKPRLLEPVYLVEIQAPENALGGIYGVLNQKRGHVFEEMQRPGTPLYNIKAYLPVIESFGFSSQLRAATSGQAFPQCVFDHWDMMTSDPLEAGSQASTLVQDIRKRKGLKEQMTPLSDFEDKL

SEQ ID NO: 2533 - protein, 414 aa, Oryza sativa
  subsp. japonica
MAGMAPEGSQFDAKHYDSKMQELLNQGETEEFFTSYDEVHESFDDMGLQENLLRGIYAYGFEKPSAIQQRGIVPFCKGLDVIQQAQSGTGKTATFCSGILQQLDYAVVECQALVLAPTRELAQQIEKVMRALGDYLGVKVHACVGGTSVREDQRILASGVHVVVGTPGRVFDMLRRQSLRPDYIKMFVLDEADEMLSRGFKDQIYDIFQLLPSKIQVGVFSATMPPEALEITRKFMNKPVRILVKRDELTLEGIKQFYVNVEKEEWKLDTLCDLYETLAITQSVIFVNTRRKVDWLTDKMRGRDHTVSATHGDMDQNTRDIIMREFRSGSSRVLITTDLLARGIDVQQVSLVINYDLPTQPENYLHRIGRSGRFGRKGVAINFVTRDDERMLFDIQRFYNVVIEELPANVADLL

SEQ ID NO: 2534 - protein, 414 aa, Oryza sativa
  subsp. japonica
MAGMAPEGSQFDAKHYDSKMQELLHQGDNEEFFTSYDEVFESFDDMGLQENLLRGIYAYGFEKPSAIQQRGIVPFCKGLDVIQQAQSGTGKTATFCSGILQQLDYGLVECQSLVLAPTRELAQQIEKVMRALGDYLGVKVHACVGGTSVREDQRILASGVHVVVGTPGRVFDMLRRQSLRPDHIKMFVLDEADEMLSRGFKDQIYDIFQLLPPKIQVGVFSATMPPEALEITRKFMNKPVRILVKRDELTLEGIKQFYVNVEKEDWKLDTLCDLYETLAITQSVIFVNTRRKVDWLTDKMRSRDHTVSATHGDMDQNTRDIIMREFRSGSSRVLITTDLLARGIDVQQVSLVINYDLPTQPENYLHRIGRSGRFGRKGVAINFVTRDDERMLFDIQRFYNVTIEELPANVADLL

SEQ ID NO: 2535 - protein, 402 aa, Oryza sativa
  subsp. japonica
MATKRSVGTLGEADLRGKKVFVRADLNVPLDDAQKITDDTRIRASVPTVKFLLEKGAKVILASHLGRPKGVTPKYSLKPLVPRLSELLGVDVVMANDCIGEEVEKLAAALPEGGVLLLENVRFYKEEEKNDPEFAKKLAAVADLYVNDAFGTAHRAHASTEGVTKFLKPAVAGFLMQKELDYLVGAVANPKKPFAAIVGGSKVSTKIGVIESLLAKVDVLILGGGMIFTFYKAQGYAVGKSLVEEDKLELATSLIEKAKAKGVSLLLPTDVVVADKFAADAESKTVAASAIPDGWMGLDVGPDAIKTSSEALDTCNTIIWNGPMGVFEFEKFAAGTDAIAKKLADLTTTKGATTIIGGGDSVAAVEKAGLADKMSHISTGGGASLELLEGKTLPGVLALDEA

SEQ ID NO: 2536 - protein, 843 aa, Oryza sativa
  subsp. japonica
MVKFTVEELRRIMDKKNNIRNMSVIAHVDHGKSTLTDSLVAAAGIIAQEVAGDVRMTDTRADEAERGITIKSTGISLFYEMSDESLKLYKGERDGNEYLINLIDSPGHVDFSSEVTAALRITDGALVVVDCIEGVCVQTETVLRQALGERIRPVLTVNKMDRCFLELQVEGEEAYQTFSRVIENANVIMATYEDTLLGDVQVYPEKGTVAFSAGLHGWAFTLSSFAKMYASKFGVDESKMMERLWGENFFDPATKKWTNKSTGSATCKRGFVQFCYEPIKQIINTCMNDQKDKLWPMLQKLGVVMKADEKDLMGKALMKRVMQTWLPASNALLEMMIYHLPSPSKAQKYRVENLYEGPLDDVYATAIRNCDPEGPLMLYVSKMIPASDKGRFFAFGRVFSGRVATGMKVRIMGPNYVPGQKKDLYVKSVQRTVIWMGKKQESVEDVPCGNTVAMVGLDQFITKNATLTNEKEADACPIRAMKFSVSPVVRVAVQCKVASDLPKLVEGLKRLAKSDPMVLCTIEESGEHIIAGAGELHLEICLKDLQEDFMGGAEIIVSPPVVSFRETVLEKSCRTVMSKSPNKHNRLYMEARPLEEGLAEAIDDGRIGPRDDPKVRSKILSEEFGWDKDLAKKIWCFGPETTGPNMVVDMCKGVQYLNEIKDSVVAGFQWASKEGALAEENMRGICFEVCDVVLHADAIHRGGGQVIPTARRVIYASQLTAKPRLLEPVYLVEIQAPENALGGIYGVLNQKRGHVFEEMQRPGTPLYNIKAYLPVIESFGFSSQLRAATSGQAFPQCVFDHWDMMTSDPLEVSSQANQLVLDIRKRKGLKEQMTPLSDFEDKL

SEQ ID NO: 2537 - protein, 156 aa, Oryza sativa
  subsp. japonica
MKIIFFFALLAIAACSASAQFDAVTQVYRQYQLQPHLMLQQQMLSPCGEFVRQQCSTVATPFFQSPVFQLRNCQVMQQQCCQQLRMIAQQSHCQAISSVQAIVQQLRLQQFASVYFDQSQAQAQAMLALNMPSICGIYPSYNTAPCSIPTVGGIWY

SEQ ID NO: 2538 - protein, 635 aa, Oryza sativa
  subsp. japonica
MASSLLSSPKPSSFSSANPTSTPRPRAQTLSPFRAAAPRFSHGLATAAAAANPSASRRCYHRAFARPVRASMAQPRRPEYVPNRIDDPNYVRIFDTTLRDGEQSPGATMTSAEKLVVARQLARLGVDIIEAGFPASSPDDLDAVRSIAIEVGNTPVGEDGHVPVICGLSRCNKRDIDAAWEAVRHARRPRIHTFIATSEIHMQHKLRKTPEQVVAIAKEMVAYARSLGCPDVEFSPEDAGRSNREFLYHILEEVIKAGATTLNIPDTVGYTLPYEFGKLIADIKANTPGIENAIISTHCQNDLGLATANTLAGAHAGARQLEVTINGIGERAGNASLEEVVMAIKCRRELLGGLYTGINTQHITMSSKMVQEHSGLHVQPHKAIVGANAFAHESGIHQDGMLKYKGTYEIISPDDIGLTRANEFGIVLGKLSGRHAVRSKLVELGYEITDKEFEDFFKRYKEVAEKKKRVTDEDIEALLSDEIFQPKVFWSLADVQATCGTLGLSTATVKLIGPDGDEKIACAVGTGPVDAAYKAVDDIIQIPTVLREYSMTSVTEGIDAIATTRVVVTGDVSDSKHALTGHSFNRAFSGSGAALDIVVSSVRAYLSALNKMSSFVGAIKASSEVSESQRVQTTE

SEQ ID NO: 2539 - protein, 469 aa, Oryza sativa
  subsp. japonica
MAVTADVKLEGLRAATDKLDQISENEKSGFISLVSRYLSGEAEQIEWSKIQTPTDEVVVPYDTLSAAPEDLNETKKLLDKLVVLKLNGGLGTTMGCTGPKSVIEVRNGFTFLDLIVIQIESLNKKYGCNVPLLLMNSFNTHDDTQKIVEKYSNSNIEIHTFNQSQYPRIVTEDFLPLPSKGKTGKDGWYPPGHGDVFPSLNNSGKLDTLLAQGKEYVFVANSDNLGAIVDIKILNHLIHNQNEYCMEVTPKTLADVKGGTLISYEGRVQLLEIAQVPDEHVNEFKSIEKFKIFNTNNLWVNLKAIKRLVEAEALKMEIIPNPKEVDGVKVLQLETAAGAAIRFFEKAIGINVPRSRFLPVKATSDLLLVQSDLYTLVDGFVIRNPARTNPSNPSIELGPEFKKVANFLARFKSIPSIVELDTLKVSGDVWFGSGVTLKGKVTITAKSGKLEIPDGAVLENKDINGPEDL

SEQ ID NO: 2540 - protein, 157 aa, Oryza sativa
  subsp. japonica
MASNKVVISALLVVVVSVLAATTTMADHHQEQVVYTPGQLCQPGIGYPTYPLPRCRAFVKRQCVAPGTVDEQVRRGCCRQLAAIDSSWCRCDALNHMLRIIYRESGAADAGHPMAEVFRGCRRGDIERAAASLPAFCNVDIPNGVGGVCYWLPGTGY

SEQ ID NO: 2541 - protein, 401 aa, Oryza sativa
  subsp. japonica
MASKRSVGTLTESDLKGKKVFLRADLNVPLDDSQKITDDTRIRASVPTIKFLMGKGAKVILASHLGRPKGVTPKYSLKPLVPRLSELLGVDVVMANDCIGEEVQKLAATLPDGGVLLLENVRFYKEEEKNDPEFANKLASVADLYVNDAFGTAHRAHASTEGVTKYLRPSVAGFLMQKELDYLVGAVANPKKPFAAIVGGSKVSTKIGVIESLLAKVDILILGGGMIYTFYKAQGYAVGKSLVEEDKLELATSLIEKAKSKGVSLLLPTDIVVADKFAADAESKTVPASAIPDGWMGLDIGPDSIKTFSETLDTTKTVIWNGPMGVFEFEKFAAGTDAIAKKLADITAKGVTTIIGGGDSVAAVEKAGLADKMSHISTGGGASLELLEGKTLPGVLALNDA

SEQ ID NO: 2542 - protein, 337 aa, Oryza sativa
  subsp. japonica
MGKIKIGINGFGRIGRLVARVALQSEDVELVAVNDPFITTDYMTYMFKYDTVHGQWKHSDIKIKDSKTLLLGEKPVTVFGIRNPDEIPWAEAGAEYVVESTGVFTDKEKAAAHLKGGAKKVVISAPSKDAPMFVCGVNEDKYTSDIDIVSNASCTTNCLAPLAKVIHDNFGIIEGLMTTVHAITATQKTVDGPSSKDWRGGRAASFNIIPSSTGAAKAVGKVLPDLNGKLTGMSFRVPTVDVSVVDLTVRIEKAASYDAIKSAIKSASEGKLKGIIGYVEEDLVSTDFVGDSRSSIFDAKAGIALNDNFVKLVAWYDNEWGYSNRVIDLIRHMAKTQ

SEQ ID NO: 2543 - protein, 500 aa, Oryza sativa
  subsp. japonica
MAMMAMGAASWAPIPAPARAAAAFYPGRDLAAARRRRGAAARRPFVFTPRAVSDSRSSQTCLDPDASTSVLGIILGGGAGTRLYPLTKKRAKPAVPLGANYRLIDIPVSNCLNSNVSKIYVLTQFNSASLNRHLSRAYGNNIGGYKNEGFVEVLAAQQSPENPNWFQGTADAVRQYLWLFEEHNVMEFLILAGDHLYRMDYQKFIQAHRETNADITVAALPMDEERATAFGLMKIDDEGRIIEFAEKPKGEKLKSMMVDTTILGLDTERAKELPYIASMGIYVFSKDVMLKLLRQNFPAANDFGSEVIPGATEIGMRVQAYLYDGYWEDIGTIEAFYNANLGITKKPVPDFSFYDRSAAIYTQPRYLPPSKVLDADVTDSVIGEGCVIRHCTINHSVVGLRSCISEGAVIEDSLLMGADYYETETDKKALSETGGIPIGIGKNAHIRKAIIDKNARIGENVKIINVDNIQEASRETDGYFIKSGIVTVIKDALIPSGTVI

SEQ ID NO: 2544 - protein, 885 aa, Oryza sativa; identical to SEQ ID NO: 841
  subsp. japonica

SEQ ID NO: 2545 - protein, 160 aa, Oryza sativa
  subsp. japonica
MASNKVVFSVLLLAVVSVLAATATMAEYHHQDQVVYTPAPLCQPGMGYPMYPLPRCRALVKRQCVGRGTAAAAEQVRRDCCRQLAAVDDSWCRCEAISHMLGGIYRELGAPDVGHPMSEVFRGCRRGDLERAAASLPAFCNVDIPNGGGGVCYWLARSGY

SEQ ID NO: 2546 - protein, 160 aa, Oryza sativa
  subsp. japonica
MAFIKVVFSVLLPVVVSMLVATTTMADHRGQVVYTPGQLCAAGRGYPMYPLPRCRALAKRQCAGGAVDEQVRQDCCRQLAAIDDSFCRCPALSHMLVGMYKELGAPAKGQPMDEVFPGCRRGDMKRVAASLPAFCNVDIPIGIGGVCYWLSYPMNPATGH

SEQ ID NO: 2547 - protein, 156 aa, Oryza sativa
  subsp. japonica
MKIIFVFALLAIVACNASARFDALSQSYRQYQLQSHLLLQQQVLSPCSEFVRQQHSIVATPFWQPATFQLINNQVMQQQCCQQLRLVAQQSHYQAISSVQAIVQQLQLQQVGVVYFDQTQAQAQALLALNLPSICGIYPNYYIAPRSIPTVGGVWY

SEQ ID NO: 2548 - protein, 327 aa, Oryza sativa
  subsp. japonica
MSAAPIPREWVGLQQFPAATQTKLHELLGKLKEENVSTLTILVMGKGGVGKSSTVNSIVGERVATVSAFQSEGLRPMMCSRTRAGFTLNIIDTPGLIEGGYINEQAVEIIKRFLLGKTIDVLLYVDRLDAYRMDTLDDQVIRAVTNSFGKAIWRRTLVVLTHAQLSPPDGLDYNDFFTKRSESLLRYIRAGAGVSKRELGDFPLPIALVENSGRCKTNENGEKVLPDGTPWIPNLMKEITTVVSNGSKSIHVDQKLIDGPNPNNRWKMFIPLILMVEYFLVVKGIRRAIHADISNGKLDDWEQRYRDLVGSKDPVDQKGSSSGNRKA

SEQ ID NO: 2549 - protein, 377 aa, Oryza sativa
  subsp. japonica
MADAEDIQPLVCDNGTGMVKAGFAGDDAPRAVFPSIVGRPRHTGVMVGMGQKDAYVGDEAQSKRGILTLKYPIEHGIVSNWDDMEKIWHHTFYNELRVAPEEHPVLLTEAPLNPKANREKMTQIMFETFNTPAMYVAIQAVLSLYASGRTTGIVLDSGDGVSHTVPIYEGYALPHAILRLDLAGRDLTDYLMKILTERGYSFTTTAEREIVRDMKEKLSYIALDYDQEMETAKTSSSVEKSYELPDGQVITIGAERFRCPEVLFQPSFIGMEAAGIHETTYNSIMKCDVDIRKDLYGNIVLSGGTTMFPGIADRMSKEITALAPSSMKIKVVAPPERKYSVWIGGSILASLSTFQQMWIAKAEYDESGPSIVHRKCF

SEQ ID NO: 2550 - protein, 159 aa, Oryza sativa
  subsp. japonica
MALASDKFVLSAIVLAVLTVAAAAAGYGGYGDVGEYCRVGKAVSRNPVPSCRNYIARWCAVAGGRLDSGKQPPRQLLEPCCRELAAVPMQCRCDALSVLVRGVVTEEGDRVAGMISQHAAPGCDAATIAGMASALTDYGRCNLQHTGFFGCPMFGGGMD

SEQ ID NO: 2551 - protein, 725 aa, Oryza sativa
  subsp. japonica
VEAVVMPERYALGGACRVLAGMPAPLGATALDGGVNFAVYSAGASAASLCLFTPDDLEADEVTEEVPLDPLFNRTGNVWHVFIEGELHNMLYGYRFDGMFAPHCGQYFDVSNVVVDPYAKAVISRGEYGVPGPGGDCWPQMAGMIPLPYSTFDWQGDLPLRYPQKDLVIYEMHLRGFTKHSSSNVEHPGTYIGAISKLDYLKELGVNCVELMPCHEFNELEYFSCSSKMNFWGYSTINFFSPMIRYSSGGIRNCGRDAINEFKTFVREAHKRGIEVIMDVVFNHTAEGNEKGPILSFRGIDNSTYYMLAPKGEFYNYSGCGNTFNCNHPVVREFIVDCLRYWVTEMHVDGFRFDLASIMTRGCSLWDPVNVYGSPVEGDMTTTGTPLATPPLIDMISNDPILGDVKLIAEAWDAGGLYQVGQFPHWKIWSEWNGKYRDIVRQFIKGTDGFAGGFAECLCGSPHLYQAGGRKPWHSINFVCAHDGFTLADLVTYNKKYNSSNGEDNRDGENHNLSWNCGEEGEFAGLSVKRLRKRQMRNFFVSLMVSQGVPMFYMGDEYGHTKGGNNNTYCHDHYVNYFRWDKKEESSDLQRFCSLMTKFRKQCESLGLADFPTAQRLHWHGHQPGKPDWSETSRFVAFSTKDETKGEIYVAFNASHLPAVVGLPERPGYRWEPLVDTGKPAPYDFLTDDLPDRAHAVHLFSHFLNSNLYPMLSYSSIILELQPDD

SEQ ID NO: 2552 - protein, 153 aa, Oryza sativa
  subsp. japonica
MKIIFVFALLAIAANSASAQFDVLGQSYRQYQLQSPLLLQQHVLSPYNEFVRQQYGIAASPLLQSAAFQLRNNQVWQQLRLVAQQSHYQDINIVQAIAQQLQLQQFDDLYFGRNLAQAQAQALLALNLPSRYGIYPRYYSAPSSITTLGGVLY

SEQ ID NO: 2553 - protein, 149 aa, Oryza sativa
  subsp. japonica
MKIFVILSLLALAASSASAQFDACTYGQCQQQPFMQPIMNPCNEFVRQQCSPMSLPWEQSRRLQLSSCQVMRQQCCQQMRLMAQQYHCQAICTMVQSIMQQVQFDAGFVGEPQAQAQAQVALNLPSMCGVYPRYCSTPCKVATGHCGSW

SEQ ID NO: 2554 - protein, 156 aa, Oryza sativa
  subsp. japonica
MKIIFVFALLAIVACNASARFDPLSQSYRQYQLQSHLLLQQQVLSPCSEFVRQQYSIVATPFWQPATFQLINNQVMQQQCCQQLRLVAQQSHYQAISIVQAIVQQLQLQQFSGVYFDQTQAQAQTLLTFNLPSICGIYPNYYSAPRSIATVGGVWY

SEQ ID NO: 2555 - protein, 416 aa, Oryza sativa
  subsp. japonica
MALVLHCGSGNKNAFKALIAAEYTGVKVELTKNFEMGVSNKTPEFLKMNPLGKIPVLETPEGAVFESNAIARYVARLKDNSSLCGSSLIDYSHIEQWMDFSATEVDANIGRWLYPRLGFGPYVPVLEEFAITSLKRSLGALNTHLASNTYLVGHSVTLADIVMTCNLYYGFVRILIKSFTSEFPHVERYFWTMVNQPNFKKVIGDFKQAESVPPVQKKAAPPKESKAKEAKKEAPKEAPKPKVEASEEEEAPKPKPKNPLDLLPPSKMILDEWKRLYSNTKTNFREIAIKGFWDMYDPEGYSLWFCDYKYNDENTVSFVTMNKVGGFLQRMDLCRKYAFGKMLVIGSTPPFKVKGLWLFRGQDIPKFVMDEVYDMELYEWTKVDLSDEAQKERVNAMIEDQEPFEGEDLLDAKCFK

SEQ ID NO: 2556 - protein, 146 aa, Oryza sativa; identical to SEQ ID NO: 563
  subsp. japonica

SEQ ID NO: 2557 - protein, 158 aa, Oryza sativa [sequence omitted]

SEQ ID NO: 2558 - protein, 151 aa, Oryza sativa
  subsp. japonica
MKIIFVFALLAIAACSATAQFDVLGQNIRQYQVQSPLLLQQQVLSLYNEFVRQQYSIAASPFLQSAVFQLRNNQVLQQLRLVAQQSHYQDINVVQAIAQQLHLQQFGDLYIDRNLAQAQALLAFNLPSTYGIYPRYYSAPGSITTLGGVLY

SEQ ID NO: 2559 - protein, 153 aa, Oryza sativa
  subsp. japonica
MKIIFAFALLTIAACSASAQFDVLGQSYRQYQLQSPLLLQQQVLSPYNEFVRQQYGITASPLLQSVAFQLRNNQVWQQLWLVAQQSHYEDINIFQVIAQQLQLQQFDDLYFDRNLAQAPAQALLALNLPSRYGIYPRYYSAPSSITTLGGLLY

SEQ ID NO: 2560 - protein, 376 aa, Oryza sativa
  subsp. japonica
MADEDIQPIVCDNGTGMVKAGFAGDDAPRAVFPSIVGRPRHTGVMVGMGQKDAYVGDEAQAKRGILTLKYPIEHGIVNNWDDMEKIWHHTFYNELRVAPEDHPVLLTEAPLNPKANREKMTQIMFETFNCPAMYVAIQAVLSLYASGRTTGIVLDSGDGVSHTVPIYEGYTLPHAILRLDLAGRDLTDHLMKILTERGYSLTTSAEREIVRDIKEKLAYVALDYEQELETSRSSSSVEKSYEMPDGQVITIGSERFRCPEVLFQPSLVGMESPGIHEATYNSIMKCDVDIRKDLYGNVVLSGGSTMFPGIADRMSKEITSLAPSSMKVKVIAPPERKYSVWIGGSILASLSTFQQMWISKGEYDESGPGIVHMKCF

SEQ ID NO: 2561 - protein, 522 aa, Oryza sativa
  subsp. japonica
MGTRRVGLLLLLLLAAVLLQPLLAAAAAEGVVRIALKKRQVDETGRVGGHLAGEDAQRLLARRHGFLTNDAARAASRKARAEAEGDIVALKNYLNAQYYGEIAIGTPPQMFTVIFDTGSSNLWVPSSKCHLSIACYFHSRYKAGQSSTYKKNGKPASIHYGTGAISGYFSQDSVKVGDVAVKNQDFIEATREPSITFMVAKFDGILGLGFKEISVGNAVPIWYNMVRQGLVVDPVFSFWFNRHADEGQGGEIVFGGIDPNHYKGNHTYVPVTRKGYWQFNMGDVLIGGNSTGFCAAGCAAIADSGTSLLTGPTAIITQINEKIGATGVVSQECKAVVSQYGQQILDQLRAETKPAKVCSSVGLCTFDGTHGVSAGIRSVVDDEVGKSSGPFSSAMCNACETAVVWMHTQLAQNQTQDLVLQYIDQLCDRLPSPMGESSVDCSSLASMPDIAFTIGGNKFVLKPEQYILKVGEGTATQCISGFTAMDIPPPRGPLWILGDVFMGAYHTVFDYGNLKVGFAEAA

SEQ ID NO: 2562 - protein, 332 aa, Oryza sativa
  subsp. japonica
MAKEPMRVLVTGAAGQIGYALVPMIARGVMLGADQPVILHMLDIPPATESLNGLKMELVDAAFPLLKGIVATTDVVEACTGVNVAVMVGGFPRKEGMERKDVMSKNVSIYKSQASALEAHAAPNCKVLVVANPANTNALILKEFAPSIPEKNITCLTRLDHNRALGQISEKLNVQVTDVKNAIIWGNHSSTQYPDVNHATVKTPSGEKPVRELVADDEWLNTEFISTVQQRGAAIIKARKQSSALSAASSACDHIRDWVLGTPEGTFVSMGVYSDGSYGVPAGLIYSFPVTCSGGEWTIVQGLPIDEFSRKKMDATAQELSEEKTLAYSCLN

SEQ ID NO: 2563 - protein, 483 aa, Oryza sativa
  subsp. japonica
MELPRMASRRLPLPLVAQLVVLLGLACGLRSSSAAAAAASGLAGERVTYLPGQPPVDFDMYSGYVTVDKRAGRSLFYWLQEAPAAAQPAPLVLWLNGGPGCSSVAYGASEELGAFRIRPDGATLFLNDYRWNKVANILFLDSPAGVGFSYTNTTSDLYDSGDKRTAHDSYKFLVKWFEKFPQYKYRDFYIAGESYAGHYVPQLSQLVYRNNKGVKEPLINFKGFMVGNAVTDDYHDYIGTFEYWWNHGIISDGTYRLLNASCVHDSGEHPAPACLAALNASTVEQGDIDMYSLYTPTCNETSTSSAAARQRRLKQGHYPWMTGSYDPCTERYSTEYYNRPEVQRALHANVTGINYTWATCSDILNDNWRDSPRSVLPIYHELIAAGLRIWVFSGDTDAVVPLTATRYSIDALGLPTTVSWYPWYDAMKVGGWSQVYKGLSLVTVRGAGHEVPLHRPRQALILFKHFLQGKPMPDAPTKVQNEA

SEQ ID NO: 2564 - protein, 348 aa, Oryza sativa
  subsp. japonica
MFGFGHHGHHGQDQPPQHHGGGGGGAHQPTFKIFCRADEGYCVAVREGNVVLAPTNPRDEHQHWYKDMRFSAKIKDEEGNPAFALVNKATGLAIKHSLGQGHPVKLAPFNPEYPDESVLWTESGDVGKSFRCIRMLNNIRLNFDAFHGDKDHGGVHDGTTIVLWEWAKGDNQCWKILPWGDEAYAGGSANAPRGGNEPTVRIFCKADEGFSVTVRGGSVCLAPTNPRDEYQHWIKDMRHSNSIKDEEGYPAFALVNRVTGEAIKHSQGEGHPVKLVPYNPGYQDESVLWTESRDVGHGFRCIRMVNNIYLNFDALHGDKDHGGVRDGTTVALWKWCEGDNQRWKIVPW

SEQ ID NO: 2565 - protein, 418 aa, Oryza sativa
  subsp. japonica
MALVLHAGSGNKNAFKALIAAEYSGVKVELVKNFQMGVSNKTPEFLKMNPIGKIPVLETPDGPVFESNAIARYVTRSKADNPLYGSSLIEYAHIEQWNDFSATEVDANIGKWLYPRLGIAPYVAVSEEAAIAALKRSLGALNTHLASNTYLVGHSVTLADIVMTCNLYMGFARIMTKSFTSEFPHVERYFWTMVNQPNFKKVLGDVKQAESVPPVQKKAPPPKEQKPKEAKKEAPKEAPKPKAVEKPEEEEEAPKPKPKNPLDLLPPSKMILDEWKRLYSNTKTNFREVAIKGFWDMYDPEGYSLWFCDYKYNDENTVSFVTMNKVGGFLQRMDLCRKYAFGKMLVIGSEPPFKVKGLWLFRGPEIPKFVMDEVYDMELYEWTKVDISDEAQKERVSAMIEDLEPFEGESLLDAKCFK

SEQ ID NO: 2566 - protein, 582 aa, Oryza sativa
  subsp. japonica
MVLFSVTKKATTPFDGQKPGTSGLRKKVTVFQQPHYLQNFVQSTFNALPADKVKGATIVVSGDGRYFSKDAVQIITKMAAANGVRRVWVGQNSLMSTPAVSAVIRERVGADGSKATGAFILTASHNPGGPTEDFGIKYNMENGGPAPESVTDKIFSNTTTITEYLIAEDLPDVDISVVGVTTFSGPEGPFDVDVFDSTIDYIKLMKTIFDFESIKKLLASPKFTFCYDALHGVAGTYATRIFVEELGAAESSLLNCVPKEDFGGGHPDPNLTYAKELVDRMGLGKSSNAEPPEFGAAADGDADRNMILGKRFFVTPSDSVAIIAANAVQSIPYFSSGLKGVARSMPTSAALDVVAKNLNLKFFEVPTGWKFFGNLMDAGMCSICGEESFGTGSDHIREKDGIWAVLAWLSILAFKNKDNLGGDKLVTVEDIVRQHWGTYGRHYYTRYDYENVDAGAAKELMANLVSMQSSLSDVNKLIKEIRSDVSDVVAADEFEYKDPVDGSVSKHQGVRYLFGDGSRLVFRLSGTGSVGATIRVYIEQYEKDSSKTGRDSQDALAPLVDVALKLSKMQEYTGRSAPTVIT

SEQ ID NO: 2567 - protein, 163 aa, Oryza sativa
  subsp. japonica
MASNKVVFSVLLLVVLSVLAAAMATMADHHQVYSPGEQCRPGISYPTYSLPQCRTLVRRQCVGRGAASAADEQVWQDCCRQLAAVDDGWCRCGALDHMLSGIYRELGATEAGHPMAEVFPGCRRGDLERAAASLPAFCNVDIPNGPGGVCYWLGYPRTPRTGH

SEQ ID NO: 2568 - protein, 295 aa, Oryza sativa
  subsp. japonica
MDNEWARNRGFYGGTGGGVVGGLLPQSDVDLLEFPLNLEYLEAEFFCWSALGYGLDGIDASLTGGGPAPVGAQTAALTPFVRDIATQFCYQEVGHLREIKQNVKGFPRPLLDISAANFGKIVETAMNTTLDPPFNPYENSLNFLLASYIIPYVGLTGYVGANPRLLTPQARKLVAGLLGVESAQDAVIRALLYEHGLSRVASYGVGVAELTAHISELRNVLGRKGVKDEGLVVAPGQGPEGQTVGNIIAGDRFSLAYDRTPEEILGVVYGSGDPAKAGGFFPQGADGRIARAFIA

SEQ ID NO: 2569 - protein, 334 aa, Oryza sativa
  subsp. japonica
MAGAQESLVLAGVMHGHNDVVTAIATPIDNSPFIVSSSRDKSLLVWDLTNPVQNVGEGAGASEYGVPFRRLTGHSHFVQDVVLSSDGQFALSGSWDGELRLWDLSTGVTTRRFVGHDKDVLSVAFSVDNRQIVSASRDRTIKLWNTLGECKYTIGGDLGGGEGHNGWVSCVRFSPNTFQPTIVSGSWDRTVKVWNLTNCKLRCNLEGHGGYVNAVAVSPDGSLCASGGKDGVTLLWDLAEGKRLYSLDAGSIIHSLCFSPNRYWLCAATQDSIKIWDLESKHIVQDLKPEIPVSKNQMLYCTSLNWSADGSTLYAGYTDGTIRIYKISGFSYAG

SEQ ID NO: 2570 - protein, 515 aa, Oryza sativa
  subsp. japonica
ASSSCLPPLYPPTLSPSQIRSRKSSPPPLPWRSPWRRPRRGGSFKVKDLSQADFGRLEIELAEVEMPGLMACRAEFGPSQPFKGARISGSLHMTIQTAVLIETLTALGAEVRWCSCNIFSTQDHAAAAIARDSAAVFAWKGETLEEYWWCTERCLDWGVGGGPDLIVDDGGDATLLIHEGVKAEEEFEKSGKVPDPESTDNAEFKIVLTIIRDGLKSDPSKYRKMKERLVGVSEETTTGVKRLYQMQETGALLFPAINVNDSVTKSKFDNLYGCRHSLPDGLMRATDVMIAGKVAVVCGYGDVGKGCAAALKQAGARVIVTEIDPICALQALMEGLQVLTLEDVVSEADIFVTTTGNKDIIMVDHMRKMKNNAIVCNIGHFDNEIDMLGLETYPGVKRITIKPQTDRWVFPETNTGIIVLAEGRLMNLGCATGHPSFVMSCSFTNQVIAQLELWKEKSTGKYEKKVYVLPKHLDEKVAALHLGKLGARLTKLSKSQADYISVPVEGPYKPAHYRY

SEQ ID NO: 2571 - protein, 601 aa, Oryza sativa
  subsp. japonica
MAVAAATVRWLVLLLAVSAAATASREKWWHGAGGEASGGGHLVQKEWRRVVAASDAGLVTAVDVADAAGTAYRLHFITMSPGTLFLPVQLHADMVFYVHSGRGKVTYIEEGDSESSSLQVERGDVYNFDQGTILYIQSNACGTRERLQIYAIFTSDSINADDPRHPTSEVYSFVSDLLKGFEVEVLRPGFGVPREVVESIKSTKTPPAIIPYNPEEEDEDDSSNWTEEITDALWGVRDPHFLNKKKKDKQKDKHKGKDKKSKSKAFNFYSGKPDVENCYGWSRSMTNRDLETLRGSNIGMFMVNLTTGAMMGPHWNPRATEIAVVTQGAGMVQIVCPSIPSGESKKHHHDEEGGRGDHGHGGGGVRCKNSLFRVKEGDVLVVPRFHPMAQISFNNDSFVFVGFSTDMGHNHPQFLAGRHSVLQVIGKEILARSLGQDNSTNVGRLLSSQRESTIMACTSCAEELERKAEEEEEGGGGKGEKEREEEERRQREKEEEERRRQEEERKRREEEEKERREREEEERRQREKEEKKRREEEEQRREEEEEERRREEEEEEQEDGRGDEPKPRREEEEGDWGERQIRLPRSLKKRFIGIKGRLSSG

SEQ ID NO: 2572 - protein, 649 aa, Oryza sativa
  subsp. japonica
MAGKGEGPAIGIDLGTTYSCVGVWQHDRVEIIANDQGNRTTPSYVGFTDSERLIGDAAKNQVAMNPINTVFDAKRLIGRRFSDASVQSDIKLWPFKVIAGPGDKPMIVVQYKGEEKQFAAEEISSMVLIKMREIAEAYLGTTIKNAVVTVPAYFNDSQRQATKDAGVIAGLNVMRIINEPTAAAIAYGLDKKATSVGEKNVLIFDLGGGTFDVSLLTIEEGIFEVKATAGDTHLGGEDFDNRMVNHFVQEFKRKNKKDITGNPRALRRLRTACERAKRTLSSTAQTTIEIDSLYEGIDFYSTITRARFEELNMDLFRKCMEPVEKCLRDAKMDKSSVHDVVLVGGSTRIPRVQQLLQDFFNGKELCKNINPDEAVAYGAAVQAAILSGEGNEKVQDLLLLDVTPLSLGLETAGGVMTVLIPRNTTIPTKKEQVFSTYSDNQPGVLIQVYEGERTRTRDNNLLGKFELSGIPPAPRGVPQITVCFDIDANGILNVSAEDKTTGQKNKITITNDKGRLSKEEIEKMVQEAEKYKSEDEEHKKKVESKNALENYAYNMRNTIKDEKIASKLPAADKKKIEDAIDQAIQWLDGNQLAEADEFDDKMKELEGICNPIIAKMYQGAGADMAGGMDEDDAPPAGGSGAGPKIEEVD

SEQ ID NO: 2573 - protein, 699 aa, Oryza sativa
  subsp. japonica
MASETETFAFQAEINQLLSLIINTFYSNKEIFLRELISNSSDALDKIRFESLTDKSKLDAQPELFIHIVPDKASNTLSIIDSGVGMTKSDLVNNLGTIARSGTKEFMEALAAGADVSMIGQFGVGFYSAYLVAERVVVTTKHNDDEQYVWESQAGGSFTVTRDTSGEQLGRGTKITLYLKDDQLEYLEERRLKDLVKKHSEFISYPISLWTEKTTEKEISDDEDEEEKKDAEEGKVEDVDEEKEEKEKKKKKIKEVSHEWNVMNKQKPIWLRKPEEITKEEYAAFYKSLTNDWEEHLAVKHFSVEGQLEFKAILFVPKRAPFDLFDTRKKQNNIKLYVRRVFIMDNCEELIPEWLSFVKGIVDSEDLPLNISREMLQQNKILKVIRKNLVKKCVELFFEIAENKEDYNKFYEAFSKNLKLGIHEDSTNRTKIAELLRYHSTKSGDELTSLKDYVTRMKEGQSEIYYITGESKKAVENSPFLEKLKKKGYEVLYMVDAIDEYAVGQLKEFEGKKLVSATKEGLKLDESEDEKKRQEELKEKFEGLCKVIKEVLGDKVEKVVVSDRVVDSPCCLVTGEYGWTANMERIMKAQALRDSSMAGYMSSKKTMEINPENAIMDELRKRADADKNDKSVKDLVMLLFETALLTSGFSLEDPNTFGTRIHRMLKLGLSIDEDESAEADADMPPLEDDAGESKMEEVD

SEQ ID NO: 2574 - protein, 151 aa, Oryza sativa
  subsp. japonica
MKIIFVFALLAIAACSATAQFDVLGQNIRQYQVQSPLLLQQQVLSPYNEFVRQQYSIAASTFLQSAAFQLRNNQVLQQLRLVAQQSHYQDINVVQAIAHQLHLQQFGNLYIDRNLAQAQALLAFNLPSTYGIYPWSYSAPDSITTLGGVLY

SEQ ID NO: 2575 - protein, 253 aa, Oryza sativa
  subsp. japonica
MGRKFFVGGNWKCNGTTDQVDKIVKILNEGQIASTDVVEVVVSPPYVFLPVVKSQLRPEIQVAAQNCWVKKGGAFTGEVSAEMLVNLSIPWVILGHSERRSLLGESNEFVGDKVAYALSQGLKVIACVGETLEQRESGSTMDVVAAQTKAISERIKDWTNVVVAYEPVWAIGTGKVATPDQAQEVHDGLRKWLAANVSAEVAESTRIIYGGSVTGANCKELAAKPDVDGFLVGGASLKPEFIDIINSATVKSA

SEQ ID NO: 2576 - protein, 261 aa, Oryza sativa
  subsp. japonica
MGRVIRAQRKGAGSVFKSHTHHRKGPARFRSLDFGERNGYLKGVVTDIIHDPGRGAPLAKVTFRHPFRYKHQKELFVAAEGMYTGQFVYCGRRATLSIGNVLPIRSVPEGAVVCNVEHHVGDRGVFARASGDYAIVISHNPDNGTSRIKLPSGAKKIVPSSCRAMIGQVAGGGRTEKPMLKAGNAYHKYRVKRNCWPKVRGVAMNPVEHPHGGGNHQHIGHASTVRRDAPPGQKVGLIAARRTGRLRGQAAATAAKADKAT

SEQ ID NO: 2577 - protein, 291 aa, Oryza sativa [sequence omitted]

SEQ ID NO: 2578 - protein, 418 aa, Oryza sativa
  subsp. japonica
MALVLHTFDGNKNAFKALIAAEYSGVKVELAKNFQMGVSNKTPEYLKMNPIGKVPILETPDGPVFESNAIARYVTRSKSDNPLYGSSLIEYAHIEQWIDFSATEVDANTGKWLFPRLGFAPYVAVSEEAAIAALKRSLGALNTHLASNTYLVGHSVTLADIVMTCNLYMGFARIMTKNFTSEFPHVERYFWTMVNQPNFKKVMGDVKQADSVPQVQKKAAAPKEQKPKEAKKEAPKEAPKPKAAEKPEEEEEAPKPKPKNPLDLLPPSKMILDEWKRLYSNTKTNFREVAIKGFWDMYDPEGYSLWFCDYKYNDENTVSFVTMNKVGGFLQRMDLCRKYAFGKMLVIGSEPPFKVKGLWLFRGPEIPKFVMDEVYDMELYEWTKVDISDEAQKERVSAMIEDLEPFEGEALLDAKCFK

SEQ ID NO: 2579 - protein, 446 aa, Oryza sativa
  subsp. japonica
MAATIVSVKARQIFDSRGNPTVEVDVCCSDGTFARAAVPSGASTGVYEALELRDGGSDYLGKGVSKAVDNVNSVIAPALIGKDPTSQAELDNFMVQQLDGTKNEWGWCKQKLGANAILAVSLAICKAGAIIKKIPLYQHIANLAGNKQLVLPVPAFNVINGGSHAGNKLAMQEFMILPTGAASFKEAMKMGVEVYHNLKSVIKKKYGQDATNVGDEGGFAPNIQENKEGLELLKTAIEKAGYTGKVVIGMDVAASEFYNDKDKTYDLNFKEENNDGSQKISGDSLKNVYKSFVSEYPIVSIEDPFDQDDWEHYAKMTAEIGEQVQIVGDDLLVTNPTRVAKAIQEKSCNALLLKVNQIGSVTESIEAVKMSKRAGWGVMTSHRSGETEDTFIADLAVGLATGQIKTGAPCRSERLAKYNQLLRIEEELGAAAVYAGAKFRAPVEPY

SEQ ID NO: 2580 - protein, 641 aa, Oryza sativa
  subsp. japonica
MATAAGMGIGAACLVAPQVRPGRRLRLQRVRRRCVAELSRDGGSAQRPLAPAPLVKQPVLPTFLVPTSTPPAPTQSPAPAPTPPPLPDSGVGEIEPDLEGLTEDSIDKTIFVASEQESEIMDVKEQAQAKVTRSVVFVTGEASPYAKSGGLGDVCGSLPIALALRGHRVMVVMPRYMNGALNKNFANAFYTEKHIKIPCFGGEHEVTFFHEYRDSVDWVFVDHPSYHRPGNLYGDNFGAFGDNQFRYTLLCYAACEAPLILELGGYIYGQKCMFVVNDWHASLVPVLLAAKYRPYGVYRDARSVLVIHNLAHQGVEPASTYPDLGLPPEWYGALEWVFPEWARRHALDKGEAVNFLKGAVVTADRIVTVSQGYSWEVTTAEGGQGLNELLSSRKSVLNGIVNGIDINDWNPSTDKFLPYHYSVDDLSGKAKCKAELQKELGLPIRPDVPLIGFIGRLDYQKGIDLIKLAIPDLMRDNIQFVMLGSGDPGFEGWMRSTESGYRDKFRGWVGFSVPVSHRITAGCDILLMPSRFEPCGLNQLYAMQYGTVPVVHGTGGLRDTVENFNPFAEKGEQGTGWAFSPLTIEKMLWALRMAISTYREHKSSWEGLMKRGMSSDFTWDHAASQYEQIFEWAFMDQPYVM

SEQ ID NO: 2581 - protein, 810 aa, Oryza sativa
  subsp. japonica
MSSAVVASSTTFLVALASSASRGGPRRGRVVGVAAPPALLYDGRAGRLALRAPPPPRPRPRRRDAGVVRRADDGENEAAVERAGEDDDEEEEFSSGAWQPPRSRRGGVGKVLKRRGTVPPVGRYGSGGDAARVRGAAAPAPAPTQDAASSKNGALLSGRDDDTPASRNGSVVTGADKPAAATPPVTITKLPAPDSPVILPSVDKPQPEFVIPDATAPAPPPPGSNPRSSAPLPKPDNSEFAEDKSAKVVESAPKPKATRSSPIPAVEEETWDFKKYFDLNEPDAAEDGDDDDDWADSDASDSEIDQDDDSGPLAGENVMNVIVVAAECSPWCKTGGLGDVAGALPKALARRGHRVMVVVPRYGDYAEAQDVGIRKYYKAAGQDLEVKYFHAFIDGVDFVFIDAPLFRHRQDDIYGGNRQEIMKRMILFCKAAVEVPWHVPCGGVPYGDGNLVFLANDWHTALLPVYLKAYYRDNGMMQYTRSVLVIHNIAYQGRGPVDEFPYMELPEHYLDHFKLYDPVGGEHANIFGAGLKMADRVVTVSPGYLWELKTTEGGWGLHDIIRENDWKMNGIVNGIDYREWNPEVDVHLQSDGYANYTVASLDSSKPRCKAALQRELGLEVRDDVPLIGFIGRLDGQKGVDIIGDAMPWIAGQDVQLVLLGSGRRDLEVMLQRFEAQHNSKVRGWVGFSVKMAHRITAGADVLVMPSRFEPCGLNQLYAMAYGTVPVVHAVGGLRDTMSAFDPFEDTGLGWTFDRAEPHKLIEALGHCLETYRKYKESWRGLQVRGMSQDLSWDHAAELYEEVLVKAKYQW

SEQ ID NO: 2582 - protein, 149 aa, Oryza sativa
  subsp. japonica
MEQSFIMIKPDGVQRGLIGDIISRFEKKGFYLRGMKFMNVERSFAQQHYADLSDKPFFPGLVEYIISGPVVAMVWEGKDVVATGRRIIGATRPWEAAPGTIRADYAVEVGRNVIHGSDSVDNGKKEIALWFPEGLAEWRSNLHPWIYES

SEQ ID NO: 2583 - protein, 425 aa, Oryza sativa
  subsp. japonica
FARPRHHKTLAAAAAAAAAAMATQTRPLVSVKALEGDMATDNSSSLALAEVFRAPLRPDVVRFVHRLLSCNKRQPYAVSRRAGHQTSAESWGTGRAVSRIPRVPGGGTHRAGQGAFGNMCRGGRMFAPTKTWRKWHRRVNVHLRRVAVASALAATSVPSLVLARGHRIETVPELPLVISDSAESIEKTSQAIKILKQVGAYADAEKAKDSVGIRPGKGKMRNRRYINRKGPLIVYGTEGSKIVKAFRNLPGVDVANVERLNLLDLAPGGHLGRFVIWTESAFKKLEEVYGTFEAPSLKKKGFILPRPKMANADLGRIINSDEVQSVVKPLNKEVKRREKRKNPLKNVAAVLKLNPYFGTARKMATLAEAARIKARKEKLDSKRTKLSPEEAAKVKAAGKAWYKTMISDSDYAEFDNFSKWLGVTQ

SEQ ID NO: 2584 - protein, 151 aa, Oryza sativa
  subsp. japonica
MALEQTFIMIKPDGVQRGLIGEVIGRFEKKGFYLKAMKLINVEKSFAEKHYADLSSKPFFGGLVEYIVSGPVVAMVWEGKQVVSTGRKLVGATNPLAAEPGTIRGDFAVDIGRNVIHGSDSVENARKEIALWFPEGIAEWRSNQHPWIYEV

SEQ ID NO: 2585 - protein, 256 aa, Oryza sativa
  subsp. japonica
MSREENVYMAKLAEQAERYEEMVEYMEKVAKTVDVEELTVEERNLLSVAYKNVIGARRASWRIVSSIEQKEEGRGNEEHVTLIKEYRGKIEAELSKICDGILKLLDSHLVPSSTAAESKVFYLKMKGDYHRYLAEFKTGAERKEAAESTMVAYKAAQDIALADLAPTHPIRLGLALNFSVFYYEILNSPDKACNLAKQAFDEAISELDTLGEESYKDSTLIMQLLRDNLTLWTSDLTEDGGDEVKEASKGDACEGQ

SEQ ID NO: 2586 - protein, 262 aa, Oryza sativa
  subsp. japonica
MSAQAELSREENVYMAKLAEQAERYEEMVEFMEKVAKTVDSEELTVEERNLLSVAYKNVIGARRASWRIISSIEQKEESRGNEDRVTLIKDYRGKIETELTKICDGILKLLESHLVPSSTAPESKVFYLKMKGDYYRYLAEFKTGAERKDAAENTMVAYKAAQDIALAELPPTHPIRLGLALNFSVFYYEILNSPDRACNLAKQAFDEAISELDTLSEESYKDSTLIMQLLRDNLTLWTSDISEDTAEEIREAPKRDSSEGQ

SEQ ID NO: 2587 - protein, 359 aa, Oryza sativa
  subsp. japonica
MASVDLTPRQARKAYGGDGGTYYEWSPADLPMLELANIGGAKLSLNAGGLALPSFSDSGKVAYVLQGKGTCGIVLPEASKEKVIAVKEGDSLALPFGVVTWWHNLPESPIELVILFLGDTSKAHKAGQFTNMQLTGATGIFTGFSTEFVGRAWDLAESDAVKLVSSQPASGIVKIKSGQKLPEPSAADREGMALNCLEAPLDVDIKNGGRVVVLNTANLPMVKEVGLGADLVRIDGHSMCSPGFSCDSAYQVTYFIRGSGRVQVVGADGKRVLDTHVEGGNLFIVPRFCVVSKIADASGLQWFSIITTPNPIFSHLAGKTSVWKAISPEVLEASFNATPEMEKLFRSKRIDSEIFFAPN

SEQ ID NO: 2588 - protein, 459 aa, Oryza sativa
  subsp. japonica
KKNNETILVFDLGGGTFDVSVLEVGDGVFEVLSTSGDTHLGGDDFDKRVVDWLAGNFKNDEGIDLLKDKQALQRLTEAAEKAKMELSSLTQTNISLPFITATADGPKHIETTLTRAKFEELCSDLLDRLRTPVDNALRDAKLSFKDIDEVILVGGSTRIPAVQDLVKKMTGKDPNVTVNPDEVVALGAAVQAGVLSGDVSDIVLLDVTPLSLGLETLGGVMTKIIPRNTTLPTSKSEVFSTAADGQTSVEINVLQGEREFVRDNKSLGSFRLDGIPPAPRGVPQIEVKFDIDANGILSVSAVDKGTGKKQDITITGASTLPKDEVEKMVEEAEKFAKEDKEKRDAIDTKNQAESVIYQTEKQLKELGDKVPGDVKGKVEAKLTELKDAVAGGSTQTMKDALAALNQEVMQLGQALYSQQGAPGAGPTPGADAAAGSAGPSEKPGGEEGDVIDADFTDSQ

SEQ ID NO: 2589 - protein, 463 aa, Oryza sativa
  subsp. japonica
MHTRSRRLGFPPLNPSHLLLTPHLPPLSSDRARMAMSRAAAAAAGTPVARRRLMGAVAARSMASWFGHVEPAAKDPILGVTEAFLADPSPDKVNVGVGAYRDDSGKPVVLECVREAERRIAGSMNMEYLPMGGSIKMIEESLKLAYGENCEFIKDKRIAAVQALSGTGACRLFADFQKRFLPDSQIYIPTPTWANHHNIWRDAQVPQKTFTYYHPESRGLDFAGLMDDIKNAPDGSFFLLHACAHNPTGVDPSEEQWREISHQFKVKKHFPFFDMAYQGFASGDPERDAKAIRIFLEDGHQIGCAQSYAKNMGLYGQRAGCLSILCDDEMQAVAVKSQLQQIARPLYSNPPVHGALIVSTILGDPELKSLWLKEVKGMADRIIGMRTALKENLEKLGSPMSWEHITNQIGMFCYSGMTPEQVDRLTKEFHIYMTRNGRISMAGVTTGNVAYLANAIHEVTKTK

SEQ ID NO: 2590 - protein, 481 aa, Oryza sativa
  subsp. japonica
MAHALGCGAATAPAGVGLLHHHEKAGALFSAAGSIVRVQQLSGKGSKSQAIRCAMPSASEHGGISTATASSSDQKKGGLRGKLNKVVLAYSGGLDTSVIVPWLRENYGCEVVCFTADVGQGDIELEGLEKKAKASGASQLVVKDLKEEFVSEYIYPCLRAGAVYERKYLLGTSMARPVIAKAMVDVAKEVGADAVAHGCTGKGNDQVRFELTFYALNPELKVVAPWREWDITGREDAIEYAKKHNVPIPVTKKSIYSRDRNLWHLSHEGDILEDPANEPKEDMYMMSVAPENAPSKPEYLEIGIIAGVPVSINGKDLSPASLLAKLNEIGGKHGIGRIDMVENRLVGMKSRGVYETPGGTIMAAAVRELESLTLDRETMQWKDMLALKYAELVYAGRWFDPLRQSIDAFMENITATTTGSVTLKLYKGSVNVASRKSPYSLYREDISSFENGEIYNQADAEGFIRLYGLPTRVRAMLEKGI

SEQ ID NO: 2591 - protein, 509 aa, Oryza sativa; identical to SEQ ID NO: 747
  subsp. japonica

SEQ ID NO: 2592 - protein, 552 aa, Oryza sativa
  subsp. japonica
MATRRALSSLVRAASRLRGASPAPRPRGPLHRPSPSGYLFNRAAAYATAAAAKEAAPPAPATGKATGGGKITDEFTGAGAVGQVCQVIGAVVDVRFDEGLPPILTALEVLDHNIRLVLEVAQHLGENMVRTIAMDGTEGLVRGQRVLNTGSPITVPVGRATLGRIMNVIGEPIDEKGDITTNHFLPIHREAPAFVEQATEQQILVTGIKVVDLLAPYQRGGKIGLFGGAGVGKTVLIMELINNVAKAHGGFSVFAGVGERTREGNDLYREMIESGVIKLGDKQSESKCALVYGQMNEPPGARARVGLTGLTVAEHFRDAEGQDVLLFIDNIFRFTQANSEVSALLGRIPSAVGYQPTLATDLGGLQERITTTKKGSITSVQAIYVPADDLTDPAPATTFAHLDATTVLSRQISELGIYPAVDPLDSTSRMLSPHVLGEDHYNTARGVQKVLQNYKNLQDIIAILGMDELSEDDKLTVARARKIQRFLSQPFHVAEVFTGAPGKYVELKESVNSFQGVLDGKYDDLPEQSFYMVGGIEEVIAKAEKIAKESAS

SEQ ID NO: 2593 - protein, 707 aa, Oryza sativa
  subsp. japonica
MDVSVPPTNYPKSLSSIIKCHRRRAAINNCHSVVSHPPLSHSNHHHRSLRVRSSAAVAPPLPPPLVVPMTTPKPSPTIRRLDVASPVPADIDIANAVSPLPIADIAAELGLRPEHFDLYGKYKAKVLLSVLDELKGQQDGYYVVVGGITPTPLGEGKSTTTVGLCQALGAFLDKKVVTCLRQPSQGPTFGIKGGAAGGGYSQVIPMDEFNLHLTGDIHAITAANNLLAAAIDTRIFHEASQSDKALFNRLCPPNKEGKRRFADVMLRRLIKLGISKTDPNELTPDEVRRFARLDIDPESITWRRVMDVNDRFLRKITIGQGPDEKGMVRETGFDIAVASEIMAVLALTTSLADMRERLGRMVIGNSKAGEPITADDLGVGGALTVLMKDAIHPTLMQTLEGTPVLVHAGPFANIAHGNSSIVADKIALKLVGKGGYVVTEAGFGSDIGTEKFMDIKCRYSGLMPQCAIIVATIRALKMHGGGPDVVAGKPLDHAYVSENVALVEAGCVNLAKHIANTKSYGVNVVVAINKFASDTEAEMDVVRNASLAAGAFDAVVCTHHAHGGKGAVDLGLAVQRACESQADPLKFLYPLESGIKEKIESIAKFYGASGVEYSEQAEKQIEMYTKQGFSNLPICMAKTQYSFSHVPSMKGAPSGFVLPIRDVRASIGAGFIYPLVGTMSTMPGLPTRPCFYEIDVDTATGKVMGLS

SEQ ID NO: 2594 - protein, 766 aa, Oryza sativa
  subsp. japonica
MASHIVGYPRMGPKRELKFALESFWDGKSSAEDLEKVATDLRASIWKQMADAGIKYIPSNTFSYYDQVLDTTAMLGAVPERYSWTGGEIGFSTYFSMARGNATVPAMEMTKWFDTNYHFIVPELGPNTKFSYSSHKAVNEYKEAKALGVDTVPVLVGPVSYLLLSKPAKGVEKSFALLSLLSSILPVYKEVIAELKAAGATWIQFDEPTLVLDLDSHQLAAFSAAYTELESALSGLNVLIETYFADIPAESYKTLTSLNSVTAYGFDLIRGSKTLDLVKSAGFPSGKYLFAGVVDGRNIWADDLAASLTTLESLEAIVGKDKLVVSTSCSLMHTAVDLVNETKLDSEIKSWLAFAAQKVVEVNALAKALAGQKDEAYFAANTAAQASRRSSPRVTNEEVQKAAAALRGSDHRRATNVSARLDAQQKKLNLPVLPTTTIGSFPQTVELRRVRREYKAKKISEDEYVSAIKEEISKVVKIQEELDIDVLVHGEPERNDMVEYFGEQLSGFAFTANGWVQSYGSRCVKPPIIYGDVSRPNAMTVFWSKMAQSMTSRPMKGMLTGPVTILNWSFVRNDQPRFETCYQIALAIKKEVEDLEAGGIQVIQIDEAALREGLPLRKAEHAFYLDWAVHSFRITNCGVQDTTQIHTHMCYSNFNDIIHSIINMDADVITIENSRSDEKLLSVFREGVKYGAGIGPGVYDIHSPRIPSTEEIADRINKMLAVLDTNILWVNPDCGLKTRKYTEVKPALTNMVLAAKLIRTQLASAK

SEQ ID NO: 2595 - protein, 898 aa, Oryza sativa
  subsp. japonica
MAAEHPFKNILTTLPKPGGGEYGKFYSLPALNDPRIDKLPYSIRILLESAIRNCDNFQVNQNDVEKIIDWENTSPKLAEIPFKPARVLLQDFTGVPAVVDLAAMRDAMAKLGSDANKINPLVPVDLVIDHSVQVDVARSPNAVQSNMELEFKRNNERFGFLKWGSTAFHNMLVVPPGSGIVHQVNLEYLGRVVFNTDGIMYPDSVVGTDSHTTMIDGLGVAGWGVGGIEAEATMLGQPMSMVLPGVVGFKLTGKLQNGVTATDLVLTVTQMLRKHGVVGKFVEFYGEGMGKLSLADRATIANMSPEYGATMGFFPVDHVTLDYLKLTGRSDETVAMIEAYLRANKMFVDYNEPQTERVYSSYLELDLNEVEPCISGPKRPHDRVLLKEMKSDWHSCLDNRVGFKGFAVPKEQQDKVVKFDFHGQPAELKHGSVVIAAITSCTNTSNPSVMLGAALVAKKACELGLEVKPWVKTSLAPGSGVVTKYLLQSGLQEYLNKQGFHVVGYGCTTCIGNSGDLDESVSAAISENDVVAAAVLSGNRNFEGRVHPLTRANYLASPPLVVAYALAGTVDIDFEKEPIGVGKDGKEVFFRDIWPSTEEIAEVVQSSVLPDMFKSTYEAITKGNPMWNQLTVPEASLYSWDPNSTYIHEPPYFKDMTMSPPGPHGVKNAYCLLNFGDSITTDHISPAGSIHKDSPAAKYLLERGVDRKDFNSYGSRRGNDEVMARGTFANIRIVNKFLNGEVGPKTVHVPTGEKLYVFDAALKYKSEGHDTIVLAGAEYGSGSSRDWAAKGPMLLGVKAVIAKSFERIHRSNLVGMGIIPLCFKAGEDADSLGLTGHERYTIDLPTNVSEIRPGQDITVTTDNGKSFTCTLRFDTEVELAYFNHGGILPYVIRNLAQN

SEQ ID NO: 2596 - protein, 1306 aa, Oryza sativa
  subsp. japonica
MASTTDADAAPVAPVLEEKPPTPPPDGDEVPSAPAAAAAAEQPKVVEEEEVRLEGKGGGFGGQEVEVAGDGEDGGEVEVAEAKDEGGGGEFAGGDAKAASSLLAAAAEEEEEEEASNGELGEEDAYPASSDAAVGEEKGELGEEPEEKAPALAPEANGAAESDVEEKPEEDNEGEEVATGGGDDGELGMEKEVDVSAGAAEAPQPEDKVAPEAEANGDLGDKAEEEASASAAVEVVEESNAPEELLEKAVVSEANGVAAAVELAVEEKLEDNKGEEEEMEAKPEPVSGVIPVVVDDTSSEMIAPVSAESAVEESTEKEQTVDDTSSEMIAHVSAESAVEESTEKEQTVESEASESVEIVGVEKPTEDESNVDGGASSVVSRELAPEETKENNVGQEDEGVAEVIDREEDADDDEEIVLAAADDEDDGTNEADDDEDGVSSDRGPARVAIIESSEAAKQIMKELGEGSASVSPVSGLSSSREYTNSMDGQIVLDDSEEDGDDDDNEDDDEKGFDSAALAALLKAATGASADGNVTVSSQDGSRIFSMDRPAGLGSSAPSLRPTVPRPVARSNLFSPSELAVTAEPTEEMTEEEKKLHDKVELIRVKFLRLVYRLGATPEETVAAQVLYRLSLAEGIRHGRQTNRAFSLDNARKKAMLLEAEGKEELNFSCNILVLGKIGVGKSATINSIFGEEKSKTDAFSSATNSVREIVGNVDGVQIRIIDTPGLRPNVMDQGSNRKILASVKKYTKRCPPDIVLYVDRLDSLSRDLNDLPLLKTITSVLGSSIWFNAIVALTHAASAPPEGLNGAPMTYEVLMAQRSHIIQQSIRQAAGDMRLMNPVALVENHPSCRRNREGQKVLPNGQSWRHQMLLLCYSSKILSEANSLLKLQDPNPGKLFGFRFRSPPLPFLLSSLLQSRAHPKLSPDQGGNEGDSDIDLDDYSDIEQDEDEEEYDQLPPFKPLTKSQLARLTKEQKNAYFDEYDYRVKLLQKKQWKDEIRRLKEMKKRGKTDMDAYGYANIAGENDLDPPPENVSVPLPDMVLPPSFDCDNPTYRYRFLEPTSTVLARPVLDAHGWDHDCGYDGVSVEETLALLNKFPANMAVQVTKDKKEFSIHLDSSISAKLGEDASSLAGFDIQTVGRQLAYILRGETKFKNIKKNKTTGGFSVTFLGDIVATGLKVEDQLSLGKRLALVASTGAMRAQGDTAYGANLEARLKDKDYPIGQSLSTLGLSLMKWRRDLALGANLQSQFSIGRGSKMVVRLGLNNKLSGQITVRTSTSEQVQIALLGLIPVAASIYRSFRPSEPSFAY

SEQ ID NO: 2597 - protein, 153 aa, Oryza sativa; identical to SEQ ID NO: 559
  subsp. japonica

SEQ ID NO: 2598 - protein, 168 aa, Oryza sativa
  subsp. japonica
MLVYQDLLTGDELLSDSFPYREIENGILWEVDGKWVVQGAIDVDIGANPSAEGGGDDEGVDDQAVKVVDIVDTFRLQEQPPFDKKQFVTFMKRYIKNLSAKLDAEKQEEFKKNIEGATKYLLGKLKDLQFFVGESMHDDGGLVFAYYKDGATDPTFLYFSHGLKEVKC

SEQ ID NO: 2599 - protein, 184 aa, Oryza sativa; identical to SEQ ID NO: 512
  subsp. japonica

SEQ ID NO: 2600 - protein, 200 aa, Oryza sativa
  subsp. japonica
MVSLRLPLILLSLLAISFSCSAAPPPVYDTEGHELSADGSYYVLPASPGHGGGLTMAPRVLPCPLLVAQETDERRKGFPVRFTPWGGAAAPEDRTIRVSTDVRIRFNAATICVQSTEWHVGDEPLTGARRVVTGPLIGPSPSGRENAFRVEKYGGGYKLVSCRDSCQDLGVSRDGARAWLGASQPPHVVVFKKARPSPPE

SEQ ID NO: 2601 - protein, 233 aa, Oryza sativa
  subsp. japonica
MATHTQISKKRKFVADGVFFAELNEMLTRELAEDGYSGVEVRVTPMRTEIIIRATRTQNVLGEKGRRIRELTSVVQKRFNFPENGVELYAEKVNNRGLCAIAQAESLRYKLLGGLAVRRACYGVLRFVMESGAKGCEVIVSGKLRAQRAKSMKFKDGYMISSGYPVNLYIDSAVRHVLLRQGVLGIKVKIMLDWDPKGKQGPMTPLPDLVTIHAPKDEDEFSKPLTAEIPVAA

SEQ ID NO: 2602 - protein, 305 aa, Oryza sativa
  subsp. japonica
MAAVAGGAARALSQAEQDVQMMLAADVHLGTKNCDFQMERYVYKRRSDGIYIINLGKTWEKLQLAARVIVAIENPQDIIVQSARPYGQRAVLKFAQYTGAHAIAGRHTPGTFTNQLQTSFSEPRLLILTDPRTDHQPIKESALGNIPTIAFCDTDSPMRYVDIGIPANNKGRNSIGCLFWLLARMVLQMRGTILPGHKWDVMVDLFFYRDPEEAKEQEEEAPAQDFAAITDYTAPEQWSADQWTSDVAAPPAATVGDWGAAPAPVAAAEGWDQAGAPVATEAAVVPPVAPTGWDPAAQPAAQGWD

SEQ ID NO: 2603 - protein, 337 aa, Oryza sativa
  subsp. japonica
MHKDELVEKNLKMGDVLHIDAGSTFYMVNSGKGQRLKIICSIDASDNIGFGPYQAFFLGGGGGAAAGQWRPVGRGEEEEEEEEELVVDEASSTWSWTKLVGRLLGVVGGGAPSNSVAAQPKKKKDKTVRAPEPYNLYEQGTGFRNAYGSSVAVDKHDYEPLGHSDIGVYLVNLTAGSMMAPHVNPRATEYGVVLSGTGCIEVVFPNGSKAMSATVRAGDVFYIPRYFPFCQVASRGGPFVFFGFTTSARRNHPQFLVGGSSVLRALLGTELAAAFGVPEKAMRKLVLAQNEAVILPSWPEKKKKKKWEEEPEDERWEEKKKAAKQRKPWVIEQVPAK

SEQ ID NO: 2604 - protein, 376 aa, Oryza sativa
  subsp. japonica
MAMWRAAAGHLLGRALGSRAAHTSAGSKKIVGVFYKGGEYADKNPNFVGCVEGALGIREWLESKGHHYIVTDDKEGLNSELEKHIEDMHVLITTPFHPAYVSAERIKKAKNLELLLTAGIGSDHIDLPAAAAAGLTVAEVTGSNTVSVAEDELMRILILLRNFLPGYQQVVHGEWNVAGIAYRAYDLEGKTVGTVGAGRIGRLLLQRLKPFNCNLLYHDRLKIDPELEKEIGAKYEEDLDAMLPKCDVIVINTPLTEKTRGMFNKERIAKMKKGVIIVNNARGAIMDTQAVADACSSGQVAGYGGDVWFPQPAPKDHPWRYMPNHAMTPHISGTTIDAQLRYAAGVKDMLDRYFKGEDFPVQNYIVKEGQLASQYQ

SEQ ID NO: 2605 - protein, 393 aa, Oryza sativa
  subsp. japonica
MSSDDEVREEKELDLSSSDVVTKYKDAADIINNALKLVVSLCKPKAKIVDICEKGDSYIREQTGNIYKNVKRKIERGVAFPTCVSVNNTVCHFSPLATDEAVLEENDMVKIDMGCHIDGFIAVVAHTHVIHDGAVTGKAADVLAAANTAAEVALRLVRPGKKNKDVTEAIQKVAAAYDCKIVEGVLSHQLKQFVIDGNKVVLSVSNADTKVDDAEFEENEVYAIDIVTSTGEGKPKLLDEKQTTIYKRAVDKNYHLKMKASRFIFSEISQKFPIMPFTARALEEKRARLGLVECMNHELLQPYPVLHEKPGDLVAHIKFTVLLLPSGSQRVTSHSLQELQPTKSIEDNAEIKAWLALGTKTKKKSGAKKKKGKKGDAAEAVPMEEGSNDANKE

SEQ ID NO: 2606 - protein, 389 aa, Oryza sativa
  subsp. japonica
MSHRKFEHPRHGSLGFLPRKRSSRHRGKVKSFPKDDVSKPCHLTSFVGYKAGMTHIVREVEKPGSKLHKKETCEAVTIIETPPLVIVGLVAYVKTPRGLRSLNSVWAQHLSEEVRRRFYKNWCKSKKKAFTKYALKYDSDAGKKEIQMQLEKMKKYASIVRVIAHTQIRKMKGLKQKKAHLMEIQINGGTIADKVDYGYKFFEKEIPVDAVFQKDEMIDIIGVTKGKGYEGVVTRWGVTRLPRKTHRGLRKVACIGAWHPARVSYTVARAGQNGYHHRTEMNKKVYKIGKSGQESHAACTEFDRTEKDITPMGGFPHYGVVKGDYLMIKGCCVGPKKRVVTLRQSLLKQTSRLALEEIKLKFIDTSSKFGHGRFQTTDEKQRFFGKLKA

SEQ ID NO: 2607 - protein, 531 aa, Oryza sativa
  subsp. japonica
MKTASMAASLLIPLCLCILLLRGASAVSDQQEAGRRDSCDRIDRRIRALEPTRRVDSEAGHTELYDDRDGQLPCAGVAAARITIQRNGLLLPSYSNSPRLAYIVHGRGIVGVVIPGCPETYQETSSSSSQEQEDDERRRRGRRGDEERRRSSEGEEEEEEETSRRSFEQSIRDEHQRITTVRQGDVVAIPAGAPFWVHNDGDSPLVAISVHDVSNNANQLDQTSRRFRLAGGQARSEGRQRYGEGESSESETERGGEESYNILSGFDTELLAESMRVSPDIARKLQGRSDKRGNIVRVRRGGLRMLRPATERVTDEEMMRGANAAAAAGNGIDEAVCLMKLRENVADPMKADLYTPNGGRITVLNSQKLPVLKLIKMSVNRGVMRRNAILAPHWNINAHAAVYATSGSARLQVVSSEGRRVFDGELRRGQMVVVPQSFAVAGRAGDEGFAWVSFQTSDGAMNAPVVGKSSALRGMPADVLDNAFGVSREEARMVKFGRGQELAIFSPKSGAAARRRRSPGHRDDGVLAAPA

SEQ ID NO: 2608 - protein, 549 aa, Oryza sativa
  subsp. japonica
MSSEPPPDAAAAAASSAGDLAADLSSATISKKQLKKDARKAEKAEKASQRQQQQQPQADADDPFAANYGDVPVEEIQSKTISGRVWTEIGGLDEAAAGRSVLIRGAAQAIRPVSKKMAFVVLRESMSTVQCVLVASADAGVSTQMVRFATSLSKESIVDVEGVVSLPKEPLKATTQQVEIQVRKIYCINRAIPTLPINLEDASRSEAEIEKAEQAGEKLVRVGQDTRLNYRAIDLRTPANQAIFRIQCQVENKFREYFLSKNFVGIHSPKLIAGSSEGGAAVFKLQYNGQPACLAQSPQLYKQMAICGGFERVFEVGPVFRAENSNTHRHLCEFVGLDAEMEIKEHYFEVCDIIDGLFVAIFKHLNENCKKELETINRQYPFEPLKYLEKTLKLTYEEGIQMLKEAGTEIEPMGDLNTEAEKKLGRLVKEKYGTEFFILYRYPLAVRPFYTMPCYDNPAYSNSFDVFIRGEEIISGAQRIHLPELLTKRATECGIDASTISSYIESFSYGAPPHGGFGVGLERVVMLFCALNNIRKTSLFPRDPQRLVP

SEQ ID NO: 2609 - protein, 578 aa, Oryza sativa
  subsp. japonica
MAASTTLALSHPKTLAAAAAAAPKAPTAPAAVSFPVSHAACAPLAARRRAVTAMVAAPPAVGAAMPSLDFDTSVFNKEKVSLAGHEEYIVRGGRNLFPLLPEAFKGIKQIGVIGWGSQGPAQAQNLRDSLAEAKSDIVVKIGLRKGSKSFDEARAAGFTEESGTLGDIWETVSGSDLVLLLISDAAQADNYEKIFSHMKPNSILGLSHGFLLGHLQSAGLDFPKNISVIAVCPKGMGPSVRRLYVQGKEINGAGINSSFAVHQDVDGRATDVALGWSVALGSPFTFATTLEQEYKSDIFGERGILLGAVHGIVEALFRRYTEQGMDEEMAYKNTVEGITGIISKTISKKGMLEVYNSLTEEGKKEFNKAYSASFYPCMDILYECYEDVASGSEIRSVVLAGRRFYEKEGLPAFPMGNIDQTRMWKVGEKVRSTRPENDLGPLHPFTAGVYVALMMAQIEVLRKKGHSYSEIINESVIESVDSLNPFMHARGVAFMVDNCSTTARLGSRKWAPRFDYILTQQAFVTVDKDAPINQDLISNFMSDPVHGAIEVCAELRPTVDISVPANADFVRPELRQSS

SEQ ID NO: 2610 - protein, 563 aa, Oryza sativa
  subsp. japonica
MRSRSLLLVALATLLLHASASASDDDLDYLIDNADDIPANDPDGWLQEGSPDDDDDDDLFHHGQAQDHPIDETHVFLLSAANFSDFLASHRHVMVEFYAPWCAHCQALAPDYAAAAADLSPLAHQVALAKVDATEDTDLAQKYDVQGFPTILFFIDGVPKDYNGARTKEAIVSWVNKKLAPGVQNITTVDEAEKILTGEDKAILAVLDSLSGAHSDEIAAASRLEDAINFYQTSNPDVAKLFHLDPAAKRPSLVLLKKQEEEKLTFYDGPFKASAIADFVSANKLPLVNTLTQETAPSIFDNPIKKQILLFVVANESSKFLPIFKEASKSFKGKLLFVFVERDNEEVGEPVANYFGITGQETTVLAYTGNEDARNFFLDGEISVENIKRFAEDFLEEKLTPFYKSEPVPESNEGDVKIVVGKNLDQIVLDESKDALLEIYAPWCGHCQELEPTYNKLGKHLRGIDSLVIAKMDGTANEHPRAKPDGFPTILFYPAGKKSFEPITFEGDRTVVEMYKFIKKHASIPFKLKRPDSSATKTEKDQSTASTNLRGERSSGTNFKDEL

SEQ ID NO: 2611 - protein, 986 aa, Oryza sativa
  subsp. japonica
MASATGASGWLRGKVKGVTSGDCLLIMGSTKADVPPPEKSITLSYLMAPRLARRGGVDEPFAWESREFLRKLCIGKEVTFRVDYTAPNVGREFGTVYLGDKNVAYSIIAAGWARVKEQGPKGGEPSPYLTELLRLEEVAKQQGLGRWSKEPGAAEESIRDLPPSAIGEASGFDAKGFAVANKGKSLEAIVEQVRDGSTVRVYLLPSFQFVQIYVAGVQSPSMGRRPPNPTVVAAAESTADGATNGGDSEEAPAPLTTAQRLAAAAVSTEIPPDRFGIEAKHFTETRVLNRDVRIVVEGTDSFSNIIGSVYYSDGDTLKDLALELVENGLAKYVEWSANMMDVDAKIKLKNAELQAKKDQLRIWTGFKPPVTNSKPIHDQKFTGKVVEVVSGDCIIVADDAAPYGSPSAERRVNLSSIRAPKMGNPRRDEKPDNFAREAKEFLRTRLIGKQVTVEMEYSRRISTVDGQPTTNTADARVLDYGSVFLGSPSQADGDDVSSIPSSGNQPGINIAETLLSRGFARTSKHRDYEERSHYFDLLLAAESRAEKAKKGVHSAKESPVMHITDLTTVSAKKARDFLPFLQRNRRHSAIVEYVFSGHRFKLTIPKETCSIAFSFSGVRCPGKDEPYSNEAIALMRRRILQRDVEIEVEAVDRTGTFLGSLWESKTNMASVLLEAGLAKLSSFGLDRIPDANVLMRAEQSAKQQKLKIWENYVEGEEVSNGSASESKQKEILKVVVTEVLGGGKFYVQTVGDHRVASIQQQLASLKLKDAPVIGAFNPVKGEIVLAQFSADNSWNRAMIVNGPRGAVSSQDDKFEVFYIDYGNQEVVPYSRIRPADPSISSSPALAQLCSLAFIKVPNLEDDFGHEAAVYLNDCLLNSQKQYRAMIEERDTSGGKSKGQGTGTILIVTLVDAETETSINATMLEEGLARLERSKRWDTRERKAALQNLEQFQEKAKKERLQIWQYGDVESDEEEQAPAARRTGGRR

SEQ ID NO: 2612 - protein, 220 aa, Oryza sativa
  subsp. japonica
MPGLTIGDTVPNLELDSTHGKIRIHDFVGDTYVILFSHPGDFTPVCTTELAAMAGYAKEFDKRGVKLLGISCDDVQSHKDWIKDIEAYKPGNRVTYPIMADPSREAIKQLNMVDPDEKDSNGGHLPSRALHIVGPDKKVKLSFLYPACVGRNMDEVVRAVDALQTAAKHAVATPVNWKPGERVVIPPGVSDDEAKEKFPQGFDTADLPSGKGYLRFTKVG

SEQ ID NO: 2613 - protein, 219 aa, Oryza sativa
  subsp. japonica
MGRRPARCYRQIKNKPYPKSRYCRGVPDPKIRIYDVGMKKKGVDEFSHCVHLVSWEKENVTSEALEAARIACNKYMTKSAGKDAFHLRVRVHPFHVLRINKMLSCAGADRLQTGMRGAFGKPQGTCARVDIGQVLLSVRCKPNNAVHASEALRRAKFKFPGRQKIIESRKWGFTKFSRDEYVRLKSEGRIMPDGVNAKLLGCHGRLSARAPGKAFLSAA

SEQ ID NO: 2614 - protein, 258 aa, Oryza sativa
  subsp. japonica
MAPKRGGRAPVPAKKKTEKVTNPLFEKRPKQFGIGGALPPKKDLHRFVKWPKVVRIQRQRRILKQRLKVPPALNQFTRTLDKNLATNLFKMLLKYRPEDKAAKKERLLKRAQAEAEGKTVEAKKPIVVKYGLNHVTYLIEQSKAQLVVIAHDVDPIELVVWLPALCRKMEVPYCIVKGKARLGSIVHKKTASVLCLTTVKNEDKLEFSKILEAIKANFNDKFDEVRKKWGGGVMGSKSQAKTKAREKLLAKEAAQRMT

SEQ ID NO: 2615 - protein, 304 aa, Oryza sativa
  subsp. japonica
MSLQGGFVKTQKTHAYFKRFQVKFKRRRQGKTDYRARIRLTNQDKNKYNTPKYRFVTNKDITAQIVYATIAGDIVMAAAYSHELPRYGLEVGLTNYAAAYCTGLLLARRVLTLRGLDQEYEGNVEATGEDYYVEPADERRPFRALLDVGLIRTTTGNRVFGALKGALDGGLDIPHSDKRFAGFKKDEKQLDSDIHRKYIYGGHVADYMRSMAEEEPEKFQAHFSEYLKKGIDADGMESLYKKVHAAIRADPTMAKSTKKEPATHKRYNLKKLTYEQRKASLVERLNALNSSAGADDDDEEEDDE

SEQ ID NO: 2616 - protein, 343 aa, Oryza sativa
  subsp. japonica
MFGFGHHHNQAPAAPSDPNQIFKIFCRANENYCLTVRDSAVVLAPVNPKDEHQHWFKDMRFSTKVKDGEGMPAFALVNKATGLAVKHSLGQSHPVKLVPFNPEYEDASVLWTESKDVGKGFRCIRMVNNTRLNLDAFHGDKDHGGVRDGTTVVLWEWCKGDNQSWKILPWGPEAHSSSPGAATACTIGGVPVHTVRVFSAAGEDYCLTVRNGTACLAPKNPRDDYQHWIKDMRHSNKIRDEEGYPAFALVNKVTGEAIKHSTGQGHPVKLVPYNPEYQDESVLWTESKDVGKGFRCIRMVNNIYLNFDAFHGDKDHGGIHDGTEIVLWKWCEGDNQRWKILPW

SEQ ID NO: 2617 - protein, 391 aa, Oryza sativa
  subsp. japonica
MAPPPYAAAVVVATVAVLVLVSQVSVAAGADCRFPAVFNFGDSNSDTGGLSATFGAAPPPNGRTFFGMPVGRYCDGRLVIDFIAESLGLPYLSAYLNSIGSNFTQGANFATAGSSIRRQNTSLFLSGFSPISLDVQSWEFEQFINRSQFVYNNKGGIYRELLPKAEYFSQALYTFDIGQNDITTGFFINMTSEQVIAYIPDLMERLTNIIQNVYGLGGRYFWIHNTGPIGCLPYAMVHRPDLAVVKDGSGCSVAYNEVAQLFNQRLKETVGHLRKTHADAAFTYVDVYSAKYKLISDAKKLGMDDPMLTCCGYGGGRYNFDDRVGCGGKVKVNGTWVVAGKSCDDPLKRVSWDGVHFTEAANKFVFDQIAGGKLSDPPVPLRQACQISRGQ

SEQ ID NO: 2618 - protein, 912 aa, Oryza sativa
  subsp. japonica
MNPDNFTHKTNEALVAAHEIASEAGHAQLTPLHLVAALAADKGGILRQAISQASGGDAGAPDSFERVVSGALKKLPSQSPPPDSVPASTALIKVIRRAQSAQKKRGDSHLAVDQLLLGLLEDSLISDCLKEAGVSAARVRAELEKLRGGEGRKVESASGDTNFQALKTYGRDLVEQAGKLDPVIGRDEEIRRVVRILSRRTKNNPVLIGEPGVGKTAVVEGLAQRIVRGDVPSNLLDVRLIALDMGALVAGAKYRGEFEERLKAVLKEVEEAEGKVILFIDEIHLVLGAGRTEGSMDAANLFKPMLARGQLRCIGATTLEEYRKYVEKDAAFERRFQQVFVAEPSVPDTISILRGLKEKYEGHHGVRIQDRALVVAAQLSARYIMGRHLPDKAIDLVDEACANVRVQLDSQPEEIDNLERKRIQLEVEHHALEKEKDKASKARLVEVKKELDDLRDKLQPLTMKYRKEKERIDEIRKLKQRREELQFTLQEAERRMDLARVADLKYGALQEIDVAIAKLESETGENLMLTETVGPEQIAEVVSRWTGIPVTRLGQNDKERLVGLADRLHQRVVGQAEAVSAVAEAVLRSRAGLGRPQQPTGSFLFLGPTGVGKTELAKALAEQLFDDENLLVRIDMSEYMEQHSVARLIGAPPGYVGHEEGGQLTEQVRRRPYSVILFDEVEKAHVAVFNTLLQVLDDGRLTDGQGRTVDFRNTVIIMTSNLGAEHLLAGMVGKNSMKVARDLVMQEVRRHFRPELLNRLDEIVIFDPLSHEQLRKVARLQMKDVAVRLAERGVALAVTDAALDVILSLSYDPVYGARPIRRWIEKRVVTQLSKMLIQEEIDENCTVYIDAAPHKDELAYRVDNRGGLVNAETGQKSDILIQVPNGAATGSDAAQAVKKMRIMEDEDGMDEE

SEQ ID NO: 2619 - protein, 148 aa, Oryza sativa
  subsp. japonica
MASKNLLLSAAVLLSVLAIAAAAATASAATTSCQPGMAIPHDPLRGCRRYVLRRACGLAAGGRLYDWSLKERCCQELAAVPAYCRCAALAYFMDGASEGRLLEDLPGCPRETQRGLAAMLTTPGECNLETIHGGPYCLELTDREMPKY

SEQ ID NO: 2620 - protein, 150 aa, Oryza sativa
  subsp. japonica
MSLVRRSNVFDPFSLDLWDPFDSVFRSVVPATSDNDTAAFANARIDWKETPESHVFKADLPGVKKEEVKVEVEEGNVLVISGQRSKEKEDKNDKWHRVERSSGQFMRRFRLPENAKVDQVKAGLENGVLTVTVPKAEVKKPEVKAIEISG

SEQ ID NO: 2621 - protein, 290 aa, Oryza sativa
  subsp. japonica
MGLVHALLPFAAAAALLLLAAPPPATADDPGLAVYWGRHKEEGSLREACDTGRYTTVIITFYNAFGHGRYSLDISGHPLAAVGADIKHCQSRGITVLLSIGGQGGAYSLPTNASAADVADNLWNAYLGGHRAGVARPFGDDAAVDGIDFFIDQGGADHYDDLARRLDGYNKYYRGRVGVLLTATTRCSYPDHRLEKALATGVFARIHVRMFGDEQCTMSPRYSWEKWAAAFPGSKVYIGLVASPEQDSAWMFQKDLYYEMLQFVRSLPNYGGLAIYDRYFDKKANYTGEG

SEQ ID NO: 2622 - protein, 319 aa, Oryza sativa
  subsp. japonica
MAIKRTKAEKKVAYDKKLCQLLDEYTKVLIAVADNVGSNQLQEIRKGLRGDSIVLMGKNTLIRRCIKVHADNTGNKEFLELMPLLVGNVGLIFTKGDLKEVREEVAKYKVGAPARVGLVAPVDVVVPPGNTGLDPSQTSFFQVLNIPTKINKGTVEIITPVELIKKGDKVGSSESALLAKLGIRPFSYGLVITNVYDSGSVFSPEVLDLTEDDLMEKFASGVSMVASVSLAISYPTIAAAPHMFLNGYKNVLAVAVETEYSYPHADKIKEYLKDPSKFAVAAPVAADSGAAAPSAAKEEEKKEEPEEESDGDLGMSLFD

SEQ ID NO: 2623 - protein, 317 aa, Oryza sativa
  subsp. japonica
MAAAASAPPAPADALPKGADSFFRTVISNMEKVYLSRNPTAKTILELVRSYDGDHICYDHFAFRTFGVDGYGIKSLAEFFTDFGYVPREELRFPAKKLRALWFSPPTNDGYTGTGVYGPLPRIFISELLVDELSPQSQDIIQKYIRTSGKGNKHATLASTSGELTWEKPIYSDFQVLSRESEYAAWTLVNGYALNHTTISTHRLISDIRSINKFNKFVEDNGFKLNSEGGILKVSPDGLLQQSSTVADSALFTFADGITESIPRSYIEFAERLVLPQFKDLPNDEVNEHHRRDGFEVGNADKIFESTSNDQLTRRSA

SEQ ID NO: 2624 - protein, 370 aa, Oryza sativa
  subsp. japonica
MSSSLLTDLVNLDLSESTDKVIAEYIWVGGTGMDVRSKARTLSGPVDDPSKLPKWNFDGSSTGQATGDDSEVILHPQAIFRDPFRKGKNILVMCDCYAPNGEPIPTNNRYNAARIFSHPDVKAEEPWYGIEQEYTLLQKHINWPLGWPLGGYPGPQGPYYCAAGADKSYGRDIVDAHYKACLFAGINISGINAEVMPGQWEFQIGPVVGVSAGDHVWVARYILERITEIAGVVVSFDPKPIPGDWNGAGAHTNYSTKSMRSNGGYEVIKKAIKKLGMRHREHIAAYGDGNERRLTGRHETADINNFVWGVANRGASVRVGRDTEKDGKGYFEDRRPASNMDPYLVTAMIAETTILWEPSHGHGHGQSNGK

SEQ ID NO: 2625 - protein, 381 aa, Oryza sativa
  subsp. japonica
MSHRRVDAAACDSWRPPPTPPPPHARRALALRVGGGGGGPAFASLTVREGGGGGEEGEVGEGKGKQQQLPAAGVLVRHPLAMLALVPNAVALFAAGAAAGAVAKTITAPLDRVKLLMQTHSVRVVGESTKKGIGFLEAIAEIGKEEGLKGYWKGNLPQVIRIVPYSAVQLFSYEVYKKFFRRKDGELTVFGRLAAGACAGMTSTLVTYPLDVLRLRLAVQSGHSTMSQVAMNMLRDEGLASFYGGLGPSLIGIAPYIAVNFCVFDLMKKSVPEKYKSRPETSLATALLSATFATLMCYPLDTVRRQMQMKGSPYNTVLDAIPGIVERDGLIGLYRGFVPNALKNLPNSSIKLTAFDTVKTLISTGQKELEKLMQENQEKMS

SEQ ID NO: 2626 - protein, 447 aa, Oryza sativa
  subsp. japonica
MREILHIQGGQCGNQIGAKFWEVICDEHGIDHTGKYSGDSDLQLERINVYYNEASGGRFVPRAVLMDLEPGTMDSVRSGPFGQIFRPDNFVFGQSGAGNNWAKGHYTEGAELIDSVLDVVRKEAENCDCLQGFQVCHSLGGGTGSGMGTLLISKIREEYPDRMMLTFSVFPSPKVSDTVVEPYNATLSVHQLVENADECMVLDNEALYDICFRTLKLATPTFGDLNHLISATMSGVTCCLRFPGQLNSDLRKLAVNLIPFPRLHFFMVGFAPLTSRGSQQYRALTVPELTQQMWDAKNMMCAADPRHGRYLTASAMFRGKMSTKEVDEQMLNVQNKNSSYFVEWIPNNVKSSVCDIPPNGLKMASTFIGNSTSIQEMFRRVSEQFTAMFRRKAFLHWYTGEGMDEMEFTEAESNMNDLVAEYQQYQDATADDEEEDYGDEEEDEVAA

SEQ ID NO: 2627 - protein, 451 aa, Oryza sativa
  subsp. japonica
MRECISIHIGQAGIQVGNACWELYCLEHGIQPDGQMPGDKTVGGGDDAFNTFFSETGAGKHVPRAVFVDLEPTVIDEVRTGDYRQLFHPEQLISGKEDAANNFARGHYTIGKEIVDLCLDRIRKLADNCTGLQGFLVFNAVGGGTGSGLGSLLLERLSVDYGKKSKLGFTVYPSPQVSTSVVEPYNSVLSTHSLLEHTDVAVLLDNEAIYDICRRSLDIERPTYTNLNRLVSQVISSLTASLRFDGALNVDVNEFQTNLVPYPRIHFMLSSYAPVISAEKAYHEQLSVAEITNSAFEPSSMMAKCDPRHGKYMACCLMYRGDVVPKDVNAAVATIKTKRTIQFVDWCPTGFKCGINYQPPSVVPGGDLAKVQRAVCMISNSTSVVEVFSRIDIKFDLMYSKRAFVHWYVGEGMEEGEFSEAREDLAALEKDYEEVGSEFDDGDEGDEGDEY

SEQ ID NO: 2628 - protein, 486 aa, Oryza sativa
  subsp. japonica
MAVSSSSLLLRRGATGGAGRRWGPGEALRRLVSSSEAAPAEKVPARSPPVMPPFEHRPRPYAGWSGDEILAKRKQFLGSSVFYYYQKPLNIVEGKMQYLYDENGKRYLDCFGGIVTVSCGHCHPDIVNAVVEQTKLLQHTTTIYLNQPIVEFAEALASKMPGNLKVVYFVNSGTEANELAMLMARLYSGNLNMIALRNAYHGGSAGTIGLTGLQTWKYPIPQGEIHHVMNPDPYRGTFGSDAVAYAKEVEEQINYGTSGRVAGFIAETFQGVGGAVELAPGYLKLAYDTVRKAGGVCIADEVQSGFGRTGSHYWGFQTQDVIPDIVTMAKGIGNGLPLGAVVTTPEIANVLAQKIQFNTFGGNPVCSVGGLAVLKVLDKEKRQAHCADVGSHLVNRLKELQQKHEIIGDVRGRGLMLGVELVTDRKEKTPAKAETNLLFEKLKDLNILVGKGGLHGNVFRIKPPMCFTRDDADYLVDAMDYAMSGL

SEQ ID NO: 2629 - protein, 509 aa, Oryza sativa
  subsp. japonica
MGSFARKEHQFLAELGLAPRNPGSFACGAWGGSGPVVTSTNPTNNQVIAEVVEASAREYEEGMRACYDAAKTWMAIPAPKRGEIVRQIGDALRAKLHHLGRLVSLEMGKILPEGIGEVQEIIDMCDYAVGLSRQLNGSIIPSERPNHMMMEVWNPLGVVGVITAFNFPCAVLGWNACIALVCGNCVVWKGAPTTPLITIAMTKIVASVLERNNLPGSIFTAFCGGADIGQAISLDTRIPLVSFTGSTKVGLMVQQQVNARFGKCLLELSGNNAIIVMDDADIQLAVRSVLFAAVGTAGQRCTTCRRLLLHESIYRTFLDQLVEVYKQVRIGDPLENGTLLGPLHTPASRDAFLKGIQTIRSQGGKILYGGSAIESEGNFVQPTIVEISPSAPVVREELFGPVLYVMKVQNLKEAVEINNSVPQGLSSSIFTKRPDIIFKWIGPHGSDCGIVNVNIPTNGAEIGGAFGGEKATGGGREAGSDSWKQYMRRATCTINYGSELPLAQGINFG

SEQ ID NO: 2630 - protein, 609 aa, Oryza sativa
  subsp. japonica
MASHALRLHPLLFSAAAARPAPLAARPGGGARRVHRRHSLAVVRCSSSAAQALKIKSIPTKPVEGQKTGTSGLRKKVKVFQQENYLANWIQALFNSLPPEDYVGGTLVLGGDGRYFNKDAAQIITKIAAGNGVGKILVGRNGLLSTPAVSAVIRKRQANGGFIMSASHNPGGPDNDWGIKFNYSSGQPAPETITDQIYGNTLSISEIKTADIPDVDLSSLGVVSYGDFTVEVIDPVLDYLELMENVFDFQLIKGLLSRPDFRFVFDAMHAVTGAYADPIFVEKLGADPDYILNGVPLEDFGNGHPDPNLTYAKELVFTMFGSGAPDFGAASDGDGDRNMILGRRFFVTPSDSVAIIAANAQAAIPYFQSGPKGLARSMPTSGALDRVADKLNVPFFEVPTGWKFFGNLMDAGKLSICGEESFGTGSDHIREKDGIWAVLAWLSILAHRNKDKKAGERLVSVEDVAREHWATYGRNFFSRYDYEECESESANKMMEHLRDVIAKSKPGEKYGNYTLQFADDFSYTDPVDGSTVSKQGLRFVFTDGSRIIFRLSGTGSAGATIRIYIEQFESDASKHDLDAQIALKPLIDLALSVSKLKDFTGRDKPTVIT

SEQ ID NO: 2631 - protein, 654 aa, Oryza sativa
  subsp. japonica
MAPALSRSLGASSVAALRPTPSRGRGPTLRSAVAVQGRGAAAVAARGVRWEAGRRKGKGRMVGVRCEAAVTEKPAGEEEAAGEQFEYQAEVSRLLDLIVHSLYSHKEVFLRELVSNASDALDKLRFLSVTDSSVLSDGGELEIRIKPDPEAGTITITDTGIGMTKDELKDCLGTIAQSGTSKFLKALKENKDLGADNGLIGQFGVGFYSAFLVAEKVVVSTKSPKADKQYVWEAMADSSSYVIKEETDPEKMLTRGTQITLFLRDDDKYEFADPGRIQGLVKNYSQFVSFPIYTWQEKSRTVEVEEEEPKEGEEATEGEKKKKKKTITEKYWDWELANETKPIWMRNPKEVEKTEYNEFYKKAFNEFLDPLAYTHFTTEGEVEFRSVLYIPGMAPLSNEEIMNPKTKNIRLYVKRVFISDDFDGELFPRYLSFVKGVVDSNDLPLNVSREILQESRIVRIMRKRLVRKTFDMIQEIAEKEDKEDYKKFWESFGKFVKLGCIEDTGNHKRLAPLLRFYSSKNETDLISLDQYVENMPENQKAIYYIATDSLQSAKTAPFLEKLVQKDIEVRARFLFTIYQRFVVCLCYSSGSEAHFSFFRFSTLSSRLMRLPFRIYRHTKRKNLLISAKKTWNWVMKMRTRKMRASRNTLFYVTG

SEQ ID NO: 2632 - protein, 988 aa, Oryza sativa
  subsp. japonica
MELALASAKPSPSPAPAPLLFAPLKPLPLLRFPPRRPRASSSSVGARLRAGRRGLRLLCRAAVGAGEEVFGPRRELAGVQPLVEALPPAARTAAELAVAAAAVAAGYGIGLRAGGGSRAVAVAGAAVLGAASVAGAAAVNSVVPEVAAVGLHNYVAGCDDPTKLESGEVEALATKYGVSTQDAAFKAELCDLYARFLYSVLPPGDEDLKGDEVQTIIKFKNALGLDDVDAANMHMEAFQKLIYVSNLVFGDASTFLLPWKRLFGVTDSQIDIAMRENAKILYASQLKSIGRGLDIGTLIEVRRAQLAYKLSDEIAAEMFKEHAKKLVQENISSALDIEYPTQVIEDVKSILAFNSLLITLSKHPDQDRFIRGLGPISLGGESDHDRRADDLKLLYRAYATEVLSDGHLDDEKLAPLNQLRNIFGLGKREAESIMSDVKAQVYRKRLAKSFNSELAAAPSKAAFLQNICEELQFDPELASKMHEDIYRQKLQQFVADGELNKDEVEALMAFQVRLCIPQETVDAVHSEICGKLFEKVVVEAISSVDGYDTNRRQAVKKAAQGLNLKNESVMAIFSKVVRKLFLNYIQRAKAAGNRIETAKELKKMISFNTVVVSELLADIKGEPTTAEPQTSDATSEPEVSESEGDDEYEWEQLETLRKTRPDKELREKLAKSSQKEITLKDDIPLRDRAELYETYLVFCVTGETTNVSFGTAISTKKDNSEYLMLKQLGDILGLTRKEAQNVHIKMAEKAFVQQAEVILADGKLTEAKADQLAKIQKQVGLPTEYAQKIIKNITTTKLSSAIEASISRGQIGIQQVRGLKEANFQLDSLIAEPLRENIYKKSVEEIFSSGTGEFDEEEVYVKIPADLIINAEKAKSIVQDIAKIRLDNALVQAVALLRQKKKDEVVASLNDLLACDAAVPASKPLSWPTSGELDDLYGIYMKSIPKPEKLSRLQYLLGISDEKAGQIRDAASAGTLSVATEEEDELVF

SEQ ID NO: 2633 - protein, 154 aa, Oryza sativa
  subsp. japonica
MADVEVETEVAAGAQPKKRTFRKYSYRGVDLDALLDMSTDDLVQLFPARARRRFQRGLKRKPMALIKKLRKAKKDAPAGEKPEPVRTHLRNMIIVPEMIGSIVGVYNGKTFNQVEIKPEMIGHYLAEFSISYKPVKHGRPGIGATHSSRFIPLK

SEQ ID NO: 2634 - protein, 161 aa, Oryza sativa
  subsp. japonica
MSLIRRSNVFDPFSLDLWDPFDGFPFGSGGSSSGSIFPSFPRGASSETAAFAGARIDWKETPEAHVFKADVPGLKKEEVKVEVDDGNILQISGERNKEQEEKTDQWHRVERSSGKFLRRFRLPDNAKPEQIKASMENGVLTVTVPKEEAKKPDVKSIQISG

SEQ ID NO: 2635 - protein, 160 aa, Oryza sativa
  subsp. japonica
MAEQTERAFLKQPKVFLCPKKTTKGKKPGKGGNRFWKNIGLGFKTPREAIEGTYIDKKCPFTGTVSIRGRIIAGTCHSAKMNRTIIVRRNYLHFVKKYQRYEKRHSNIPAHISPCFRVKEGDHVIIGQCRPLSKTVRFNVLKVIPAGSKSGAGKKVFTAA

SEQ ID NO: 2636 - protein, 152 aa, Oryza sativa
  subsp. japonica
MSLIAGEDFQHILRLLNTNVDGKQKIMFALTSIKGVGRRFSNIACKKADIDMNKRAGELTPEELERLMTVVANPRQFKVPDWFLNRKKDYKDGRFSQVVSNALDMKLRDDLERLKKIRNHRGLRHYWGLRVRGQHTKTTGRRGKTVGVSKKR

SEQ ID NO: 2637 - protein, 171 aa, Oryza sativa
  subsp. japonica
MVKYSREANNPTKSSKAMGRDLRVHFKNTRETAFAIRKLPLGKAKRYLEDVIAHKQAIPFRRYCGGVGRTAQAKSRHSNGQGRWPAKSARFILDLLKNAESNAEVKGLDVDTLYVSHIQVNQAQKQRRRTYRAHGRINPYMSSPCHIELILSEKEEPVKKEPESQIAARKA

SEQ ID NO: 2638 - protein, 220 aa, Oryza sativa
  subsp. japonica
MGISRDSMHKRRATGGKQKAWRKKRKYELGRQPANTKLSSNKTVRRVRVRGGNVKWRALRLDTGNYSWGSEAVTRKTRILDVVYNASNNELVRTQTLVKSAIVQVDAAPFKQWYLTHYGVDIGRKKKAPAAKKDAEGQDAEATTEEAKKSNHVVRKLEKRQQGRTLDAHIEEQFGSGRLLACISSRPGQCGRADGYILEGKELEFYMKKLQRKKGKGASA

SEQ ID NO: 2639 - protein, 229 aa, Oryza sativa
  subsp. japonica
MAVSFTNVSSEAGLKKLDEYLLTRSYISGYQASNDDLAVYSAFSTAPSSSYTNVARWFTHIDALLRLSGVTADGQGVKVESTAVPSASTPDVADAKAPAADDDDDDDVDLFGEETEEEKKAAEERAAAVKASGKKKESGKSSVLLDVKPWDDETDMTKLEEAVRNVKMEGLLWGASKLVPVGYGIKKLQIMMTIVDDLVSVDSLIEDYFYTEPANEYIQSCDIVAFNKI

SEQ ID NO: 2640 - protein, 221 aa, Oryza sativa
  subsp. japonica
MALPNQGTVDYPSFKLVIVGDGGTGKTTFVKRHLTGEFEKKYEPTIGVEVHPLDFTTNCGKIRFYCWDTAGQEKFGGLRDGYYIHGQCAIIMFDVTSRLTYKNVPTWHRDLCRVCENIPIVLCGNKVDVKNRQVKAKQVTFHRKKNLQYYEISAKSNYNFEKPFLYLARKLAGDPNLHFVEAVALKPPEVPIDLAMQQQHEAELAAAAAQPLPDDDDDLIE

SEQ ID NO: 2641 - protein, 221 aa, Oryza sativa
  subsp. japonica
MGISRDSMHKRRATGGKQKAWRKKRKYELGRQPANTKLSSNKTVRRVRVRGGNLKWRALRLDTGNYSWGSEAVTRKTRILDVVYNASNNELVRTQTLVKSAIVQVDAAPFKQWYLTHYGVDIGRKKKAPAAKKDAAEGQEGEAATEEAKKSNHVVRKLEKRQQTRTLDSHIEEQFGSGRLLACISSRPGQCGRADGYILEGKELEFYMKKLQRKKGKGAAA

SEQ ID NO: 2642 - protein, 250 aa, Oryza sativa
  subsp. japonica
MKFNIANPTTGCQKKLEIDDDQKLRAFFDKRISQEVSGDALGEEFKGYVFKIMGGCDKQGFPMKQGVLTAGRVRLLLHRGTPCFRGYGRRDGERRRKSVRGCIVSQDLSVINLVIVKKGENDLPGLTDTEKPRMRGPKRASKIRKLFNLSKDDDVRKYVNTYRRTFTTKNGKKVSKAPKIQRLVTPLTLQRKRARIADKKKRIAKKKSEAAEYQKLLAQRLKEQRERRSESLAKRRSKLSSAAKAAATTA

SEQ ID NO: 2643 - protein, 261 aa, Oryza sativa
  subsp. japonica
MAVGKNKRISKGRKGSKKKTVDPFSKKDWYDIKAPTVFSVRNIGKTLVSRTQGTKIASEGLKHRVFEVSLADLQNDEDQAYRKVRLRAEDVQGRNVLTNFWGMSFTTDKLRSLVKKWQTLIEAHVDVKTTDNYMLRLFCIGFTKRRPNQVKRTCYAQASQIRQIRRKMVEIMANQASTCDLKELVSKFIPEVIGKEIEKSTSSIFPLQNVFIRKVKILKAPKFDLGKLMEVHGDYKEDVGMKLDRPAETDEAVAGEVAAAE

SEQ ID NO: 2644 - protein, 274 aa, Oryza sativa
  subsp. japonica
MAERGGERGGERGGFGRGFGRGGRGDRGGRRGGRRGPRQEEEKWVPVTKLGRLVKEGRFSKIEEIYLHSLPVKEHQIVETLVPGLKDEVMKITPVQKQTRAGQRTRFKAFVVVGDNNGHVGLGVKCAKEVATAIRGAIILAKLSVVPVRRGYWGNKIGQPHTVPCKVTGKCGSVTVRMVPAPRGSGIVAARVPKKVLQFAGIEDVFTSSRGSTKTLGNFVKATFDCLMKTYGFLTPDFWRDTKFVKSPFQEYTDLLAKPTKALMIDAPVENVEA

SEQ ID NO: 2645 - protein, 300 aa, Oryza sativa
  subsp. japonica
MASQQFPPQNQETQPGKEHAMDPRPEAIIQSYKPANKLKDKVAIVTGGDSGIGRAVCLCFALEGATVAFTYVKGQEEKDAEETLRALRDIRARTGAKDPMAIPADLGYDDNCRKVVDEVAGAYGGAIDILVNNAAEQYERPSITDITEDDLERVFRTNIFSYFFMSKHAVKRMRDRRGGAGAGGCSIINTSSINAYKGNKTLLDYTATKGAIVAFTRALALQLAEEGIRVNGVAPGPIWTPLIPASFAEEKVRQFGSQVPMGRAGQPSEVAPSFVFLASDDASYMSGQMLHVNGGVIVNG

SEQ ID NO: 2646 - protein, 340 aa, Oryza sativa
  subsp. japonica
MRPSLLRYAAQALRRRDYSSAAAAAERKVAILGAAGGIGQPLALLMKLNPLVSSLSLYDIAGTPGVAADVSHINSPALVKGFVGEEQLGEALEGSDVVIIPAGVPRKPGMTRDDLFNINAGIVKGLCTAISKYCPNALVNMISNPVNSTVPIAAEVFKKAGTYDEKKLFGVTTLDVVRAKTFYAGKANVPVTEVNVPVVGGHAGITILPLFSQATPASNALSHEDIKALTKRTQDGGTEVVEAKAGKGSATLSMAYAGAVFADACLKGLNGVPDVVECSFVQSTVTELPFFASKVRLGKNGVEEVLGLGQLSEFEKEGLENLKGELKSSIEKGIKFAHAN

SEQ ID NO: 2647 - protein, 375 aa, Oryza sativa
  subsp. japonica
MEKIQVTTPMADSSFNPEFLQAHAELWNLTFSYLKAMALECAIKLGIPNAIHRCGGSASLSELVISIPVPETRKPHLPRLMRFLAAVGVFSLDNPTIDEEVTEKGMGIYRLTPLSRLLVDGSIGGHGSLSPFVLSQTTKYHVSAAMNLSDWFMTEDKEVAIEMPFRAAHGTDLWGVMSRDANMNEVFNAGMGSDSRLAINFIISKCGEVFEGISSLVDVGGGTGTTARDIAKAFPHIKCSVLDLPNVIDTITVDGIIEYIAGDMMEQIPPTDAVLLKYILHDWNDEDCVKILKQCRNAIHAQKPGGKVIIIDIVVGSPSKDMFEAQVSFDLLMMVITSGKERDQHEWHKIFMDAGFSHYKTRPVLGFLAITELYP

SEQ ID NO: 2648 - protein, 396 aa, Oryza sativa
  subsp. japonica
MAADLRVSIAHQTSFALRLAAALSSPAHPAGGAGRNVAFSPLSLHVALSLVAAGAGGATRDQLASALGGPGSAEGLHAFAEQLVQLVLADASGAGGPRVAFADGVFVDASLSLKKTFGDVAVGKYKAETHSVDFQTKAAEVASQVNSWVEKVTSGLIKEILPPGSVDHTTRLVLGNALYFKGAWTEKFDASKTKDGEFHLLDGKSVQAPFMSTSKKQYILSYDNLKVLKLPYQQGGDKRQFSMYILLPEAQDGLWSLAEKLNSEPEFLEKHIPTRQVTVGQFKLPKFKISFGFEASDLLKSLGLHLPFSSEADLTEMVDSPEGKNLFVSSVFHKSFVEVNEEGTEAAAATAAVITLRSAPIAEDFVADHPFLFLIQEDMTGVVLFVGHVVNPLLAA

SEQ ID NO: 2649 - protein, 394 aa, Oryza sativa
  subsp. japonica
MPPKASKKDAAPAERPILGRFSSHLKIGIVGLPNVGKSTFFNIVTKLSIPAENFPFCTIDPNEARVYVPDERFDWLCQLYKPKSEVSAYLEINDIAGLVRGAHAGEGLGNAFLSHIRAVDGIFHVLRAFEDKEVTHIDDSVDPVRDLETIGEELRLKDIEFVQNKIDDLEKSMKRSNDKQLKLEHELCEKVKAHLEDGKDVRFGDWKSADIEILNTFQLLTAKPVVYLVNMSEKDYQRKKNKFLPKIHAWVQEHGGETIIPFSCAFERLLADMPPDEAAKYCAENQIASVIPKIIKTGFAAIHLIYFFTAGPDEVKCWQIRRQTKAPQAAGTIHTDFERGFICAEVMKFDDLKELGSESAVKAAGKYRQEGKTYVVQDGDIIFFKFNVSGGGKK

SEQ ID NO: 2650 - protein, 414 aa, Oryza sativa
  subsp. japonica
MESLTLRASPSTAAPLRRVPGRRHAAVSVRASAGAGEPDLSVRVNGLKMPNPFVIGSGPPGTNYTVMKRAFDEGWGGVIAKTVSLDAEKVINVTPRYARLRADPNGSTKSPIIGWQNIELISDRPLETMLNEFKQLKKEYPDRILIGSIMEEYNKAAWHELIERVEESGVDALEINFSCPHGMPERKMGAAVGQDCDLLEEVCGWINEKATVPVWAKMTPNITDITKPARISLKSGCEGVSAINTIMSVMGINLKTLRPEPCVEGYSTPGGYSARAVHPIALAKVMQIARMMKEEFADGQSLSAIGGVETGNDAAEFILLGADTVQVCTGVMMHGYGLVKKLCAELQDFMRQHNFSSIEDFRGASLPYFTTHTDLVHRQREAINQRKAIRKGLESDKDWTGDGFVKETESMVSN

SEQ ID NO: 2651 - protein, 411 aa, Oryza sativa
  subsp. japonica
MEKNCACPPPSKGNMITILSIDGGGVKGIIPAVILSFLESKLQELDGKDARIANYFDAIAGTSTGGLIAGMLAAPSLGNANQPCYAKDIVPFYLKHSPHIFPHRTGFFGWFFNILGIIKMAIGPKYDGKYLHRLINDLLGETRMKETLTNVVIPTFDVKCVKPIIFSTFKARRKPLKNACLADVCIGTSAAPTFLPAHYFETVDHTGASQSFNIIDGGMAANNPTLVTMGEITKQIKRKSEEFPKAEPLDYRKYLVISLGTGLPEHDIMFDARNVAKWGIFRWLVDKDTMPLLNMFFHASSDMADTLVADLFQAIGCSHQLLRIQDHNIPIGAISNDLSTKDHLQLLVKIGENLLKKPLSKEECEKNNIEPEPNLHGDHVTTYADMLTRFAKLLSDERKLRLHNMKLDAKP

SEQ ID NO: 2652 - protein, 475 aa, Oryza sativa
  subsp. japonica
MAGGFRVLHLVRPFLAFLPEVQSADRKIPFREKVIYTVISLFIFLVCSQLPLYGIHSTTGADPFYWMRVILASNRGTVMELGITPIVTSGMVMQLLVGSKIIEVDNSVREDRALLNGAQKLLGILIAIGEAVAYVLSGMYGSVSQLGTGNAILIILQLFFAGIIVICLDELLQKGYGLGSGISLFIATNICENIIWKAFSPTTINSGRGAEFEGAVIALFHLLITRTDKVRALREAFYRQNLPNVTNLLATVLVFLIVIYFQGFRVVLPVRSKNARGQQGSYPIKLFYTSNMPIILHSALITNLYFISQLLYRRYSGNFLVNLIGKWKESEYSGHSVPVGGLAYYVTAPSSLADVLANPFHALFYVVFMLSACALFSKTWIEVSGSSAKDVAKQLKEQQMVMPGHRESNLQKELNRYIPTAAAFGGVCIGALTVLADFMGAIGSGTGILLAVTIIYQYFETFEKERATELGFFGF

SEQ ID NO: 2653 - protein, 514 aa, Oryza sativa
  subsp. japonica
MASISAASPVAGKAAAFAHKNELAAAAVAPSQQQLQRRVSGRRARSGRVRAVATPARAPRAPSSTGSVKSAMTMTEKILARASERASLEPGENVWVDVDVLMTHDVCGPGTIGIFKREFGEDAKVWDREKVVIIPDHYIFTSDERANRNVDILRDFCMEQNIKYFYDIKDLSNFKANPDYKGVCHVALAQEGHCRPGEVLLGTDSHTCNAGAFGQFATGIGNTDAGFVMGTGKALLKVPPTIRFVLDGEMPPYLLAKDLILQIIGEISVSGATYKSMEFVGSTVESLNMEERMTLCNMVIEAGGKNGVVPADQTTFNYLEGKTSVEYEPVYSDAQARFVSDYRFDVSKLEPVIAKPHSPDNRALARECKDVKIDRVYIGSCTGGKTEDFFAAAKVFLASGKKVKVPTFLVPATQKVWMDIYSIPVPGAGGKTCSQIFEEAGCDTPASPSCGACLGGPRDTYARMNEPMVCVSTTNRNFPGRMGHKEGQIYLASPFTAAASALTGYVTDPRDFLM

SEQ ID NO: 2654 - protein, 510 aa, Oryza sativa
  subsp. japonica
MSSGKGGGGGGKGGGGKKKEVKKETKLGMAYKKDDNFGEWYSEVVVNSEMIEYYDISGCYILRPWAMEIWELLKEFFDAEIKKLKLKPYYFPLFVTENVLQKEKDHIEGFAPEVAWVTKSGKSDLEAPIAIRPTSETVMYPYFSKWIRSHRDLPLRCNQWCNVVRWEFSNPTPFIRSREFLWQEGHTAFATKEEADEEVLQILELYRRIYEEFLAVPVSKGRKSEMEKFAGGLYTTSVEAFIPNTGRGVQGATSHCLGQNFAKMFDITFENDKGSRSMVWQNSWAYTTRSIGVMVMTHGDDKGLVLPPRVAPLQVIVIPVPYKDVDTTAIVNECKKTVETLEKAGIRADLDTRENYSPGWKYSHWEMKGVPLRIEIGPKDMANNQARVVRRDNGAKADIPTADLVEKVNGLLDEVQKNLFETAKQKRDACLKVVNTWDEFIVALNDKKLILAPWCDEEEVEKDVKARTKGDLGAAKTLCTPFEQPDLPEGTTCFASGKPAKKWSFWGRSY

SEQ ID NO: 2655 - protein, 534 aa, Oryza sativa
  subsp. japonica
MSLRPSERAEVRRSRYKVAVDADEGRRRREDNMVEIRKSRREESLLKKRRDGLPAAAAAAAAASPLLAHSSALQQKLEGLPAMVQAVQSDDSAVQLEATTQFRKLLSIERSPPIEEVINTGVVPRFIAFLQREDYPQLQFEAAWALTNIASGTSDNTKVVVESGAVPIFVKLLSSPSEDVREQAVWALGNVAGDSPKCRDLVLASGGLYPLLQQLNEHAKLSMLRNATWTLSNFCRGKPQPNFEQVKPALSALQRLIHSQDEEVLTDACWALSYLSDGTNDKIQAVIESGVFPRLVELLMHPSASVLIPALRTVGNIVTGDDMQTQCVIDHQALPCLLNLLTNNHKKSIKKEACWTISNITAGNREQIQAVINANIIAPLVHLLQTAEFDIKKEAAWAISNATSGGTHDQIKYLVAQGCIKPLCDLLVCPDPRIVTVCLEGLENILKVGEAEKNLGAGDVNSYAQMIDDAEGLEKIENLQSHDNTEIYEKAVKMLESYWLEEEDDAMPSGDNAQNGFNFGNQQPNVPSGGFNFG

SEQ ID NO: 2656 - protein, 558 aa, Oryza sativa
  subsp. japonica
MAAAAAATNGGFDVIVVGGGIMGSCAAYAAASSSASRCGGARVLLLERFDLLHHRGSSHGESRGIRATYPQARYPPMVRLAARLWGNAEAEAGYRVLTPTPHLDMGPRADPALRAAIQNGGAAEVVGASDDSAASWLWSAVFRLPEGWTAASSELGGVIKATKAVAMFQSLAAKNGAVLRDRTEVIDIAKQGDGSILVKTSSGEEFHGAKCIITVGAWASKLVKSVAGVDLPVQPLHTLICYWKARPGREHELTPESGFPTFASYGDTCIYSTPSMEFPGLIKVCAHGGAPCDPDRRDWCAGGDALADPVARWIDELMPGHVDTAGGPVIRQSCMYSMTPDEDFIIDFVGGEFGKDVVVGAGFSGHGFKMGPAVGRILAEMAMDGEAKTAAEAGVELGYFRIGRFEGNPEGNRAENKPPPGLPVRDGNGARRGRVGQERPRPRPLTLSPGPGPYWSPTQTGALQSCRERGQTRTVAAKTRWLIEEASVAEIWRRCRSRRRAMKTKAKQPATCDEGTTAGDTRQSCSSRRRSESAAAGDPRPRRKRSSRPGQRRSLARS

SEQ ID NO: 2657 - protein, 559 aa, Oryza sativa
  subsp. japonica
MASSGFSWTLPDHPKLPKGKTVALVVLDGWGEANADKYNCIHVAQTPVMDSLKNGAPERWRLVKAHGTAVGLPSEDDMGNSEVGHNALGAGRIFAQGAKLVDLALASGKIYDGEGFNYIKECFDKGTLHLIGLLSDGGVHSRLDQVQLLLKGASERGAKRIRVHILTDGRDVLDGSSVGFVETLESDLSQLRDKGIDARIASGGGRMYVTMDRYENDWDVVKRGWDAQVLGEAPYKFQNAVEAVKTLRAETKASDQYLPPFVIVDESGKSVGPVVDGDAVVTFNFRADRMVMLAKALEYADFDKFDRVRVPKIRYAGMLQYDGELKLPSHYLVSPPEIERTSGEYLVKNGVRTFACSETVKFGHVTFFWNGNRSGYFDETKEEYVEIPSDIGITFNVKPNMKALEIAEKARDAILSGKFDQVRVNLPNGDMVGHTGDIEATVVACKAADEAVKIILDAIEQVGGIYLVTADHGNAEDMVKRNKSGQPLLDKNGGIQILTSHTLQPVPVAIGGPGLHPGVKFRSDIQTPGLANVAATVMNFHGFEAPADYEPTLIEVVDN

SEQ ID NO: 2658 - protein, 586 aa, Oryza sativa
  subsp. japonica
MAMDDLAGSSSSSSAMDAVVADPSHGWQKVTYPKRHRKQGAAALPSAAAPDLGFLPNGGGKVNVFEAVDRNAEKRHRALLAARDAADPDAARIAAATASAYSDDDDDSDEAQATRPEGEVKKPKVKKPKKPKVTVAEAAALIDAENLAAHLVQISESYENQQDIQLMRFADYFGRSFASVSAAQFPWAKMFKESLVSKMVDIPLCHIPEPVRNTASDWINQRSPDALGDFVMWCIDSIMSELSGQAVGAKGSKKAAQQTPRAQVAIFVVLALTVRRKPEVLTNVLPKIMGNNKYLGQEKLPIIVWVIAQASQGDLVTGMFCWAHFLFPTLCAKPSGNPQTRDLVLQLLERILSAPKARGILLNGAVRKGERLIPPVTFDLFMRAAFPVSSARVKATERFEAAYPTIKELALAGPPGSKTVKQAAQQLLPLCVKAMQENNADLTGESAGVFIWCLTQNAESYKLWERLHPENVEASVVVLSTIVTKWSELSHKLSAESLKVTLKNLRTKNEAALEAATDSGKQASIKAADKYSKEILGRLSRGGACLKGSLLVITLAVAAGFVLSPNLEIPSDWDKLQAMVASHLSF

SEQ ID NO: 2659 - protein, 605 aa, Oryza sativa
  subsp. japonica
METHIGSVDGAAAAADNGAVGCPASAVGCPMTSARPAPVSAGEASLGRHLARRLVQVGVSDVFAVPGDFNLTLLDHLIAEPGLRLVGCCNELNAGYAADGYARARGVGACAVTFTVGGLSVLNAIAGAYSENLPVICIAGGPNSNDYGTNRILHHTIGLPDFSQELRCFQTVTCHQAVVTNLEDAHEQIDTAIATALRESKPVYLSISCNLPGLPHPTFSRDPVPFFLAPRLSNKMGLEAAVEATVEFLNKAVKPVLVGGPKLRVAKAGKAFVDLVDASGYAYAVMPSAKGLVPETHPHFIGTYWGAVSTAFCAEIVESADAYLFAGPIFNDYSSVGYSFLLKKDKAIIVQPERVIVGNGPAFGCVMMKEFLSELAKRVNKNTTAYENYKRIFVPEGQPLESEPNEPLRVNVLFKHVQKMLNSDSAVIAETGDSWFNCQKLKLPEGCGYEFQMQYGSIGWSVGALLGYAQGAKDKRVIACIGDGSFQVTAQDVSTMIRCAQNSIIFLINNGGYTIEVEIHDGPYNVIKNWNYTGLVDAIHNGEGKCWTSKVKCEEELTEAIGMALGEKDCLCFIEVIAHKDDTSKELLEWGSRVSAANSRPPNPQ

SEQ ID NO: 2660 - protein, 587 aa, Oryza sativa
  subsp. japonica
MASMDEPLYPIAILIDELKNEDIQLRLNSIRRLSTIARALGEERTRKELIPFLSENNDDEDEVLLAMAEELGVFIPYVGGVEHAHVLLPPLETLCTVEETCVRDKAVESLCRIGAQMKESDIVDWFVPVVKRLAAGEWFTARVSSCGLFHIAYPSAPDQLKAELRTIYGQLCQDDMPMVRRAAASNLGKFAATVEQNYLKTEVMSIFDDLTQDDQDSVRLLAVEGCAALGKLLEPQDCVAHILPVIVNFSQDKSWRVRYMVANQLYELCEAVGPEHSREQLVPAYVRLLRDNEAEVRIAAAGKVTKFCRILSPQLAIQHILPCVKELSSDSSQHVRSALASVIMGMAPVLGKEATIEQLLPIFLSLLKDEFPDVRLNIISKLDQVNQVIGIDLLSQSLLPAIVELAEDRHWRVRLAIIEYIPLLASQLGVGFFDDKLGALCMQWLEDKVFSIRDAAANNLKRLAEEFGPEWAMQHIIPQVLEKINNPHYLYRMTILQAISLLAPVMGAEITCQQLLPVVINSSKDRVPNIKFNVAKVLQALIPILDQSVVEKNVKPCLVELSEDPDVDVRYYANQALQACDQIMMSS

SEQ ID NO: 2661 - protein, 978 aa, Oryza sativa
  subsp. japonica
MAAAPPLAAGLRPAMAAAQAPVVAAAWGVGARRGAALSSSARCRALRLSRGGGGGRDGWVPPPVVGRMPPRTLSVRCAASNGRITQQEFTEMAWQSIVSSPEVAKESKHQIVETEHLMKSLLEQRNGLARRIFSKAGVDNTRLLDATEKFIQRQPKVLGEDPGSMLGRDLEALIQRARDFKKEYGDSFVSVEHLVLGFAEDKRFGRQLFKDFQITVQSLKTAIESIRGKQNVIDQDPEGKYEALDKYGKDLTAMARQGKLDPVIGRDDEIRRCIQILSRRTKNNPVLIGEPGVGKTAIAEGLAQRIVQGDVPQALTNRRLIALDMGALIAGAKYRGEFEDRLKAVLKEVTDSDGQTILFIDEIHTVVGAGATNGAMDAGNLLKPMLGRGELRCIGATTLDEYRKYIEKDPALERRFQQVYVDQPSVEDTISILRGLRERYELHHGVRISDSALVAAALLSDRYISGRFLPDKAIDLVDESAAKLKMEITSKPTALDEIDRAVIKLEMERLSLTNDTDKASRDRLSRIEAELSLLKEKQKDLTEQWEREKSVMTKIQSIKEEIDRVNVEIQQAEREYDLNRAAELKYGSLNALQRQLQTTEKELDEYQSSGKSMLREEVTQDDIAEIVSRWTGIPVSKLKQSDREKLLYLEEELHKRVVGQDPAVKAVSEAIQRSRAGLSDPNRPIASFMFMGPTGVGKTELAKALAAFMFNTEEAVVRIDMSEYMEKHSVSRLIGAPPGYVGYEEGGQLTEAVRRRPYSIILFDEIEKAHGDVFNVFLQILDDGRVTDSQGRKVSFTNSIIIMTSNVGSQFILNMDEEGGSTDSAYENIKKRVMDAARSVFRPEFMNRIDEYIVFKPLEREQINSIVKLQLARVQKRIADRKIKLEVSPGAVEFLGSLGYDPNYGARPVKRVIQQYVENELAKGILRGDFKDEDSILVDTQVTVPSNGQLPQQKLVFHKMSEESAPAAAEDEKFLPAV

SEQ ID NO: 2662 - protein, 101 aa, Oryza sativa
  subsp. japonica
MARGGGGGQREGNALKTAVVVTGGLVLAWFTMESAFKPFLDRLRGALTRNTDPARDPDEENSAAPADRAVEEPAAAAAPVEEGEGKGVELEEKGEGAAMTE

SEQ ID NO: 2663 - protein, 116 aa, Oryza sativa
  subsp. japonica
MARAQLVLVALVAALLLAAPHAAVAITCGQVNSAVGPCLTYARGGAGPSAACCSGVRSLKAAASTTADRRTACNCLKNAARGIKGLNAGNAASIPSKCGVSVPYTISASIDCSRVS

SEQ ID NO: 2664 - protein, 123 aa, Oryza sativa; identical to SEQ ID NO: 627
  subsp. japonica

SEQ ID NO: 2665 - protein, 131 aa, Oryza sativa
  subsp. japonica
MARGVAAAAGGKGGAGKKKGSVTFVIDCAKPVDDKIMEIASLEKFLQERIKVAGGKAGNLGESVTVSRDKTKVTVTSDGPFSKRYLKYLTKKYLKKHNVRDWLRVIASNKDRNVYELRYFNIAENEGEEED

SEQ ID NO: 2666 - protein, 148 aa, Oryza sativa
  subsp. japonica
MADQHRGVIGGGGYGDRGGQEQQEKQRFMMTALKTVTAATAGGSMLVLSGLILAGTVIALTVATPVLVIFSPVLVPAAIALALMAAGFVTSGGLGVAALSVFSWMYKYLTGKHPPGADQLDHAKARLASKARDIKEAAQHRIDQAQAS

SEQ ID NO: 2667 - protein, 135 aa, Oryza sativa
  subsp. japonica
NALLTPHWTVNAHIVMYVTAGQGRIQVVDHRGRTVFDGELRQQQILLIPQNFAVAVKARQEGFSWVSFKTSHNAIDSQIAGKRSILRALPVDVVAKAYLLSREESRSLKFNRGDEMAVFSPRLHQQLYAEWQNSK

SEQ ID NO: 2668 - protein, 150 aa, Oryza sativa
  subsp. japonica
MSKRKTREPKEENVTLGPTVREGEYVFGVAHIFASFNDTFIHVTDLSGRETLVRITGGMKVKADRDESSPYAAMLASQDVAQRCKELGITALHIKLRATGGNKTKTPGPGAQSALRALARSGMKIGRIEDVTPVPTDSTRRKGGRRGRRL

SEQ ID NO: 2669 - protein, 171 aa, Oryza sativa; identical to SEQ ID NO: 500
  subsp. japonica

SEQ ID NO: 2670 - protein, 172 aa, Oryza sativa
  subsp. japonica
MSNTRVFFDMTVGGAPAGRIVMELYAKDVPRTAENFRALCTGEKGVGKSGKPLHYKGSTFHRVIPEFMCQGGDFTRGNGTGGESIYGEKFADEVFKFKHDSPGILSMANAGPNTNGSQFFICTVPCSWLDGKHVVFGRVVEGMDVVKAIEKVGSRGGSTAKPVVIADCGQLS

SEQ ID NO: 2671 - protein, 190 aa, Oryza sativa
  subsp. japonica
MKTILASETMEIPEGVTVQVAAKVVTVEGPRGKLTRNFKHLNLDFQLLEGGRKLQVDAWFGTRRTMAAIRTAISHVQNLITGVTKGYRYKMRFVYAHFPINASITNSNTAIEIRNFLGEKKVRKVDMLEGVTILRSEKVKDELVLDGNDIELVSRSAALINQKCHVKNKDIRKFLDGIYVSDKGTITEDA

SEQ ID NO: 2672 - protein, 199 aa, Oryza sativa
  subsp. japonica
MAEVELPQQEVKLFSRWSFEDVQVNDISLADYLAVNPTKHATYLPHTAGRYSAKRFRKAQCPIVERLTNSLMMHGRNNGKKIMAVRIVKHAMEIIHLLTDANPIQVIVDAIINSGPREDATRIGSAGAVRRQAVDISPLRRVNQAIYLLTTGARESAFRNIKTIAECLADELINAAKGSSNSYAIKKKDEIERVAKANR

SEQ ID NO: 2673 - protein, 216 aa, Oryza sativa
  subsp. japonica
MAAPPARARADYDYLIKLLLIGDSGVGKSCLLLRFSDGSFTTSFITTIGIDFKIRTIELDGKRIKLQIWDTAGQERFRTITTAYYRGAMGILLVYDVTDESSFNNIRNWIRNIEQHASDNVNKILVGNKADMDESKRAVPTAKGQALADEYGIKFFETSAKTNLNVEQVFFSIARDIKQRLAETDSKPEDKTIKINNKTDQGADKPAASGSACCGS

SEQ ID NO: 2674 - protein, 240 aa, Oryza sativa
  subsp. japonica
MAAPFALVSRVSPAARLPIRAAWRRARPTVGLPSSGRARQLAVASAAQENRDNTAVDVHVNQDGGNQQGNAVQRRPRRSSALDGISPFGLVDPMSPMRTMRQMLDTMDRIFDDVALGFPATPRRSLATGEVRMPWDVMEDDKEVRMRFDMPGLSREEVKVMVEDDALVIRGEHKKEEGEGAEGSGDGWWKERSVSSYDMRLALPDECDKSKVRAELKNGVLLVTVPKTEVERKVIDVQVQ

SEQ ID NO: 2675 - protein, 264 aa, Oryza sativa; identical to SEQ ID NO: 611
  subsp. japonica

SEQ ID NO: 2676 - protein, 265 aa, Oryza sativa
  subsp. japonica
MAAGPRGRLLLVALVSAAAVVAGALLPGCAAAAAAGEKVPLALYYETLCPYCSRFIVNHLAGIFEDGIVDAVDLRLVPYGNAHVVGANNTISCQHGSEECFLNTVEACAIDAWPDLRVHFRFIYCVEDLVVNHKQREWESCFGKLNLDPKPVTDCYKGERGHQLSLKYGRQTDALQPPHKYVPWVVVDGQPLYEDYENFEAYICKAYKGHPPKVCEGLARPPTPTVLEVAEAVNRVSYYDSGDIRLKPDEDGHAKIKKVVPDDDD

SEQ ID NO: 2677 - protein, 265 aa, Oryza sativa
  subsp. japonica
MARGLKKHLKRLNAPKHWMLDKLGGAFAPKPSSGPHKSRECLPLILIIRNRLKYALTYREVISILMQRHVLVDGKVRTDKTYPAGFMDVISIPKTGENYRLLYDTKGRFRLQSVKDEDAKFKLCKVRSVQFGQKGIPYLNTYDGRTIRYPDPIIKANDTIKIDLETNKIVDFIKFDVGNVVMVTGGRNTGRVGVIKNREKHKGSFETIHVEDALGHQFATRLGNVFTIGKGNKPWVSLPKGKGIKLSIIEEQRKRDAAAQAAANA

SEQ ID NO: 2678 - protein, 310 aa, Oryza sativa
  subsp. japonica
PPLHVATATSRSHRSLKRLRALHRESSVFRSFGPRQAEAEGCRGQRRPRPGATATAPAPKPRARRGRLTGGSGVEAKDSLTIVALQSPVTVERPVRGDLEEHVPKPYLARALAAPDIYHPDGTTTDDHEHHHLSVLQQHVAFFDRDDNGIIYPWETYEGCRALGFNMIMSFLIALVVNVSMSYPTLPGWLPSPFFPIYIHNIHRSKHGSDSGTYDNEGRFMPVNFENIFSKYARTSPDRLTYREVWQMTEGNREVLDLFGWFAAKLEWTILYVLARDEEGYLAREAIRRMYDGSLFEYVAMQREQHAKMS

SEQ ID NO: 2679 - protein, 354 aa, Oryza sativa
  subsp. japonica
MCVEELEGAERLDFGGVAELETTPADFEMEKVCENTVSLDFKQARSSSFVPVIRSGDWSDIGGRDYMEDAHVCISDLANNFGHNSVDDEIISFYGVFDGHGGKDAAHYVRDNLPRVIVEDADFPLELEKVVRRSFVQTDSQFAERCSHQNALSSGTTALTAMIFGRSLLVANAGDCRAVLSRRGTAIEMSKDHRTCCLNERKRIESLGGYVDDGYLNGQLAVTRALGDWHLEGLKEVGEPGGPLSAEPELKMITLTKEDEFLIIGSDGIWDFFSNQNAVDFTRKRLQEHNDLRLCCKQIVEEAIRRGASDNLTAVMVSFHQEAPPQLRVNRTGRVERSISAEGLHSLRVLLEGQ

SEQ ID NO: 2680 - protein, 488 aa, Oryza sativa
  subsp. japonica
MSLSTVNHAAAAAAAAAGPGKSFSAAAPAAPSVRLPRTRAPAAAAVSAAAVGADRAADRVSALSQVSGVLGSQWGDEGKGKLVDVLAPRFDIVARCQGGANAGHTIYNSEGKKFALHLVPSGILHEGTLCVVGNGAVIHVPGFFNEIDGLESNGVNCNGRILVSDRAHLLFDLHQAVDGLREAELANSFIGTTKRGIGPCYSSKVTRNGLRVCDLRHMDTFGDKLDVLFKDATSRFEGFEYSKSMLREEVERYKRFAERLEPFIADTVHLLNESIQQKKKILVEGGQATMLDIDFGTYPFVTSSSPSAGGICTGLGIAPRCIGDLIGVVKAYTTRVGSGPFPTELFGEEGDLLRKSGMEFGTTTGRPRRCGWLDIVALKYCCEINGFSSLNLTKLDVLSGLPEVKLGVSYNQPDGQKLQSFPGDLDTLEQVQVKYEVLPGWQSDISSVRSYSELPLAAQRYVERIEELVGVPVHYIGVGPGRDALIYK

SEQ ID NO: 2681 - protein, 534 aa, Oryza sativa
  subsp. japonica
MLRAALLRSGSGLRRPPMAAPLSTAAAASWLSDSASSPPRVRLLIGGEFVESRADEHVDVTNPATQEVVSRIPLTTADEFRAAVDAARTAFPGWRNTPVTTRQRIMLKYQELIRANMDKLAENITTEQGKTLKDAWGDVFRGLEVVEHACGMGTLQMGEYVSNVSNGIDTFSIREPLGVCAGICPFNFPAMIPLWMFPIAVTCGNTFVLKPSEKDPGAAMMLAELAMEAGLPKGVLNIVHGTHDVVNNICDDEDIKAVSFVGSNIAGMHIYSRASAKGKRVQSNMGAKNHAIILPDADRDATLNALIAAGFGAAGQRCMALSTAVFVGGSEPWEDELVKRASSLVVNSGMASDADLGPVISKQAKERICKLIQSGADNGARVLLDGRDIVVPNFENGNFVGPTLLADVKSEMECYKEEIFGPVLLLMKAESLDDAIQIVNRNKYGNGASIFTTSGVSARKFQTDIEAGQVGINVPIPVPLPFFSFTGSKASFAGDLNFYGKAGVQFFTQIKTVTQQWKESPAQRVSLSMPTSQK

SEQ ID NO: 2682 - protein, 577 aa, Oryza sativa
  subsp. japonica
MYRAAASLASKARQAGSSARQIGSRLALHRNYAAKDIKFGVEARALMLRGVEELADAVKVTMGPKGRTVVIEQSFGAPKVTKDGVTVAKSIEFSNRVKNVGASLVKQVANATNDTAGDGTTCATVLTKAIFAEGCKSVAAGMNAMDLRRGISMAVDEVVTNLKGMARMISTSEEIAQVGTISANGEREIGELIAKAMEKVGKEGVITITDGNTLYNELEVVEGMKLDRGYISPYFITNQKNQKCELDDPLILIHDKKVSNLHAVVKVLELALKKQRPLLIVAEDVESEALGTLIINKLRAGIKVCAVKAPGFGESRKANLQDLAILTGGEVITEELGMNLENFEPQMLGTCKKVTVSKDDTVILDGAGDKKAIEERAEQLRSAIELSTSDYDKEKLQERLAKLSGGVAVLKIGGASEAEVGEKKDRVTDALNATKAAVEEGIVPGGGVALLYASKDLDKLQTANFDQKIGVQIIQNALKTPVHTIASNAGVEGSVIIGKLLEQDNTDLGYDAAKGEYVDMVKSGIIDPLKVIRTALVDAASVSSLMTTTESIIVEIPKEEEAAAAAPAMGGMGGMGF

SEQ ID NO: 2683 - protein, 584 aa, Oryza sativa
  subsp. japonica
MATMPSTCASSSSLFLLLRRDRRSSRSASLPGPARRLGVVRASAKEIAFDQGSRSSLQAGVEKLAAAVAVTLGPRGRNVVLDEFGSPKVVNDGVTIARAIELADPMENAGAALIREVASKTNDSAGDGTTTASVLAREIIKLGLLSVTSGANPVSIKKGIDKTVHSLVEELEKKSRPVKGSGDIKAVAAISAGNDDFVGTMIAEAIDKVGPDGVLSIESSSSFETTVEVEEGMEIDRGYISPQFVTNPEKSLVEFENARILVTDQKISSIKEIIPLLEQTTQLRAPLLIIAEDVAGEALATLVVNKLRGILNVAAIKAPGFGERRKALLQDIAIVTGAEFQAKDLGLLVESTTVEQLGIARKVTISQSSTTIIADVATKDEIQARIAQLKRELSQTDSAYDSEKLAERIAKLSGGVAVIKVGAATETELEDRKLRIEDAKNATFAAIEEGIVPGGGAAYVHLSKFVPAIKEKLDDPEERLGADIIQKALVAPAALIAHNAGVEGEVIVEKIKESEWEVGYNAMADRHENLVQAGVIDPAKVTRCALQNAASVAGMVLTTQAIVVEKPKKKASAASGAPEGSLAM

SEQ ID NO: 2684 - protein, 537 aa, Oryza sativa
  subsp. japonica
MVGGRALLPLLLLSALLVQIRASDPLFYEPFDESFEGRWVLSGKDDYKGVWKHEKSDGHEDYGLLVSEKAKKYAIIKELDEPVTLKDGTVVLQFEVRLQNGLECGGAYLKYIRPQDAAWDAKEFDNETPYTIMFGPDKCGSTNKVHFILKHKNPKTGKYVEHHLKFPPSVPYDKLSHVYTAILKPDNEVRILVDGEEKKKANFLSADDFEPSLIPSKTIPDPDDKKPEDWDERAKIPDPDAVKPDDWDEDAPMEIEDEEATKPEGWLDDEPEEIDDPEANKPEDWDDEEDGEWEAPKIDNPKCEEAPGCGEWKRPMKQNPAYKGKWHAPLIDNPNYKGIWKPQEIPNPEYFELDKPDSDPIAAIGIEIWTMQDGILFDNILIADDEKVATSILEKSWKPKYEVEKEKEKAEEAAAAAGDGLSEFQKKIFDVLYKLADIPFLEPYKTKIIDVIEKGEKQPNITIGILVSIVVVFVTVLFRILFGGKKPAAPVKPVAEVKKPKSTESEAAGSSGGKEDEKEEEEKDGAAAPRRRSRRET

SEQ ID NO: 2685 - protein, 613 aa, Oryza sativa
  subsp. japonica
MAAPSQTTATTTHHRVLLPSHHHHRAVPPSLLRLPLRAARRGRLSAAAAAAAPAASTAAPSEPAAGAVPGKPTVLVAEKLGAAGLELLRGFANVDCSYGLSPEELRAKIPLCDALIVRSGTKVGRDVFEASGGRLRVVGRAGVGIDNVDLAAATEHGCLVVNAPTANTVAAAEHGIALLTAMSRNIAQADASLKAGKWQRNKYVGVSLVGKTIAILGFGKVGSEVARRAKGLGMHVIAHDPYASADRAHAIGVELVSMEDALTTADFISLHMPLTPATNKMLNDETFAKMKKGVRIINVARGGVIDEDALVRALDSGIVAQAALDVFTKEPPAPDSKLVLHENVTVTPHLGASTVEAQEGVAIEIAEAVIGALKGELAASAVNAPMVPAEVLSELAPYVVLAEKLGRLAVQLVAGGGGIKSVKVTYASARAPDDLDTRLLRAMITKGLIEPISSVFVNLVNADFTAKQRGVRITEERILLDGSPETPIDYIQVHIAHVESKFPSAISESGEITVEGKVKDGIPHLTKVGSFQVDVSLEGSLILCRQVDQPGMIGAVGSVLGEENVNVSFMSVGRIAPRKHAVMAIGVDEEPKKSTLTKIGEIPAIEEFVFLKL

SEQ ID NO: 2686 - protein, 622 aa, Oryza sativa
  subsp. japonica
MGSVAMDSDYGVPRELSALQKARALYRPDLPPCLQGTTVKVEYGDAAIAADVAGAHVISHAFPHTYGQPLAHFLRKTAAVPDATVITEHPVVRVGVVFSGRQSPGGHNVIWGLHDAIKAHNANSKLIGFLGGTDGLFAQKTLEISDEVLSSYKNQGGYDLLGRTRDQIRTTEQVNAAMTACQALKLDALVIIGGVTSNTDAAQLAETFAESKCSTKVVGVPVTLNGDLKNQFVETTVGFDTICKVNSQLISNVCTDALSAEKYYYFVRLMGRKASHVALECALQSHPNMVILGEEVAASKLTIFDITKQICDAVQARAEKDKNHGVVLIPEGLVESIPELYALLQEIHGLHDKGVSVENISSHLSPWASALFEFLPPFIRKQLLLHPESDDSAQLSQIETEKLLAQLVEAEMNKRLKEGTYKGKKFNAICHFFGYQARGALPSKFDCDYAYVLGHVCYHILAAGLNGYMATVTNLRSPVNKWKCGAAPITSMMTVKRWSRGPAASQIGKPAVHMASIDLKGKPYELLRQNSSSFLMEDIYRNPGPLQFEGPGGETKPISLCVEDRDYMGRIKQLQEYLEKVKSIVKPGCSQDVLKAALSAMASVTEMLTIMSSPSFSGQATI

SEQ ID NO: 2687 - protein, 810 aa, Oryza sativa
  subsp. japonica
MRKWALSSALLLLLLTTLPDPAKKLQVNADDSTDELVDPPKVEEKIGGVPHGLSTDSEVVQREAESISRKTLRSSAEKFEFQAEVSRLMDIIINSLYSNKDIFLRELISNASDALDKIRFLALTDKEVLGEGDTAKLEIQIKLDKEKKILSIRDRGIGMTKEDLIKNLGTIAKSGTSAFVEKMQTGGDLNLIGQFGVGFYSVYLVADYVEVISKHNDDKQHVWESKADGSFAISEDTWNEPLGRGTEIRLHLRDEAKEYVEEDKLKDLVKKYSEFINFPIYLWATKEVDVEVPADEDESSESSEEEESSPESTEEEETEESEEKKPKTKTVKETTTEWELLNDVKAIWLRSPKEVTEEEYTKFYHSLAKDFGDDKPLSWSHFTAEGDVEFKALLFVPPKAPHDLYESYYNSNKSNLKLYVRRVFISDEFDELLPKYLSFLKGLVDSDTLPLNVSREMLQQHSSLKTIKKKLIRKALDMIRKLAEEDPDEYSNKDKTDEEKSAMEEKKGQYAKFWNEFGKSVKLGIIEDATNRNRLAKLLRFESTKSEGKLASLDEYISRMKPGQKDIFYITGSSKEQLEKSPFLERLTKKNYEVIYFTDPVDEYLMQYLMDYEDKKFQNVSKEGLKLGKDSKLKDLKESFKELTDWWKKALDTESVDSVKISNRLSDTPCVVVTSKYGWSANMEKIMQSQTLSDASKQAYMRGKRVLEINPRHPIIKELRDKVAQDSESESLKQTAKLVYQTALMESGFNLPDPKDFASSIYRSVQKSLDLSPDAAVEEEEEVEEAEVEEKESSNIKEEAEPSSYDKDEL

SEQ ID NO: 2688 - protein, 955 aa, Oryza sativa
  subsp. japonica
MSVSMKDLDPAFRGAGQKEGLEIWRIENFKPVPIPASSYGKFFMGDSYIILKTTALKNGSLRHDIHYWIGKDTSQDESGTAAILTVELDAALGGRAVQYREIQGNETDKFLSYFRPCIMPQPGGVASGFKHVEVNEQEHETRLYVCTGNRVVHVKEVPFARSSLNHDDIFILDTKSKIFQFNGSNSSIQERAKALEVVQYIKDTFHEGKCEVAAVEDGRLMADAEAGEFWGFFGGFAPLPRRAPVEDNEKYEETVFKLLCFNQGKLEPINYESLLHELLKTNKCYLLDCGVELFVWMGRTTSLQERKSASEAAEKLLSDDNRTKTHVIKVIEGFETVMFKSKFKEWPQTPDLKLSSEDGRGKVAALLKRQGLNVKGLMKAAPAKEEPQAYIDCTGSLQVWRINDKDKILLPSADQSKFYTGDCYIFQYMYPGDDKEECLIGSWFGKKSIEEDRVTAISLASKMVESAKFQAVQTRLYEGKEPIQFFVIFQSFQVFKGGLSSGYKKFIAENGIDDDTYLEDGLALFRIQGSGPENMQAIQVDAAASSLNSSYSYILHDGNTVFTWTGNLTTSLDQEVVERQLDIIKPNSQSRSQKEGSETDQFWSLLGGKSEYPSQKIGRANESDPHLFSCILPKGNLKIKEIYHFTQDDLMTEDVFILDCHSDIFVWVGQQVDVKVRLQALDIGEKFVKLDFLMENLSSDTPIFVIMEGSEPTFFTRFFTWDSAKSLMHGNSYQRKLSIVKGGGSPALDKPKRRTPTYSGRSTVQDKSQRSRSMSFSPERVRVRGRSPAFTALAANFESANSRNLSTPPPVVKKLYPKSATPDSSSAPSKSSATASLTGSFDRPKSVKDGSELEKPKQEEDAKEGINTMTSRVESLTINEDVKENEPEDDEGLPVYPYDRLITTAADPVTEIDVTRRETYLSSAEFKDKFGMTKEAFSKLPKWKQNRMKIALQLF

SEQ ID NO: 2689 - protein, 1790 aa, Oryza sativa
  subsp. japonica
MEMALRPQSLLCPRSRLKVVIRPASSASGGGLAQYFLMTRRYTGSRIVRCMVSSSDCPNRKAKRTISLHTEVASSRGYAPRIAAESSIQEREHINSDEETFDTYNRLLRNESTEWKKLDTTEVDLSQDVSSSSMRKVDATDEAKLDILEDDLPRNLLNGVTMGEVDMLDEAGAEDDVFEVDLSALHNSTVGKMDAVNEVGTENDLFEVDLSALHSAAVGKVDVVDGAKAKEDLFEMDSLALHSVTMGKVDAINAAGAEGDKFEVDLSALASNNSMIEAVNVMDEAKAIEDTLEVDLSGNATSSSTYGEVKFEVDSLGNTSSTVMYGPADGAYEPRSDEVTFKVDSSENASNNVMYGRADVVDESWADEGIFEVDFFTNASSGAEYGKVDVVDEAKTDDFTFEIDSLEKDSNNKMHGKAHMVDEAWDDEAIFEVDLFGNASSIPIYGEVNVLDEARADDGKFEVDLLGNTSSNSTHEEVDVVDEAQTGEATFEVDLLGNALSSAIYKEVPVMGGAQDDEVDVDFSINASITETEKEADAVDEARVEDETFDMDLVGKQISIDSMNDDVVEEGTKHHRYPMLSSAFIEVKTIHETPVSLKPELMSVVMDQEQDKPISSVYQQEGSIFNLHAENQSTVDFHEREQMAITFDKQKESVAKLSKEDQQTAGLPEQNMSFDGVHRKSQSIIGLPFQHQSIVSSPEKYRSIVGFHGQNQSIISSHKQDKSIVGVPKKIQSIVGSTKHDDSIVGFRKQDRSIVSVPEQKQSIVGFHKQDLSIVAVSEQNLSIVAIPRESQSKQISIVRRHDPLHLKEVETKDRDGISKKSGGDDDLPHMLFEEELSQVEDVARAIAYKKQHEVDVISLTPDIQESPQDNIDPQELRRMLQELADQNCSMGNKLFVFPEAVKANSTIDVYLNRNLSALANEPDVHIKGAFNSWRWRPFTERLHKSELSGDWWSCKLHIPKEAYRLDFVFFNGRLVYDNNDSNDFVLQVESTMDEDSFEEFLVEEKKRELERVATEEAERRRHAEEQQRMGEQRAAEQAAREQAKKEIELKKNKLQNLLSSARTHVDNLWHIEPSTYRQGDTVRLYYNRNSRPLMHSTEIWMHGGCNSWTDGLSIVERLVECDDENGDWWYANVHIPEKAFVLDWVFADGPPGNARNYDNNGRQDFHAILPNAMTNEEYWVEEENCIYTRLLHEIREREEAIKIKVEKRAKMKSEMKEKTMRMFLLSQKHIVYTEPLEIRAGTTVDVLYNPSNTVLNGKPEVWFRWSFNRWMHPSGVLPPKKMVKTEDGCHLKATVSVPSDAYMMDFVFSESEEGGIYDNRNGTDYHIPVSGSNAKEPPIHIVHIAVEMAPIAKVGGLADVVTSLSRAIQELGHHVEVILPKYNFMNQSNVKNLHVRQSFSLGGTEIKVWFGLVEDLSVYFLEPQNGMFGGGWVYGGNDAGRFGLFCQSALEFLLQSGSSPHIIHCHDWSSAPVAWLYKEHYAESRLATARIIFTIHNLEFGAHFIGKAMTYCDKATTVSHTYSKEVAGHGAIAPHRGKFYGILNGIDPDIWDPYTDNFIPMHYTSENVVEGKNAAKRALQQRFGLQQTDVPIVGIITRLTAQKGIHLIKHALHRTLERNGQVVLLGSAPDPRIQSDFCRLADSLHGENHGRVRLCLTYDEPLSHLIYAGSDFILVPSIFEPCGLTQLVAMRYGSIPIVRKTGGLYDTVFDVDHDKDRARVLGLEPNGFSFDGADCNGVDYALNRQRAISSWFEARGWFHSLCKRVMEQDWSWNRPALDYIELYHSAHKF

SEQ ID NO: 2690 - protein, 96 aa, Oryza sativa; identical to SEQ ID NO: 530
  subsp. japonica

SEQ ID NO: 2691 - protein, 139 aa, Oryza sativa; identical to SEQ ID NO: 622
  subsp. japonica

SEQ ID NO: 2692 - protein, 130 aa, Oryza sativa
  subsp. japonica
MVRVSVLNDALKTMYNAEKRGKRQVLIRPSSKVIIKFLIVMQKHGYIGEFEFVDDHRSGKIVVELNGRLNKCGVISPRFDVGVKEIESWTARLLPSRQFGYIVLTTSAGIMDHEEARRKNVGGKVLGFFY

SEQ ID NO: 2693 - protein, 172 aa, Oryza sativa
  subsp. japonica
MADRDRAGQYYQQQRGQVGETVKGILPEKAPSASQALTVATLFPLGGLLLVLSGLALAASVVGLAVATPVFLIFSPVLVPAALLIGLAVAGFLTSGALGLGGLSSLTFLANTARQAFQRTPDYVEQARRRMAEAAAHAGHKTAQAGHAIQGRADQAGTGAGAGGGAGTKTSS

SEQ ID NO: 2694 - protein, 150 aa, Oryza sativa
  subsp. japonica
MKRNPRVTSSRRKCRKAHFTAPSSVRRVLMSAALSTELRHKYNVRSIPIRKDDEVQVVRGSYKGREGKVVQVYRRRWVIHVERITREKVNGSTVNVGIHPSKVVVTKLKLDKDRKAILDRKASGRAADKAKGKFTAEDVAAAGASLQEID

SEQ ID NO: 2695 - protein, 166 aa, Oryza sativa
  subsp. japonica
MPPKLDPTQVVDVFVRVTGGEVGAASSLAPKIGPLGLSPKKIGEDIAKETAKDWKGLRVTVKLTVQNRQAKVSVVPSAAALVIKALKEPERDRKKVKNIKHSGNISLDDVIEIARIMRNRSMAKEMAGTVKEILGTCVSVGCTVDGKDPKDLQQEISDGEVEIPSA

SEQ ID NO: 2696 - protein, 160 aa, Oryza sativa
  subsp. japonica
MSDSEEHHFESKADAGASKTYPQQAGTIRKNGYIVIKNRPCKVVEVSTSKTGKHGHAKCHFVAIDIFTAKKLEDIVPSSHNCDVPHVNRTEYQLIDISEDGFVSLLTENGNTKDDLRLPTDDNLLSQIKDGFGEGKDLVVTVMSAMGEEQICALKDIGPK

SEQ ID NO: 2697 - protein, 165 aa, Oryza sativa
  subsp. japonica
MAGGGRADDERRIGVAMDYSASSKRALDWAIANLLRRGDHLVVLHVLHHGGEEAKHALWGKSGSPLIPLSEFRDPTAMQQYGVHCDAEVLDMLDTAARQLELTVVAKLYWGDAREKLCDAVEEQKIDTLVMGSRGLGSIQRILLGSVTNYVLSNASCPVTVVKGK

SEQ ID NO: 2698 - protein, 182 aa, Oryza sativa
  subsp. japonica
MASEKKQSNPMREIKVQKLVLNISVGESGDRLTRASKVLEQLSGQSPVFSKARYTVRSFGIRRNEKIACYVTVRGEKAMQLLESGLKVKEYELLRRNFSETGCFGFGIQEHIDLGIKYDPSTGIYGMDFYVVLERAGYRVARRRRCKSRVGIQHRVTKEDAMKWFQVKYEGVILNKAQANTS

SEQ ID NO: 2699 - protein, 178 aa, Oryza sativa
  subsp. japonica
MGAFRFHQYQVVGRGLPTPTDEHPKIYRMKLWATNEVRAKSKFWYFLRKLKKVKKSNGQILAINEIFEKNPTTIKNYGIWLRYQSRTGYHNMYKEYRDTTLNGAVEQMYTEMASRHRVRFPCIQIIKTATVHFKLCKRDNTKQFHKSDIKFPLVYRKVRPPTRKLKTTFKASRPNLFM

SEQ ID NO: 2700 - protein, 192 aa, Oryza sativa
  subsp. japonica
MYTARKKIQKEKGLEPSEFEDSVAQAFFDLENGNQELKSELKDLYINNAVQMDIAGNRKAVVIHVPYRLRKAFKKIHVRLVRELEKKFSGKDVVIVATRRIVRPPKKGSAVQRPRTRTLTAVHDGILEDVVYPAEIVGKRIRYRLDGAKVIKIFLDPKERNNTEYKLETFSAVYRRLCGKDVAFEYPMTETA

SEQ ID NO: 2701 - protein, 195 aa, Oryza sativa
  subsp. japonica
MVHVSFYRNYGKTFKKPRRPYEKERLDAELKLVGEYGLRCKRELWRVQYALSRIRNNARHLLTLDEKNPRRIFEGEALLRRMNRYGLLADGQNKLDYVLALTVENFLARRLQTLVFKAGMAKSIHHARVLIRQRHIRVGRQIVNIPSFMVRVESEKHIDFSLTSPFGGGPPGRVKRKNQKKASGGGGDGEEEDEE

SEQ ID NO: 2702 - protein, 219 aa, Oryza sativa
  subsp. japonica
MAPTSKLSQGIKRASRSHTYHRRGLWAIKAKNGGTFPKAGKPAAAAEPKFYPADDVKPRAPSTRKANPTKLRSTITPGTVLILLAGRYMGKRVVFLKQLKSGLLLITGPFKINGVPIRRVNQAYVIATSTKVDISGVKVDKFDDKYFARDKKAKAKKTEGELFETEKEATKNLPDFKKDDQKAVDAELIKAIEVVPDLKSYLGARFSLRDGDKPHEMTF

SEQ ID NO: 2703 - protein, 257 aa, Oryza sativa; identical to SEQ ID NO: 649
  subsp. japonica

SEQ ID NO: 2704 - protein, 261 aa, Oryza sativa; identical to SEQ ID NO: 612
  subsp. japonica

SEQ ID NO: 2705 - protein, 261 aa, Oryza sativa
  subsp. japonica
MAACCSSLATAVSSSSAKPLAGIPPAAPHSLSLPRAPAARPLRLSASSSRSARASSFVARAGGVDDAPLVGNKAPDFDAEAVFDQEFINVKLSDYIGKKYVILFFYPLDFTFVCPTEITAFSDRYDEFEKLNTEILGVSIDSVFSHLAWVQTDRKSGGLGDLKYPLISDVTKSISKSFGVLIPDQGIALRGLFIIDKEGVIQHSTINNLAIGRSVDETMRTLQALQYVQDNPDEVCPAGWKPGDKSMKPDPKGSKEYFAAI

SEQ ID NO: 2706 - protein, 270 aa, Oryza sativa
  subsp. japonica
MFRNQYDTDVTTWSPAGRLFQVEYAMEAVKQGSACVGLRSRTHAVLAAANKAASELSSHQRKVFRVADHAGVALAGLTADGRVLSRFLRSECINHAFVYDAPLPVSRLALRLADKAQVCTQRSWKRPYGVGLLVAGLDESGAHLYYNCPSGNYFEYQAFAIGSRSQAAKTFLERRFEGYNDYTPEQLIKDALSAIKETLQGEKLTSSNCTVAIVGRKDDGTVEPFEMIDVKRIQEIIDSMEAAEEAPAAEAESSSMQEEDKGTDAAPMDI

SEQ ID NO: 2707 - protein, 290 aa, Oryza sativa
  subsp. japonica
MGKDEVMESGGAAGEFAAKDYTDPPPAPLIDAAELGSWSLYRAVIAEFIATLLFLYITVATVIGYKHQTDASASGADAACGGVGVLGIAWAFGGMIFILVYCTAGISGGHINPAVTFGLFLARKVSLVRAILYIVAQCLGAICGVGLVKAFQSAYFNRYGGGANTLAAGYSKGTGLAAEIIGTFVLVYTVFSATDPKRNARDSHVPVLAPLPIGFAVFMVHLATIPITGTGINPARSIGAAVIFNNEKAWHNHWIFWVGPFVGAAIAAFYHQYILRAGAIKALGSFRSNA

SEQ ID NO: 2708 - protein, 360 aa, Oryza sativa
  subsp. japonica
CVAVGLWAGLIIGFVTEYYTSNAYSPVQDVADSCRTGAATNVIFGLALGYKSVIIPIFAIAFSIFLSFSLAAMYGVAVAALGMLSTIATGLAIDAYGPISDNAGGIAEMAGMSHRIRERTDALDAAGNTTAAIGKGFAIGSAALVSLALFGAFVSRAAISTVDVLTPKVFIGLIVGAMLPYWFSAMTMKSVGSAALKMVEEVRRQFNTIPGLMEGTTKPDYATCVKISTDASIKEMIPPGALVMLTPLIVGILFGVETLSGVLAGALVSGVQIAISASNTGGAWDNAKKYIEAGASEHARTLGPKGSDPHKAAVIGDTIGDPLKDTSGPSLNILIKLMAVESLVFAPFFATHGGILFKLF

SEQ ID NO: 2709 - protein, 379 aa, Oryza sativa
  subsp. japonica
MATAGKVIKCKAAVAWEAAKPLVIEEVEVAPPQAMEVRVKILFTSLCHTDVYFWEAKGQTPVFPRIFGHEAGGIVESVGEGVTDLAPGDHVLPVFTGECKECAHCKSAESNMCDLLRINTDRGVMIGDGKSRFSINGKPIYHFVGTSTFSEYTVMHVGCVAKINPAAPLDKVCVLSCGISTGLGATINVAKPPKGSTVAIFGLGAVGLAAAEGARIAGASRIIGIDLNANRFEEARKFGCTEFVNPKDHDKPVQQVLAEMTNGGVDRSVECTGNINAMIQAFECVHDGWGVAVLVGVPHKDAEFKTHPMNFLNERTLKGTFFGNYKPRTDLPNVVELYMKKELEVEKFITHSVPFSEINTAFDLMHKGEGIRCIIRMEN

SEQ ID NO: 2710 - protein, 364 aa, Oryza sativa
  subsp. japonica
MAGTVTVPSASVPSTPLLKDELDIVIPTIRNLDFLEMWRPFFQPYHLIIVQDGDPTKTIRVPEGFDYELYNRNDINRILGPKASCISFKDSACRCFGYMVSKKKYVFTIDDDCFVAKDPSGKDINALEQHIKNLLSPSTPFFFNTLYDPYREGADFVRGYPFSLREGAKTAVSHGLWLNIPDYDAPTQMVKPRERNSRYVDAVMTVPKGTLFPMCGMNLAFDRDLIGPAMYFGLMGDGQPIGRYDDMWAGWCMKVICDHLSLGVKTGLPYIWHSKASNPFVNLKKEYKGIFWQEDIIPFFQNATIPKECDTVQKCYLSLAEQVREKLGKIDPYFVKLADAMVTWIEAWDELNPSTAAVENGKAK

SEQ ID NO: 2711 - protein, 396 aa, Oryza sativa
  subsp. japonica
MALRPNDVTLRLTPPLAAAARRNRRAAAGGVRVYAVASGAVSTKVENKKPFAPPREVHVQVTHSMPPQKIEIFKSLDDWARDNILSHLKPVEKCWQPQDFLPDPASDGFHDEVKELRERAKEIPDDYFVCLVGDMITEEALPTYQTMLNTLDGVRDETGASPTAWAVWTRAWTAEENRHGDLLNKYLYLTGRVDMRQIEKTIQYLIGSGMDPRTENNPYLGFIYTSFQERATFISHGNTARHAKDFGDLKLAQICGIIASDEKRHETAYTKIVEKLFEIDPDGTVLAFADMMKKKISMPAHLMFDGEDDKLFEHFSMVAQRLGVYTAKDYADILEFLVSRWKISDLTGLSSEGNKAQDYLCTLAARIRRLDERAQSRAKKAGTLPFSWVYGREVQL

SEQ ID NO: 2712 - protein, 432 aa, Oryza sativa
  subsp. japonica
MTGAVSKLAAPRPAAAAPLPPASVRSAFLASAPSPRRFSVSIAAGRARSPIIAMASAKEGNGAPTKRTTLHDLYDLQGQSPWYDNLCRPVTDLLPLIGSGVRGVTSNPSIFQKAISTSNAYDDQFKQLILAGKDAESAYWELVIKDIQDACKLFEPIYDQTDGADGYVSVEVSPRLANDTQGTVEAAKWLHKVVDRPNVYIKIPATAECVPSIKEVIANGISVNVTLIFSIARYEAVIDAYIDGLEASGLSDLSRVTSVASFFVSRVDTLIDKMLEKIGTPEALALRGKAAVAQAKLANQLYQKKFSGPRWEALVKKGAKKQRLLWASTSVKNPAYPDTLYVDPLIGPDTVSTMPDQALLAFIDHGTVSRTIDANVSDAEGVYSALEKLGIDWDEVGKQLELEGVDSFKKAFDSLLGSLEEKGNSLKKTVSL

SEQ ID NO: 2713 - protein, 441 aa, Oryza sativa; identical to SEQ ID NO: 846
  subsp. japonica

SEQ ID NO: 2714 - protein, 445 aa, Oryza sativa
  subsp. japonica
MDEEYDVIVLGTGLKECILSGLLSVDGLKVLHMDRNDYYGGDSTSLNLNQLWKRFRGEDKPPAHLGSSKDYNVDMVPKFMMANGTLVRTLIHTDVTKYLSFKAVDGSYVFSKGKIHKVPATDMEALKSPLMGLFEKRRARNFFIYVQDYNEADPKTHQGLDLTTMTTRELIAKYGLSDDTVDFIGHALALHRDDRYLNEPAIDTVKRMKLYAESLARFQGGSPYIYPLYGLGELPQGFARLSAVYGGTYMLNKPDCKVEFDMEGKVCGVTSEGETAKCKKVVCDPSYLPNKVRKIGKVARAIAIMSHPIASTNDSHSVQIILPQKQLGRKSDMYVFCCSYTHNVAPKGKFIAFVSTEAETDNPQSELKPGIDLLGQVDELFFDIYDRYEPVNEPSLDNCFVSTSYDATTHFETTVTDVLNMYTLITGKAVDLSVDLSAASAAEEY

SEQ ID NO: 2715 - protein, 482 aa, Oryza sativa
  subsp. japonica
MAAAANGAACCGGATGPGYATPLEAMEKGPREKLLYVTCVYNGTGINKPDYLGTVDVDPNSPTYSQVIHRLPVTHVGDELHHSGWNACSSCHGDPSASRRFLILPSLLSGRVYVVDTLKDPRAPALHKVVEAEDIAEKTGLGFPHTSHCLASGEIMISCLGDKEGNAAGNGFLLLDSEFNVKGRWEKPGHSPLFGYDYWYQPRHKTMISSSWGAPAAFRTGFDLQHVQDGLYGRHLHVYDWPGGELKQTLDLGSTGLLPLEVRFLHDPSKDTGYVGCALTSNMVRFFKTADGSWSHEVAISIKPLKVRNWILPEMPGLITDFVISLDDRYLYLVNWLHGDIRQYNIEDPAKPVLAGQVWAGGLLQKGSEVVYVTEDDKEEQYSVPQVKGHRLRGGPQMIQLSLDGKRIYVTNSLFSRWDEQFYGQDLVKKGSHMLQIDVDTEKGGLSINPNFFVDFGAEPEGPSLAHEMRYPGGDCTSDIWI

SEQ ID NO: 2716 - protein, 511 aa, Oryza sativa
  subsp. japonica
MAAMDLRVAAPASVAAAARCGTSLARPWPARAVGGGGGGGGRGRRLSVRTSVATTEAAAAAVGASEDAALEARDSKTVVAVILGGGAGTRLFPLTKRRAKPAVPIGGAYRLIDVPMSNCINSGINKVYILTQFNSASLNRHLSRAYNFSNGVAFGDGFVEVLAATQTPGSEGKRWFQGTADAVRQFDWLFDDAKAKDIDDVLILSGDHLYRMDYMDFVQSHRQRGADISICCLPIDDSRASDFGLMKIDDTGRVIAFSEKPKGDDLKAMQVDTTVLGLPQDEAKEKPYIASMGVYIFKKEILLNLLRWRFPTANDFGSEIIPASAKEINVKAYLFNDYWEDIGTIKSFFEANLSLAEQPPRFSFYDANKPMYTSRRNLPPSMINNSKITDSIISHGCFLDSCRIEHSVVGIRSRIGSNVHLKDTVMLGADFYETDLERGELLAEGKVPIGIGENTKIQNCIIDKNARIGKNVTISNSEGVQEADRTSEGFYIRSGITIVLKNSIIADGLVI

SEQ ID NO: 2717 - protein, 548 aa, Oryza sativa
  subsp. japonica
PSSSLITPPIPSSSAAKHLASSAMATATASSLSLLFAHPHSSNPRPFAGGPHLRRPLRAAPHRARCASDAATTATRHRRPAEENIREEAARLRGPGNDFSAWYVPFPPTPEDDPDERYSLDEVVYRSSSGGLLDVCHDMEALARFPGSYWRDLFDSRVGRTAWPYGSGVWSKKEFVLPEIDSDHIVSLFEGNSNLFWAERLGREHLGGMTDLWVKHCGISHTGSFKDLGMTVLVSQVNRLRRAPLSRPINGVGCASTGDTSAALSAYCAAAGIPAIVFLPADRISLQQLIQPIANGATVLSLDTDFDGCMRLIREVTAELPIYLANSLNSLRLEGQKTAAIEILQQFDWQVPDWVIVPGGNLGNIYAFYKGFEMCRVLGLVDRVPRLVCAQAANANPLYRFYKSGWTDFQPRVAETTFASAIQIGDPVSVDRAVVALKATDGIVEEATEEELMDAMSLADRTGMFACPHTGVALAALFKLRDQRIIGPNDRTVVVSTAHGLKFTQSKIDYHDRNIKDMLCQYANPPINVKADFASVMDVLQNKLNGKI

SEQ ID NO: 2718 - protein, 542 aa, Oryza sativa
  subsp. japonica
VISLMQKPGATGGGTPVVDMESFFTSVIVPELQAPDWESEPMLKATVLRFLKEFKDQIPKATALALLPSVIRFLIHESNVVHSYAATFIENLLIIKDMVPVPSANVITRAPRYVAADINPYAQPIVQNLSKALSFPESYENPYLMKCLMRVLGIANIAGQIVHEITARLVGILMEVCNNPKNPDFNHYLFEALAAVIGRAGEQDPALLPVFEASLFPVLQRILVEDISEFWPYAFQIFAQLVNLSRPPLSQNYMQLFGVLLSNATWDRPPCVPALVRLLRAFLRKIPNELNQEGRLPNILVIFRSLLSRSSTEDSAFYMLNTLVENVSFDIMNPHINEIWSALFTRLQTRQAVKFVNSLVVFMSLVVVKYGPGVLVSSVDAIQPNIFMTILQRFWIPNLKFIKGTVEVKLTSVASTKLICESALLLDGAAAQTWGKLLDSIVALLSRTDQDGAQQDQNDGADADSQRTSGYSVSFVRLQYAGKSEDDLLKEVNDPKQFLVTSLATLSAQSPGRFGPIIEQNVDPANKGALIQLCAAYNTNIV

SEQ ID NO: 2719 - protein, 567 aa, Oryza sativa
  subsp. japonica
MAAAAVAANGGGDGAQASNAPAPTRLASVYSEVQTSRLKHALPLPSVLRSPFALADGPASSAAGNPGEIAKLFPNLFGQPSVSLVPSPEPASTRPLKVGVVLSGGQAPGGHNVICGIFDYLQEYAKGSVMYGFKGGPAGVMKCKYVELTADYVYPYRNQGGFDMICSGRDKIETPEQFKQAEDTVNKLDLDGLVVIGGDDSNTNACLLAEYFRGKNMKTRVIGCPKTIDGDLKCKEVPTSFGFDTACKIYSEMIGNVMTDARSTGKYYHFVRLMGRAASHITLECALQTHPNVALIGEEVAAKKETLKSVTDYITDIVCKRAELGYNYGVILIPEGLIDFIPEVQKLIAELNEILAHDVVDEAGAWKSKLQPESRQLFDFLPKTIQEQLLLERDPHGNVQVAKIETEKMLIAMVETELEKRKAEGKYPAHFRGQSHFFGYEGRCGLPTIFDSNYCYALGYGSGALLQCGKTGLITSVGNLAAPVEEWTVGGTALTSLMDVERRHGKYKPVIKKAMVELDGAPFKKFASLRDEWSLKNHYISPGPIQFSGPGSNDANHTLMLELGAEA

SEQ ID NO: 2720 - protein, 608 aa, Oryza sativa
  subsp. japonica
MATGQIFSKTTQALFYNYKQLPIQRMLDFDFLCGRETPSVAGIINPGSDGFQKLFFGQEEIAIPVHPTIEAACNAHPTADVFINFASFRSAAASSMSALKQPTIRVVAIIAEGVPESDTKQLISYARANNKVIIGPATVGGIQAGAFKIGDTAGTIDNIIQCKLYRPGSVGFVSKSGGMSNEMYNTIARVTDGIYEGIAIGGDVFPGSTLSDHILRFNNIPQVKMMVVLGELGGKDEYSLVEALKQGKVQKPVVAWVSGTCARLFKSEVQFGHAGAKSGGELESAQAKNQALKDAGAVVPTSYEALETAIKETFEKLVEDGKISPVTEITPPPIPEDLKTAIKSGKVRAPTHIISTISDDRGEEPCYAGVPMSTIIEQGYGVGDVISLLWFKRSLPRYCTQFIEMCIMLCADHGPCVSGAHNSIVTARAGKDLVSSLVSGLLTIGPRFGGAIDDAARYFKDAYDRNLTPYEFVEGMKKKGIRVPGIGHRIKSRDNRDKRVQLLQKYAHTHFPSVKYMEYAVQVETYTLSKANNLVLNVDGAIGSLFLDLLSGSGMFSKQEIDEIVEIGYLNGLFVLARSIGLIGHTFDQKRLKQPLYRHPWEDVLYTK

SEQ ID NO: 2721 - protein, 644 aa, Oryza sativa
  subsp. japonica
MATTAAAAAAALSAAATAKTGRKNHQRHHVLPARGRVGAAAVRCSAVSPVTPPSPAPPATPLRPWGPAEPRKGADILVEALERCGVSDVFAYPGGASMEIHQALTRSPVITNHLFRHEQGEAFAASGYARASGRVGVCVATSGPGATNLVSALADALLDSVPMVAITGQVPRRMIGTDAFQETPIVEVTRSITKHNYLVLDVEDIPRVIQEAFFLASSGRPGPVLVDIPKDIQQQMAVPVWDTSMNLPGYIARLPKPPATELLEQVLRLVGESRRPILYVGGGCSASGDELRWFVELTGIPVTTTLMGLGNFPSDDPLSLRMLGMHGTVYANYAVDKADLLLAFGVRFDDRVTGKIEAFASRAKIVHIDIDPAEIGKNKQPHVSICADVKLALQGLNALLQQSTTKTSSDFSAWHNELDQQKREFPLGYKTFGEEIPPQYAIQVLDELTKGEAIIATGVGQHQMWAAQYYTYKRPRQWLSSAGLGAMGFGLPAAAGASVANPGVTVVDIDGDGSFLMNIQELALIRIENLPVKVMVLNNQHLGMVVQWEDRFYKANRAHTYLGNPECESEIYPDFVTIAKGFNIPAVRVTKKSEVRAAIKKMLETPGPYLLDIIVPHQEHVLPMIPSGGAFKDMILDGDGRTVY

SEQ ID NO: 2722 - protein, 726 aa, Oryza sativa
  subsp. japonica
MAGAIRVTMEVGADGVAVVTICNPPVNALHPIIIQGLKEKYAEAMDRDDVKAIVLTGAGGKFCGGFDINVFTEVHKTGNVSLMPDVSVELVSNLMEAGKKPSVAAIQGLALGGGLELTMGCHARISTPEAQLGLPELTLGIIPGFGGTQRLPRLVGLPKAIEMMLQSKFITAKEGKEGGLVDALCSPDELIKMSRLWALEIANYRKPWIRSLARTDRLGSLSEARSVLNSARQQAKKVAANLPQHQACLDVMEEGVLCGGHAGVLKEAKVFKELVLSPTSKALVHAFFAQRLTTKVPGVTDVQLKPRKIRKVAVIGGGLMGSGIATALLVSNTSVVLKEVNPQFLQRGQKMIAANLEGLVKRGSLTKDKMNKAMSLLKGALDYSDFKDVDMVIEAVIEKIPLKQSIFSDLEKVCPPHCILATNTSTIDLNVVGEKTNSQDRIIGAHFFSPAHIMPLLEIVRTEKTSPQAILDLITVGKMIKKVPVVVGNCTGFAVNRTFFPYTQGSHLLVSIGIDVFRIDRVISSFGMPMGPFQLQDLAGYGVALAVKDIYAAAFGTRNLDSNLVDLMVQNGRQGKSNGKGYYLYEKGGKPKPDPSVQVVIDEYRRCAKTMPGGKPVTLSDQDILEMIFFPVVNEACRVMDENVVIRASDLDIASILGMGFPKFRGGLVFWADTIGAPYIHSKLSKWTEIYGDFFKPSSYLEDRAKRSLPLSAPNATQQASSRSRM

SEQ ID NO: 2723 - protein, 845 aa, Oryza sativa
  subsp. japonica
MSVVGFDLGNESCIVAVARQRGIDVVLNEESKRETPAIVCFGDKQRFIGTAGAASSTMNPKNSVSQIKRLLGRKYSDPELQRDIAAFPFRVSEGPDGFPLVHARYLGEERVFTPTQLMAMVLSNLKGIAESNLNTAVVDCCIGIPVYFTDLQRRAVLDAATIAGLCPLRLFHETTATALAYGIYKTDLPENDQLNVAFVDVGHASMQVCIAGYKKGQLKILSHAYDRSLGGRDFDEVLFKHFAAKFKDEYKIDVYQNARACIRLRVACEKLKKVLSANPESPMHIECLMDEKDVRGFIKREEFEKISASILERVKGPLEKALAEAGLTTENVHFVEVVGSGSRVPAIIKILTDFFGKEPRRTMNASECVARGCALECAILSPTFKVREFQVNDGFPFSIAMSWKPDSQNGDNQQTVVFPKGNPLPSVKALTFYRSNTFQVDVTYVDTGDLQISPKISTYTVGPFNPGKGDKAKLKVKVRLNIHGVVTVESATMLEEEEVEVPVAATTEPPKDSAKMETDDAPNEAASGTDVNMQEAKAPADAAADGAENGAPNSEEKSVPMETDAKVEPSKKKVKKTNVPVAELVYGALGTTELQKAVEKEYEMALQDRVMEETKDKKNAVESYVYDMRNKLYDKYNDFVTAEDKEAFIAKLQEVEDWLYEDGEDETKGVYVAKLEELKKVGGPIEARYKEWMDRGPSIDQLAYCINSFRDAALSKDPKFDHIEMEEKQKVINQCSEAEVWLREKIQQQDALPKHANPVLLSSDLKKKAETVDRFCKPIMMKPKPAPKPQTPPQTPPTETPAGGAQTPEQQPQGAEAAGEASEGGASESTGEQMETDKPEGTEAA

SEQ ID NO: 2724 - protein, 872 aa, Oryza sativa
  subsp. japonica
MSLDITQVLLSAQSPDGATRKLAEESLKQFQEQNLPGFLFSLSNELANEEKPEESRRLAGLILKNALDAKEQHRKNELFQRWLALDVGVKAQIKGFLLQTLSSPVASARSTSSQVIAKVAGIEIPQKQWPELIASLLSNIHQVQPNVKQATLETLGYLCEEVSPEAVDQDQVNKILTAVVQGMNASEGNSDVRLAATRALYNALGFAQVNFSNDMERDYIMRVVCEATQSTDVKIRQAAFECLVAISSTYYDKLATYMQDIFNITAKAVRGDEESVALQAIEFWSSICDEEIDILDEYSSEFTADSDVPCYYFIKQALPALVPMLLETLLKQEEDQDLDEGAWNLAMAGGTCLGLVARTVGDDIVPLVMPFVEENITKPDWRHREAATYAFGSILEGPSADKLAPLVNVALNFMLSALVNDPSNHVKDTTAWTLGRIFEFLHGSALETAPIITSENCQQILTVLLQSMKDVPNVAEKACGALYFLAQGYVDAGSASPLTPFFQDIIQSLLFVTHREDAGESRLRTAAYETLNEVVRCSIEETGPIVMQLVPVIMMELHQTLEAGKLSTDEREKRSELQGLLCGCLQVIIQKLGAMESTKYSFLQYADQMMELFLRVFACRNATVHEEAMLAIGALAYAAGPNFSKYMPQFYQYLEMGLQNFEEYQVCAITVGVVGDLCRALEDKILPYCDGIMTQLLKDLSSNQLHRSVKPPIFSCFGDIALAIGENFEKYLIYAMPMLQSAADLSAHAAAADDEMLDYTNQLRNGILEAYSGILQGFKSSPKTQLLMQYAPNILNFLDALYNGKDMDDTVMKTAIGVLGDLADTLGVHAGPLINQSISSKKFLEECLASDDPLVKESADWARVAISRAVSG

SEQ ID NO: 2725 - protein, 457 aa, Solanum lycopersicum
MVIQRNSILLLIIIFASSISTCRSNVIDDNLFKQVYDNILEQEFAHDFQAYLSYLSKNIESNNNIDKVDKNGIKVINVLSFGAKGDGKTYDNIAFEQAWNEACSSRTPVQFVVPKNKNYLLKQITFSGPCRSSISVKIFGSLEASSKISDYKDRRLWIAFDSVQNLVVGGGGTINGNGQVWWPSSCKINKSLPCRDAPTALTFWNCKNLKVNNLKSKNAQQIHIKFESCTNVVASNLMINASAKSPNTDGVHVSNTQYIQISDTIIGTGDDCISIVSGSQNVQATNITCGPGHGISIGSLGSGNSEAYVSNVTVNEAKIIGAENGVRIKTWQGGSGQASNIKFLNVEMQDVKYPIIIDQNYCDRVEPCIQQFSAVQVKNVVYENIKGTSATKVAIKFDCSTNFPCEGIIMENINLVGESGKPSEATCKNVHFNNAEHVTPHCTSLEISEDEALLYNY

SEQ ID NO: 2726 - protein, 377 aa, Solanum lycopersicum
MADAEDIQPLVCDNGTGMVKAGFAGDDAPRAVFPSIVGRPRHTGVMVGMGQKDAYVGDEAQSKRGILTLKYPIEHGIVSNWDDMEKIWHHTFYNELRVSPDEHPVLLTEAPLNPKANREKMTQIMFETFNVPAMYVAIQAVLSLYASGRTTGIVLDSGDGVSHTVPIYEGYALPHAILRLDLAGRDLTDCLMKILTERGYSFTTSAEREIVRDMKEKLAYVALDYEQELETARSSSAVEKSYELPDGQVITIGAERFRCPEVLFQPSLVGMEAAGIHETTYNSIMKCDVDIRKDLYGNIVLSGGTTMFPGIADRMSKEITALAPSSMKIKVVAPPERKYSVWIGGSILASLSTFQQMWITKGEYDESGPSIVHRKCF

SEQ ID NO: 2727 - protein, 546 aa, Solanum lycopersicum
MANPQQPLLIKTHKQNPIISFKILSFVITLFVALFLVAPYQVEIKHSNLCKTAQDSQLCLSYVSDLISNEIVTTESDGHSILMKFLVNYVHQMNNAIPVVRKMKNQINDIRQHGALTDCLELLDQSVDFASDSIAAIDKRSRSEHANAQSWLSGVLTNHVTCLDELDSFTKAMINGTNLEELISRAKVALAMLASLTTQDEDVFMTVLGKMPSWVSSMDRKLMESSGKDIIANAVVAQDGTGDYQTLAEAVAAAPDKSKTRYVIYVKRGTYKENVEVASNKMNLMIVGDGMYATTITGSLNVVDGSTTFRSATLAAVGQGFILQDICIQNTAGPAKDQAVALRVGADMSVINRCRIDAYQDTLYAHSQRQFYRDSYVTGTVDFIFGNAAVVFQKCQLVARKPGKYQQNMVTAQGRTDPNQATGTSIQFCNIIASSDLEPVLKEFPTYLGRPWKEYSRTVVMESYLGGLINPAGWAEWDGDFALKTLYYGEFMNNGPGAGTSKRVKWPGYHVITDPAKAMPFTVAKLIQGGSWLRSTGVAYVDGLYD

SEQ ID NO: 2728 - protein, 377 aa, Solanum lycopersicum
MADGEDIQPLVCDNGTGMVKAGFAGDDAPRAVFPSIVGRPRHTGVMVGMGQKDAYVGDEAQSKRGILTLKYPIEHGIVSNWDDMEKIWHHTFYNELRVAPEEHPVLLTEAPLNPKANREKMTQIMFETFNVPAMYVAIQAVLSLYASGRTTGIVLDSGDGVSHTVPIYEGYALPHAILRLDLAGRDLTDSLMKILTERGYMFTTTAEREIVRDMKEKLAYVALDYEQELETARSSSSIEKNYELPDGQVITIGAERFRCPEVLFQPSMIGMEAAGIHETTYNSIMKCDVDIRKDLYGNIVLSGGSTMFPGIADRMSKEITALAPSSMKIKVVAPPERKYSVWIGGSILASLSTFQQMWISKGEYDESGPSIVHRKCF

SEQ ID NO: 2729 - protein, 448 aa, Solanum lycopersicum
MGKEKIHISIVVIGHVDSGKSTTTGHLIYKLGGIDKRVIERFEKEAAEMNKRSFKYAWVLDKLKAERERGITIDIALWKFETTKYYCTVIDAPGHRDFIKNMITGTSQADCAVLIIDSTTGGFEAGISKDGQTREHALLAFTLGVKQMICCCNKMDATTPKYSKARYDEIVKEVSSYLKKVGYNPDKIPFVPISGFEGDNMIERSTNLDWYKGPTLLEALDQINEPKRPSDKPLRLPLQDVYKIGGIGTVPVGRVETGVIKPGMVVTFGPTGLTTEVKSVEMHHEALQEALPGDNVGFNVKNVAVKDLKRGYVASNSKDDPAKGAASFTAQVIIMNHPGQIGNGYAPVLDCHTSHIAVKFAEILTKIDRRSGKELEKEPKFLKNGDAGMVKMIPTKPMVVETFAEYPPLGRFAVRDMRQTVAVGVVKNVDKKDPTGAKVTKAAQKKGK

SEQ ID NO: 2730 - protein, 550 aa, Solanum lycopersicum
MATPQQPLLTKTHKQNSIISFKILTFVVTLFVALFLVVFLVAPYQFEIKHSNLCKTAQDSQLCLSYVSDLISNEIVTSDSDGLSILKKFLVYSVHQMNNAIPVVRKIKNQINDIREQGALTDCLELLDLSVDLVCDSIAAIDKRSRSEHANAQSWLSGVLTNHVTCLDELDSFTKAMINGTNLDELISRAKVALAMLASVTTPNDEVLRPGLGKMPSWVSSRDRKLMESSGKDIGANAVVAKDGTGKYRTLAEAVAAAPDKSKTRYVIYVKRGTYKENVEVSSRKMNLMIIGDGMYATIITGSLNVVDGSTTFHSATLAAVGKGFILQDICIQNTAGPAKHQAVALRVGADKSVINRCRIDAYQDTLYAHSQRQFYRDSYVTGTIDFIFGNAAVVFQKCQLVARKPGKYQQNMVTAQGRTDPNQATGTSIQFCDIIASPDLKPVVKEFPTYLGRPWKKYSRTVVMESYLGGLIDPSGWAEWHGDFALKTLYYGEFMNNGPGAGTSKRVKWPGYHVITDPAEAMSFTVAKLIQGGSWLRSTDVAYVDGLYD

SEQ ID NO: 2731 - protein, 337 aa, Solanum lycopersicum
MAKVKIGINGFGRIGRLVARVALQRNDVELVAVNDPFISVDYMTYMFKYDSVHGQWKHHELKVKDEKTLLFGEKAVTVFGFRNPEEIPWAQTGADYIVESTGVFTDKDKAAAHLKGGAKKVIISAPSKDAPMFVVGVNEKEYKPELNIVSNASCTTNCLAPLAKVINDRFGIVEGLMTTVHSITATQKTVDGPSAKDWRGGRAASFNIIPSSTGAAKAVGKVLPALNGKLTGMAFRVPTVDVSVVDLTVRLEKEATYDEIKAAIKEESEGKLKGILGYTEDDVVSTDFVGDNRSSIFDAKAGIALSKNFVKLVAWYDNEWGYSTRVVDLIIHMSSVQ

SEQ ID NO: 2732 - protein, 485 aa, Solanum lycopersicum
MALLVEKTTSGREYKVKDMSQADFGRLEIELAEVEMPGLMASRAEFGPSQPFKGAKITGSLHMTIQTAVLIETLTALGAEVRWCSCNIFSTQDHAAAAIARDSAAVFAWKGETLQEYWWCTERALDWGPGGGPDLIVDDGGDATLLIHEGVKAEEEFAKNGTVPDPTSTDNVEFQLVLTIIKESLKTDPLRYTKMKERLVGVSEETTTGVKRLYQMQANGSLLFPAINVNDSVTKSKFDNLYGCRHSLPDGLMRATDVMIAGKVALVAGYGDVGKGCAAAMKQAGARVIVTEIDPICALQATMEGLQVLPLEDVVSEVDIFVTTTGNKDIIMVDHMRKMKNNAIVCNIGHFDNEIDMHGLETFPGVKRITIKPQTDRWVFPDTNSGIIVLAEGRLMNLGCATGHPSFVMSCSFTNQVIAQLELWNERSSGKYEKKVYVLPKHLDEKVAALHLGKLGAKLTKLTKDQADYISVPVEGPYKPAHYRY

SEQ ID NO: 2733 - protein, 583 aa, Solanum lycopersicum
MTRVEDFFSKQIDFCKRKKKIYLAIVASVLLVAAVIGVVAGVKSHSKNSDDHADIMAISSSAHAIVKSACSNTLHPELCYSAIVNVSDFSKKVTSQKDVIELSLNITVKAVRRNYYAVKELIKTRKGLTPREKVALHDCLETMDETLDELHTAVEDLELYPNKKSLKEHAEDLKTLISSAITNQETCLDGFSHDEADKKVRKVLLKGQKHVEKMCSNALAMICNMTDTDIANEMKLSAPANNRKLVEDNGEWPEWLSAGDRRLLQSSTVTPDVVVAADGSGDYKTVSEAVAKAPEKSSKRYVIRIKAGVYRENVDVPKKKTNIMFMGDGKSNTIITASRNVQDGSTTFHSATVAAVGEKFLARDITFQNTAGASKHQAVALRVGSDLSAFYRCDMLAYQDTLYVHSNRQFFVQCLVAGTVDFIFGNGAAVFQDCDIHARRPGSGQKNMVTAQGRTDPNQNTGIVIQKCRIGATSDLRPVQKSFPTYLGRPWKEYSRTVIMQSSITDVIQPAGWHEWNGNFALDTLFYGEYANTGAGAPTSGRVKWKGHKVITSSTEAQAYTPGRFIAGGSWLSSTGFPFSLGL

SEQ ID NO: 2734 - protein, 337 aa, Solanum lycopersicum
MGKVKIGINGFGRIGRLVARVALQSDDIELVAVNDPFITTEYMTYMFKYDTVHGQWKKHELKVKDDKTLLFGDKPVKVFGARNPEEIPWGEAGADYVVESTGVFTDKDKAAAHLKGGAKRVVISAPSKDAPMFVMGVNEKEYKADINIVSNASCTTNCLAPLAKVINDKFGIVEGLMTTVHSITATQKTVDGPSMKDWRGGRAAAHNIIPSSTGAAKAVGKVLPALNGKLTGMAFRVPTVDVSVVDLTARIQKSATYDEIKAALKAESQGNMKGILGYTEDDVVSSDFIGDCRSSIFDAKAGIALNGNFVKVVSWYDNEWGYSNRVIDLIRHMSTVV

SEQ ID NO: 2735 - protein, 110 aa, Solanum lycopersicum; identical to SEQ ID NO: 536

SEQ ID NO: 2736 - protein, 137 aa, Solanum lycopersicum
KPAEKKPAEKTPVAEKAPAEKKPKAGKKLPKDAAAGDKKKKRSKKAVETYKIYIFKVLKQVHPDIGISSKAMGIMNSFINDIFEKLAQEASRLARYNKKPTITSREIQTAVRLVLPGELAKHAVSEGTKAVTKFTSS

SEQ ID NO: 2737 - protein, 419 aa, Solanum lycopersicum
MAFSSLLKPAASFVRPSHRSQVSCAGLHHSSNSVKLQSSIFGDAVTILQSSSLQKSGACSIQPIRATATELPPTVPRSQTGGKTRVGINGFGRIGRLVLRIATFRDDIEVVAVNDPFIDAKYMAYMLKYDSTHGVYSGSISVLDDSTLEINGKQIKVSSKRDPADIPWGDLGADYVVESSGVFTTIDKASAHKKGGAKKVVISAPSADAPMFVVGVNEKTYKANMDVVSNASCTTNCLAPLAKVVHEEFGIVEGLMTTVHATTATQKTVDGPSMKDWRGGRGAGQNIIPSSTGAAKAVGKVLPELNGKLTGMAFRVPTPNVSVVDLTCRLDKSASYDDVKAAIKYASEGPLKGILGYTDEDVVSNDFVGDSRSSIFDAKAGIGLSKSFVKLVSWYDNEWGYSNRVLDLIEHMALVASIH

SEQ ID NO: 2738 - protein, 636 aa, Solanum lycopersicum
MATQCYDPENSASRYTLLPDQPDSGHRKSLKIISGIFLSVFLLLSVAFFPILNNQSPDLQIDSRSPAPPSRGVSQGVSDKTFRDVAGASHVSYAWSNAMLSWQRTAYHFQPQKNWMNDPNGPLYHKGWYHLFYQYNPDSAIWGNITWGHAVSKDLIHWLYLPFAMVPDQWYDINGVWTGSATILPDGQIMMLYTGDTDDYVQVQNLAYPANLSDPLLLDWVKFKGNPVLVPPPGIGVKDFRDPTTAWTGPQNGQWLLTIGSKIGKTGVALVYETSNFTSFKLLDGVLHAVPGTGMWECVDFYPVSTKKTNGLDTSYNGPGVKHVLKASLDDNKQDHYAIGTYDLGKNKWTPDNPELDCGIGLRLDYGKYYASKTFYDPKKERRVLWGWIGETDSESADLQKGWASVQSIPRTVLYDKKTGTHLLQWPVEEIESLRVGDPTVKQVDLQPGSIELLRVDSAAELDIEASFEVDKVALQGIIEADHVGFSCSTSGGAASRGILGPFGVIVIADQTLSELTPVYFYISKGADGRAETHFCADQTRSSEAPGVGKQVYGSSVPVLDGEKHSMRLLVDHSIVESFAQGGRTVITSRIYPTKAVNGAARLFVFNNATGASVTASVKIWSLESANIQSFPLQDL

SEQ ID NO: 2739 - protein, 727 aa, Solanum lycopersicum
MKEKTQTPICSLFFLVLCFLCCSVFTEHTNAEFTVSENGPLTDSEAQFIKHRQLLYYRDEFGDRGENVKIDPSMVFENDRIKNAYIALQAWKQAIISDPFNITMNWVGPNVCSYTGVFCAPALDNPKIRTVAGIDLNHGDIAGYLPEELGLLTDLGIFHINSNRFCGTIPRKLNKLKILFELDLSNNRFAGKFPYVVLSLPKLIFLDIRFNEFEGNVPSQLFDKPLDAIFINHNRFAFELPENFGNSPVSVIVLASNSFHGCLPASIGNMSNLNEAILMNNGLRSCLPAEIGLLKNLTVFDVSFNELMGPLPENFGGLVNLEQLNVAHNMLSGTIPKSICQLPKLENFTYSYNFFTGEPPVCLALPEFHDQRNCLPNRPVQRSPGQCKAFLSKKIHCSAFKCHKFVPVLPPPPPLSPPLPAPPPPPVYSPPPPVYNPPSPPPPPPPSPPPPSPPPPVYSPPPPSPPPPPPVYSPPPPPPSPPPPSPPPPPPPSPPPPSPPPPVYSPPPPPPPPPPPVYSPPPLPYCVRSPPPPPPPPNSPPPNSPPPPLAHSPPPPSPYYYNSPPPPPPNSPPPPPNSPPPPPPTYIYSSPPPPNSPPPPPPPYVYSSPPPPHSPPPPSPLPCIEPPPPPPPCIEPPPPPSPSPSPPPPPMYHYNSPPPPSPSPPPPPVYHYNSPPPPSPSPPPPPVYYYNSPPPPPPSPPPTPVYEGPLPPVIGVQYASPPPPPFY

SEQ ID NO: 2740 - protein, 358 aa, Solanum lycopersicum
MSCYKGKYADELIKNATYIGTPGKGILAADESTGTIGKRLSSINVENVESNRRALRELLFCTPGCLQYLSGVILFEETLYQKTAAGKPFVEVMKEAGVLPGIKVDKGTVELPGTDGETTTQGLDGLAERCQKYYEAGARFAKWRAVLKIGANEPSQLAINDNANGLARYAIICQQNGLVPIVEPEILVDGAHDIKKCADVTERVLAACYKALNDHHVLLEGTLLKPNMVTPGSESPKVAPEVIAEYTVRALQRTMPPAVPAVVFLSGGQSEEEATVNLNAMNKLQTKKPWSLSFSFGRALQQSTLKAWGGKEENVQKAQAAFLTRCKANSEATLGKYVGASNLSEGASESLHVKDYKY

SEQ ID NO: 2741 - protein, 363 aa, Solanum lycopersicum
MESPRVEESYDKMSELKAFDDTKAGVKGLVDSGITKVPQIFVLPPKDRAKKCETHFVFPVIDLQGIDEDPIKHKEIVDKVRDASEKWGFFQVVNHGIPTSVLDRTLQGTRQFFEQDNEVKKQYYTRDTAKKVVYTSNLDLYKSSVPAASWRDTIFCYMAPNPPSLQEFPTPCGESLIDFSKDVKKLGFTLLELLSEGLGLDRSYLKDYMDCFHLFCSCNYYPPCPQPELTMGTIQHTDIGFVTILLQDDMGGLQVLHQNHWVDVPPTPGSLVVNIGDFLQLLSNDKYLSVEHRAISNNVGSRMSITCFFGESPYQSSKLYGPITELLSEDNPPKYRATTVKDHTSYLHNRGLDGTSALSRYKI

SEQ ID NO: 2742 - protein, 521 aa, Solanum lycopersicum
MAASIGALKSSPSSHNCINERRNDSTRAISSRNLSFSSSHLAGDKLMPVSSLRSQGVRFNVRRSPLIVSPKAVSDSQNSQTCLDPDASRSVLGIILGGGAGTRLYPLTKKRAKPAVPLGANYRLIDIPVSNCLNSNISKIYVLTQFNSASLNRHLSRAYASNMGEYKNEGFVEVLAAQQSPENPDWFQGTADAVRQYLWLFEEHNVLEYLILAGDHLYRMDYEKFIQAHRETDADITVAALPMDEKRATAFGLMKIDEEGRIIEFAEKPQGEQLQAMKVDTTILGLDDKRAKEMPFIASMGIYVISKDVMLNLLRDKFPGANDFGSEVIPGATSLGMRVQAYLYDGYWEDIGTIEAFYNANLGITKKPVPDFSFYDRSAPIYTQPRYLPPSKMLDADVTDSVIGEGCVIKNCKIHHSVVGLRSCISEGAIIEDSLLMGADYYETDAERKLLAAKGSVPIGIGKNCLYKRAIIDKNARIGDNVKIINKDNVQEAARETDGYFIKSGIVTVIKDALIPSGIVI

SEQ ID NO: 2743 - protein, 602 aa, Solanum lycopersicum
MASITASHFVSRSSNVQTSLDTKSTLSQIGLRNHTLTHNGLRAVNKLDGLQSRTNTKVTPKMRSTKSATIVCGKGMNLIFVGTEVGPWSKTGGLGDVLGGLPPALAARGHRVMTISPRYDQYKDAWDTSVALEVKVGDSIEIVRFFHCYKRGVDRVFVDHPMFLEKVWGKTGSKIYGPKAGLDYLDNELRFSLLCQAALEAPRVLNLNSSNYFSGPYGEDVLFIANDWHTALIPCYLKSMYQSRGIYLNAKVAFCIHNIAYQGRFSFSDFPLLNLPDEFRGSFDFIDGYEKPVKGRKINWMKAGILESHRVVTVSPYYAQELVSAVDKGVELDSVLRKTCITGIVNGMDTQEWNPATDKYTDVKYDITTVMDAKPLLKEALQAAVGLPVDKKIPLIGFIGRLEEQKGSDILVAAIHKFIELDVQIVVLGTGKKEFEQEIEQLEVLYPNKAKGVAKFNVPLAHMITAGADFMLVPSRFEPCGLIQLHAMRYGTVPICASTGGLVDTVKEGYTGFHMGAFNVECDVVDPDDVLKIVTTVSRALAVYGTLAFAEMIKNCMSEELSWKEPAKKWETLLLGLGASGSEPGVEGEEIAPLAKENVATP

SEQ ID NO: 2744 - protein, 619 aa, Solanum lycopersicum
MFSDPFNFTANWTGPNVCSYGGVFCAPSLMDDSIRVVAGIDLNHADIAGSLVAELGLLTDLVLFHLNSNRFCGVVPKTFSHLKLLRELDLSNNRFVGGFPKVVLSLPSLKFLDLRFNDFEGPVPSGLFDKDLDALFLNDNRFRFGIPENLGNSPVSVLVFANNDLGGCIPASIGKMGKTLNELILMNDNLTGCLPMEIGLLNKLTVFDVSFNKIQGSLPSTVSKMRSVEELNVAHNKLTGVIPASICQLPRLQNFTYSFNYFTGEAPVCAATRSGDGQENCIVGKKNQRSAKECSSDDAKPYDCRKSKCYSPFATSPSTKPKPKPKPRGPPPPTWKSSGSHNKRSPPPPKSTPLPPPAPYKKSPTYQHRSPPPPTHKISPVTHHSPPPPSPVYYHPSPSSPPPPVYYSPPPPVYHEPPPTYKPKSPPPPPTPSYEHPKTPSPLPPTPSYEHPKTPPSHEHPKTPSPPTPSYEHPKTPSPPTPSYEHPKTPSPPPPTPSYEHPQPQSPPPPPTPSYEHPKTPSHPTPPTPPCNEPPPPPPNSHWEPKPSPPYTYSSPPPPSPSPPPPTYYYSSPPPPSPSPPPPTYSSPPPPPPFYENIPLPPVIGVSYASPPPPVIPYY

SEQ ID NO: 2745 - protein, 828 aa, Solanum lycopersicum
MVKFTAEELRRIMDFKHNIRNMSVIAHVDHGKSTLTDSLVAAAGIIAQEVAGDVRMTDTRADEAERGITIKSTGISLYYEMTDDSLRNFKGERNGNEYLINLIDSPGHVDFSSEVTAALRITDGALVVVDCVEGVCVQTETVLRQALGERIRPVLTVNKMDRCFLELQVDGEEAYQTFQRVIENANVIMATYEDPLLGDVQVYPEKGTVAFSAGLHGWAFTLTNFAKMYASKFGVDESKMMERLWGENFFDPATKKWTTKNTGTASCKRGFVQFCYEPIKQIINTCMNDQKDKLWPMLQKLGVTMKSDEKDLMGKALMKRVMQTWLPASTALLEMMIYHLPSPSTAQKYRVENLYEGPLDDAYANAIRNCDPEGPLMLYVSKMIPASDKGRFFAFGRVFAGKVSTGMKVRIMGPNYVPGEKKDLYVKNIQRTVIWMGKRQETVEDVPCGNTVAMVGLDQFITKNATLTNEKEVDAHPIRAMKFSVSPVVRVAVQCKVASDLPKLVEGLKRLAKSDPMVVCSIEESGEHIIAGAGELHLEICLKDLQDDFMGGAEIIKSDPVVSFRETVLEKSTRTVMSKSPNKHNRLYMEARPMEEGLAEAIDEGRIGPRDDPKVRSKILAEEFGWDKDLAKKIWCFGPETTGPNMVVDMCKGVQYLNEIKDSVVAGFQWASKEGALAEENMRGICFEVCDVVLHSDAIHRGGGQVIPTARRVIYASQLTAPEQALGGIYSVLNQKRGHVFEEMQRPGTPLYNIKAYLPVVESFGFSGTLRAATSGQAFPQCVFDHWEMMSSDPLEAGSQAHQLVLDIRKRKGLKDQMTPLSEFEDKL

SEQ ID NO: 2746 - protein, 896 aa, Solanum lycopersicum
MLKPQFQQSTKTLIPSWNTNTLFLASFPINILNKNFILKKKNNFRVHHNYNGANTIKAVLNSTQKSIGVKAVVTVQKQVNLNLLRGLDGIGDLLGKSLILWIVAAELDHKTGLEKPSIRSYAHRGLDVDGDTYYEAVFEIPEDFGEVGAILVENEHHKEMYVKNIVIDGFVHGKVEITCNSWVHSKFANPDKRIFFTNKSYLPSQTPSGVIRLREEELVTLRGDGVGERKVFERIYDYDVYNDLGEVDSNNDDAKRPILGGKKLPYPRRCRTGRQRSKKDPLYETRSTFVYVPRDEAFSAVKSLTFSGNTVYSALHAVVPALESVVSDPDLGFPHFPAIDSLFNVGVDLSGLSDKKSSLFNIVPRLIKSISETGKDVLLFESPQLVQRDKFSWFRDVEFARQTLAGLNPYSIRLVTEWPLRSNLDPKVYGPPESEITKELIENEIGNNMTVEQAVQQKKLFILDYHDLLLPYVNKVNELKGSVLYGSRTIFFLTPHGTLKPLAIELTRPPIDDKPQWKEVYSPNNWNATGAWLWKLAKAHVLSHDSGYHQLVSHWLRTHCCTEPYIIATNRQLSAMHPIYRLLHPHFRYTMEINALAREALINANGIIESSFFPGKYSVELSSIAYGAEWRFDQEALPQNLISRGLAEEDPNEPHGLKLAIEDYPFANDGLVLWDILKQWVTNYVNHYYPQTNLIESDKELQAWWSEIKNVGHGDKKDEPWWPELKTPNDLIGIITTIVWVTSGHHAAVNFGQYSYGGYFPNRPTTARSKMPTEDPTAEEWEWFLNKPEEALLRCFPSQIQATKVMTILDVLSNHSPDEEYIGEKIEPYWAEDPVINAAFEVFSGKLKELEGIIDARNNDSKLNNRNGAGVMPYELLKPYSEPGVTGKGVPYSISI

SEQ ID NO: 2747 - protein, 78 aa, Solanum lycopersicum; identical to SEQ ID NO: 594

SEQ ID NO: 2748 - protein, 96 aa, Solanum lycopersicum; identical to SEQ ID NO: 531

SEQ ID NO: 2749 - protein, 156 aa, Solanum lycopersicum
MQIFVKTLTGKTITLEVESSDTIDNVKAKIQDKEGIPPDQQRLIFAGKQLEDGRTLADYNIQKESTLHLVLRLRGGAKKRKKKTYTKPKKIKHKKKKVKLAVLQFYKVDDTGKVQRLRKECPNAECGAGTFMANHFDRHYCGKCGLTYVYNKAGGD

SEQ ID NO: 2750 - protein, 292 aa, Solanum lycopersicum
MAKKLVKYCVVDAFTDTAFKGNPAAVCLLEEEKDDKWLQSVAAEFNLSETCYLIPLIEPANTNPRFGLRWFTPVDEVDLCGHATLAAAHFLFSYGLVKTDTIEFSTRSGILIAKKVPEPKVSNSQDDWPTGYSIELDFPVVQVAETNFNDVLAISKSLNGASVVEIYETSMGDHFILLPSGEEVVECQPQIDLIQNCPGRGIIITGPAPQGSGFDFYSRFFCPKFGINEDPVCGSAHCALAPYWRKKLGKCDFVALAASPRGGVVKLHLDDEKQRVCLRGKAVAVMEGSLLV

SEQ ID NO: 2751 - protein, 332 aa, Solanum lycopersicum
MAKDPVRVLVTGAAGQIGYALVPMIARGVMLGADQPVILHMLDIPPAAEALNGVKMELVDAAFPLLKGVVATTDAVEACTGVNVAVMVGGFPRKEGMERKDVMSKNVSIYKSQASALEKHAAPNCKVLVVANPANTNALILKEFAPSIPEKNITCLTRLDHNRALGQISERLSVQVSDVKNVIIWGNHSSSQYPDVNHATVSTPAGDKPVRELVADDAWLNGEFISTVQQRGAAIIKARKLSSALSAASSACDHIRDWVLGTPEGTFVSMGVYSDGSYNVPAGLIYSFPVTCKNGEWSIVQGLPIDEFSRKKLDLTAEELSEEKALAYSCLA

SEQ ID NO: 2752 - protein, 321 aa, Solanum lycopersicum
MASIKSVKVPTIDFSNYQELKPNTPLWESTKIQVFEAFQEYGCFEAIYDKVPNEIREETFDMSKEIFEFPLDTKVKNISEKPMHGYMGMIPQLPLYESLCIPDLLNPQSLQNFANIFWPQGNQHFCNLVKSYSNPLVELDEILKRMISENLRLKIHIDELLNANYFLFRFTHYKGSSITGGDENNKVAGLGGHTDGNFLTFISQNQVNGLQINKNGEWIDVNISPNSYVVLAGDSFKAWTNGRLHSPLHRVTMSGENDRLSIQLFSLSKPGHFIEAPKELVDEEHPLLFKPFEIIGLFEYGTTEAGYTAPPSDLLKSYCGV

SEQ ID NO: 2753 - protein, 344 aa, Solanum lycopersicum
MGCFSLLCLHNLKDWEGLEKIESDTEYFRVPGLFDKIELTKNQLGNAARPRNEEWRVMSEKMKKAEEEAYGMVVNTFEDLEKEYIEGLMNAKNKKIWTIGPVSLCNKEKQDKAERGNEAAIDEHKCLNWLDSWEQNSVLFVCLGSLSRLSTSQMVELGLGLESSRRPFIWVVRHMSDEFKNWLVEEDFEERVKGQGLLIRGWAPQVLLLSHPSIGAFLTHCGWNSSLEGITAGVAMITWPMFAEQFCNERLIVDVLKTGVRSGIERQVMFGEEEKLGTQVSKDDIKKVIEQVMDEEMEGEMRRKRAKELGEKAKRAMEEEGSSHFNLTQLIQDVTEQAKILKPM

SEQ ID NO: 2754 - protein, 395 aa, Solanum lycopersicum
MASSSLVKLNASSSSWIGQQSFNQRSGSSCRLPVSNRRVSVIRAAGSYTDELIKTAKTIASPGRGILAIDESNATAGKRLASIGLDNTEANRQAYRQLLLTTPGLGDYISGSILFEETLFQSTTDGKKFVDVLRDQKIVPGIKVDKGLVPLPGSNNESWCQGLDGLASRSAEYYKQGARFAKWRTVVSIPCGPSALAVKEAAWGLARYAAISQDNGLVPIVEPEILLDGDHPIERTLEVAERVWAEVFYYLAENNVVFEGILLKPSMVTPGAEHKEKATPETIAKYTLTMLRRRVPPAVPGIMFLSGGQSEVEATLNLHEMNQSPNPWHVSFSYARALQNTVLKTWQGRPENVDAAQRALLIRAKANSLAQLGKYSAEGESEEAKKGMFVKGYTY

SEQ ID NO: 2755 - protein, 650 aa, Solanum lycopersicum
MAGKGEGPAIGIDLGTTYSCVGVWQHDRVEIIANDQGNRTTPSYVGFTDTERLIGDAAKNQVALNPINTVFDAKRLIGRRFSDASVQEDMKLWPFKVIPGPGDKPMIVVTYKGEEKEFAAEEISSMVLTKMKEIAEAFLGSTVKNAVVTVPAYFNDSQRQATKDAGVISGLNVMRIINEPTAAAIAYGLDKKATSAGEKNVLIFDLGGGTFDVSLLTIEEGIFEVKATAGDTHLGGEDFDNRMVNHFVHEFKRKHKKDITGNPRALRRLRTACERAKRTLSSTAQTTIEIDSLYEGVDFYSTITRARFEELNMDLFRKCMEPVEKCLRDAKMDKSTVHDVVLVGGSTRIPKVQQVAMTNFFNGKELCKSINPDEAVAYGAAVQAAILSGEGNEKVQDLLLLDVTPLSLGLETAGGVMTVLIPRNTTIPTKKEQVFSTYSDNQPGVLIQVFEGERRARTRDNNLLGKFELSVIPPAPRVVPQITVCFDIDANGILNVSAEDKTTGQKNKITITNDKGRLSKEEIEKMVQEAEKYKAEDEELKKKVEAKNSLENYAYNMRNTVKDEKIGSKLSSDDKKKIEDAVDQAISWLESNQLAEVDEFEDKMKELEGICNPIIAKMYQGAGGDAGVPMDDDAPPSGGSSAGPKIEEVD

SEQ ID NO: 2756 - protein, 704 aa, Solanum lycopersicum
MGRISVDEEGDDRVESSSGNLSSGIQASLPGRYATALFDIAREAKTIEAVEASLANVRAALDGSPDFARLVASPLVSRGDAAKAVAATAATLSLDPVTTKFLGVLADNRRLPQLRAIIAAFRALAAHYRGETTAEVSSAHPLGDDQVDALKASLRQRVGRDVAVDLSVDPSLLGGLVVRIRSQMIDSSIRTRLNSLAQAMKEISKVIKDQIANFGTEAEVSETGQVLSVGDGIARIYGLDNVQAGEMVEFSNGVQGMALNLEADNVGVVIFGSDSQIREGDVVKRTGTIVDVPVGKGLLGRVVDGLGNPIDGKGPIVTDQRSRVEVKAPGIIPRTSVHEPVQTGLKAIDALVPVGRGQRELIIGDRQTGKSAVAIDTFINQKTINAGDDESKKLYCVYVAIGQKRSTVAQLVRTLTENGAMDYSIVVAATASDPAPLQFLAPYTGCAMGEYFRDNGMHALIVYDDLSKQAVAYRQMSLLLRRPPGREAYPGDVFYLHSRLLERAAKMNSDNGSGSLTALPIIETQAGDVSAYIPTNVISITDGQIFLETDLFFAGIRPAINVGLSVSRVGSAAQTKAMKKVSGSIKLELAQYREMAAFAQFGSDLDASTQKLLNRGARLTELLKQAQFSPMPFEEQTVSIFAGTNGYIDAVPVADVTRYEGAMLAHMRSAHAAILADIRDKRELTKETTDALKDALAAFAKTFA

SEQ ID NO: 2757 - protein, 765 aa, Solanum lycopersicum
MASHVVGYPRMGPKRELKFALESFWDGKSSAEDLKKVSADLRSSIWKQMCDTGIKYIPSNTFSYYDQVLDTTAMLGAVPSRYNWTGGEIEFATYFSMARGNASVPAMEMTKWFDTNYHFIVPELGPDVNFSYASHKAVNEYKEAKAQGVDTVPVLVGPVSYLLLSKPAKGVDKSFPLLSLLDKILPIYKEVIAELKAAGASWIQLDEPTLVLDLESHKLEAFTKAYADLESSLSGLNVLVETYFADVPAEAFKTLTALKGVTAFGFDLVRGTQTLELIKSSFPSGKYLFAGVVDGRNIWANDLAASLALLQTLEGVVGKDKLVASTSCSLLHTAVDLINETKLDDEIKSWLAFAAQKVVEVNALAKALSGAKDEAFFSANAAAQASRKSSPRVTNEAVQKASAALQGSDHRRATNVSARLDAQQKKLNLPILPTTTIGSFPQTVELRRVRREYKAKKISEEEYVKAITEEIKKVVDLQEELDIDVLVHGEPERNDMVEYFGEQLSGFAFTANGWVQSYGSRCVKPPIIYGDVSRPKPMTVFWSSKAQEMTKRPMKGMLTGPVTILNWSFVRNDQPRFETCYQIALAIKDEVEDLEKAGITVIQIDEAALREGLPLRKAEHAFYLNWAVHSFRITNVGIQDTTQIHTHMCYSNFNDIIHSIIDMDADVITIENSRSDEKLLSVFREGVKYGAGIGPGVYDIHSPRIPSTEEIADRVNKMLAVLDTNILWVNPDCGLKTRKYTEVKPALQNMVSAAKTIRTQLASAK

SEQ ID NO: 2758 - protein, 981 aa, Solanum lycopersicum
MYVSSSVHIKPNFFTSFPVSKSLSKSTGAYCSSGYSSLSFSSTFRSLRWRYGVDWKSPISLTSQIRTAAVTPVLNNFRRKLTTMASGNPFKGILTSLPKPGGGEFGKYYSLPALNDPRIDKLPYSIRILLESAIRNCDNFQVKKEDVEKIIDWENTSPKLAEIPFKPARVLLQDFTGVPAVVDLACMRDAMNKLGSNADKINPLVPVDLVIDHSVQVDVARSENAVQANMELEFQRNKERFAFLKWGSNAFRNMLVVPPGSGIVHQVNLEYLGRVVFNREGLLYPDSVVGTDSHTTMIDGLGVAGWGVGGIEAEATMLGQPMSMVLPGVVGFKLSGKLRSGVTATDLVLTVTQMLRKHGVVGKFVEFYGDGMGELSLADRATIANMSPEYGATMGFFPVDHVTLQYLKLTGRSDETVSMIEAYLRANNMFVDYNEPQHEKVYSSCLYLDLAEVEPCVSGPKRPHDRVPLKEMKSDWHSCLDNKVGFKGFAVPKDAQEKVVKFSFHGQHAELKHGSVVIAAITSCTNTSNPSVMLGAALVAKKACDLGLNVKPWVKTSLAPGSGVVTKYLLQSGLQKYLNEQGFNIVGYGCTTCIGNSGDLDESVSSAISENDIVAAAVLSGNRNFEGRVHPLTRANYLASPPLVVAYALAGTVDIDFDKEPIGVGKDGNSVYFRDIWPSTEEIAEVVQSSVLPDMFKSTYEAITKGNNMWNQLSVPATSLYSWDTSSTYIHEPPYFKDMTMDPPGPHGVKDAYCLLNFGDSITTDHISPAGSIHKDSPAAKYLNERGVDRRDFNSYGSRRGNDEIMARGTFANIRIVNKLLNGEVGPKTIHIPSGEKLSVFDAAMKYKSAGQDTIILAGAEYGSGSSRDWAAKGPMLLGVKAVIAKSFERIHRSNLVGMGIVPLCFKAGEDADSLGLTGHERYTIDLPDNISEIRPGQDVTVQTDTGKSFTCVVRFDTEVELAYFNHGGILPYVIRQLSQQ

SEQ ID NO: 2759 - protein, 136 aa, Solanum lycopersicum
MARTKQTARKSTGGKAPRKQLATKAARKSAPTTGGVKKPHRYRPGTVALREIRKYQKSTELLIRKLPFQRLVREIAQDFKTDLRFQSHAVLALQEAAEAYLVGLFEDTNLCAIHAKRVTIMPKDIQLARRIRGERA

SEQ ID NO: 2760 - protein, 268 aa, Solanum lycopersicum
MLPYLLLLILAHAGWVTTADLGNYSLVKNIFILAGQSNISGRGGVINHSLRPGVVNESWDGVIPRECESNPSILRLSGGLKWVEAHEPLHKDIDVNNTCGIGPGMPFANTVLKKDPSIGVIGLVPCAVGGTSITEWAPGGFLYRSMIKRTKAATRGGGKIRALLWFQGESDTKTLEDAKMYKVRLERFFNHVRHDLGMPNLTVIQVGIATALGPYMELVREAQREINIGNLKYVDAKGLQIGPDYTHLTTAAQIQLGQMLADAFLRPN

SEQ ID NO: 2761 - protein, 300 aa, Solanum lycopersicum
MVKTVSFSGILSNKAKFNPDFYNWNRIRIRYCDGSSFTGDVAAADPRTKVFYRGARIFSAVMDDFLAKGMKNAQNAILAGCSAGSLAAILHCDRFKGLLPSGAKVKCLSDAGFFINTQTISGTSHIEKFYSEVVNTHGSAKNLPQSCTSRLKPGLCFFPQNVAQQIQTPLFLVNAAYDSWQIKNILAPGVADPHGTWRNCKLDILKCSSAQLQTMQAFRSEFLKALNSLGPSSTRGYYINSCYAHCQTGTQETWLRDDSPVLSGTTIAKAVGDWYYERKRFQEIDCPYPCNKTCKNRNFE

SEQ ID NO: 2762 - protein, 329 aa, Solanum lycopersicum
MRLYAYSLLFSLLLLTVSAEQCGRQAGGARCAAGLCCSNFGWCGNTNDYCGPGKCQSQCPSGPSPKPPTPGPGPSGGDISSVISNSMFDQMLKHRNENSCQGKNNFYSYNAFINAARSFRGFGTTGDNTARKREIAAFFAQTSHETTGGWPSAPDGPYAWGYCFLREQGSPGDYCTPSSQWPCAPGRKYFGRGPIQISHNYNYGPCGRAIGADLLNNPDLVATDPVISFKSAIWFWMTPQSPKPSCHDVITGRWQPSGADRAANRLPGFGVITNIINGGLECGRGSDSRVQDRIGFYRRYCGILGVSPGDNLDCGNQRSFGNGLLVDTM

SEQ ID NO: 2763 - protein, 364 aa, Solanum lycopersicum
MGFRLSHLSLALSFVALALAGVAIYRNTYEAIIMKNGSLLKNVSPDFDSLESGVASILTLNNNKKRNSDKYLRQQLTPEACVFSAVRAVVDSAIDAETRMGASLIRLHFHDCFVDGCDGGILLDDINGTFTGEQNSPPNANSARGYEVIAQAKQSVINTCPNVSVSCADILAIAARDSVAKLGGQTYSVALGRSDARTANFSGAINQLPAPFDNLTVQIQKFSDKNFTLREMVALAGAHTVGFARCSTVCTSGNVNPAAQLQCNCSATLTDSDLQQLDTTPTMFDKVYYDNLNSNQGIMFSDQVLTGDATTAGFVTDYSNDVNVFLGDFAAAMIKMGDLPPSAGAQLEIRDVCSRVNPTSVASM

SEQ ID NO: 2764 - protein, 392 aa, Solanum lycopersicum
MASASLLKTSPVLDKTEFVKGQSLRLPSVSVRCQPSALTVRASSYADELVKTAKTIASPGRGILAMDESNATCGKRLASIGMENTEANRQAFRTLLVSVPGLGEYISGAILFEETLYQSTVEGKKMVDVLVEQNIVPGIKVDKGLVPLAGSNNESWCQGLDGLASRSAAYYQQGARFAKWRTVVSIPNGPSALAVKEAAWGLARYAAISQDNGLVPIVEPEILLDGEHNIDRTFEVAKQVWAEVFFYLAQNNVMFEGILLKPSMVTPGAECKDRATPQQVADYTLSLLRQRIPPAVPGIMFLSGGQSEVEATLNLNAMNQSPNPWHVSFSYARALQNTCLKTWSGRPENVKAAQDALLVRAKANSLAQLGKYTGEGESDEAKKGMFVKGYVY

SEQ ID NO: 2765 - protein, 401 aa, Solanum lycopersicum
MAVKKSVGSLKEADLKGKRVFVRVDLNVPLDDNFKITDDTRIRAAVPTIKYLMQNGARVILASHLGRPKGVTPKYSLKPLVPRLSELLGIEVKMANDSVGPEVENLVAGLPEGGVVLLENVRFYKEEEKNDPEFAKKLASLADLYVNDAFGTAHRAHASTEGVAKVLKPAVAGFLMQKELDYLVGAVSNPQKPFAAIVGGSKVSSKIGVIESLLEKVDVLLLGGGMIFTFYKAQGYAVGSSLVEEDKLDLATSLMEKAKTKGVSLLLPTDVVIADKFAADANSKIVPASEIPDGWMGLDIGPDAIKSFGSALDTTKTIIWNGPMGVFEFDKFAAGTEAIAKKLAELSGKGVTTIIGGGDSVAAVEKVGLAEKMSHISTGGGASLELLEGKQLPGVLALDDA

SEQ ID NO: 2766 - protein, 389 aa, Solanum lycopersicum
MSHRKFEHPRHGSLGFLPRKRAARHRGKVKAFPKDDPSKPCKLTAFLGYKAGMTHIVREVEKPGSKLHKKETCEAVTIVETPPMVIVGVVGYVKTPRGLRCLNTVWAQHLSEDIKRRFYKNWCKSKKKAFLKYSKKYETDEGKKDIQAQLEKLKKYACVIRVLAHTQIRKMKGLKQKKAHLMEIQVNGGSIAQKVDFAYGFFEKQVPVDAVFQKDEMIDIIGVTKGKGYEGVVTRWGVTRLPRKTHRGLRKVACIGAWHPARVSFTVARAGQNGYHHRTEMNKKVYKLGKVGQESHTALTEFDRTEKDITPIGGFPHYGVVKEDYLLIKGCCVGTKKRVVTLRQSLLNQTSRVALEEIKLKFIDTSSKFGHGRFQTTQEKQKFYGRLKA

SEQ ID NO: 2767 - protein, 413 aa, Solanum lycopersicum
MARLAPEGAQFDARQFDSKMNDLLAAEGKDFFTSYDEVYDSFDAMGLQENLLRGIYAYGFEKPSAIQQRGIVPFCKGLDVIQQAQSGTGKTATFCSGILQQLDYGLIQCQSLVLAPTRELAQQIEKVMRALGDYLGVKVHACVGGTSVREDQRILAAGVHVVVGTPGRVFDMLRRQSLRPDCLRMFVLDEADEMLSRGFKDQIYDIFQMLPTKVQVGVFSATMPPEALDITRKFMNKPVRILVKRDELTLEGIKQFYVNVDKEEWKLETLCDLYETLAITQSVIFVNTRRKVDWLTDKMRSRDHTVSATHGDMDQNTRDIIMREFRSGSSRVLITTDLLARGIDVQQVSLVINYDLPTQPENYLHRIGRSGRFGRKGVAINFVTTDDERMLFDIQKFYNVVIEELPSNVADLL

SEQ ID NO: 2768 - protein, 444 aa, Solanum lycopersicum
MATIKSIKARQIFDSRGNPTVEVDVHISNGVFARAAVPSGASTGIYEALELRDGGSDYLGKGVSKAVNNVNSIIGPALVGKDPTDQTGLDNFMVHQLDGTQNEWGWCKEKLGANAILAVSLAVCKAGAAVRNVPLYKHIADLAGNKKLVLPVPAFNVINGGSHAGNKLAMQEFMILPVGAANFKEAMKMGCEVYHHLKAVIKKKYGQDATNVGDEGGFAPNIQENKEGLELLKTAIEKAGYTGKVVIGMDVAASEFYGKDKSYDLNFKEESNDGSQKISGDQLKDLYKSFVSEYPIVSIEDPFDQDDWETYAKLTAEIGEQVQIVGDDLLVTNPKRVAKAIAEKTCNALLLKVNQIGSVTESIEAVKMSKKAGWGVMTSHRSGETEDTFIADLAVGLSTGQIKTGAPCRSERLAKYNQLLRIEEELGSEAVYAGASFRKPVEPY

SEQ ID NO: 2769 - protein, 666 aa, Solanum lycopersicum
MAACSRRGNSLVVLAIVLLGCLSALSNAKEEATKLGTVIGIDLGTTYSCVGVYKNGHVEIIANDQGNRITPSWVAFTDNERLIGEAAKNLAAVNPERTIFDVKRLIGRKFEDKEVQRDMKLVPYKIVSKDGKPYIQVKIKDGEVKVFSPEEISAMILTKMKETAEAFLGKTIKDAVVTVPAYFNDAQRQATKDAGVIAGLNVARIINEPTAAAIAYGLDKKGGEKNILVFDLGGGTFDVSILTIDNGVFEVLATNGDTHLGGEDFDQRIMEYFIKLIKKKHGKDISKDNRALGKLRREAERAKRSLSSQHQVRVEIESLFDGTDFSEPLTRARFEELNNDLFRKTMGPVKKAMDDAGLQKNQIDEIVLVGGSTRIPKVQQLLKDYFDGKEPSKGVNPDEAVAYGAAVQGGILSGEGGDETKDILLLDVAPLTLGIETVGGVMTKFIPRNTVIPTKKSQVFTTYQDQQTTVSIQVFEGERSLTKDCRNLGKFDLTGIPPAPRGTPQIEVTFEVDANGILNVKAEDKGTGKAEKITITNDKGRLSQEEIERMVREAEEFAEEDKKVKEKIDARNALETYVYNMKNQINDKDKLADKLESDEKEKIETATKEALEWLDDNQSAEKEDYDEKLKEVEAVCNPIITAVYQRSGGAPGGGASEEEDDSHDEL

SEQ ID NO: 2770 - protein, 699 aa, Solanum lycopersicum
MAEAETFAFQAEINQLLSLIINTFYSNKEIFLRELISNSSDALDKIRFESLTDKSKLDAQPELFIRLVPDKANKTLSIIDSGVGMTKADLVNNLGTIARSGTKEFMEALQAGADVSMIGQFGVGFYSAYLVAEKVIVTTKHNDDEQYVWESQAGGSFTVTRDVSGEQLGRGTKITLFLKEDQLEYLEERRIKDLVKKHSEFISYPIYLWTEKTTEKEISDDEDDEPKKDEEGAVEEVDEDKEKEKGKKKKIKEVSHEWQLINKQKPIWLRKPEEITKEEYASFYKSLTNDWEDHLAVKHFSVEGQLEFKAILFVPKRAPFDLFDSRKKMNNIKLYVRRVFIMDNCEELMPEYLGFVKGVVDSDDLPLNISREMLQQNKILKVIRKNLVKKCIEMFNEIAENKEDYNKFYEAFSKNLKLGIHEDSQNRAKLADLLRYHSTKSGDELTSLKDYVTRMKEGQKDIYYITGESKKAVENSPFLERLKKKGYEVLYMVDAIDEYAVGQLKEYDGKKLVSATKEGLKLDDDSEEEKKKKEEKKKSFENLCKIIKDILGDKVEKVVVSDRIVDSPCCLVTGEYGWTANMERIMKAQALRDTSMSSYMSSKKTMEINPDNGIMEELRKRAEADQNDKSVKDLVLLLFETALLTSGFSLDDPNTFAARIHRMLKLGLSIEEEEEGAGEDADMPALEEIGEESKMEEVD

SEQ ID NO: 2771 - protein, 844 aa, Solanum lycopersicum
MEINFNVLSKPIRGSFPFSSPRVSPRASRTKICFPSQHSTGLKFGSEGRSWDISSTPKSRVRKDERMKHSSAISAVLTNDNSTMASREEDVKTENIGLLNLDPALEPYLDHFRYRMKRYVDQKMLIQKYEGGLEEFAQGYLKFGFNREDGCIVYREWAPAAQEAEVIGDFNGWNGSNHMMEKDQFGVWSIRIPDVDSKPAIPHNSRVKFRFKHGEGAWVDRIPAWIKYATVDATKFAAPYDGVYWDPPPSERYNFKYPRPSKPRAPRIYEAHVGMSSSEPRVNSYREFADDVLPRIKANNYNTVQLMAIMEHSYYGSFGYHVTNFFAVSSRSGNPEDLKYLIDKAHSLGLQVLVDVVHSHASNNVTDGLNGFDIGQGSQESYFHAGERGYHKLWDSRLFNYANWEVLRFLLSNLRWWLEEYNFDGFRFDGITSMLYVHHGINMGFTGNYNEYFSEATDVDAVVYLMLANNLIHKIFPDATVIAEDVSGMPGLGRHVSEGGIGFDYRLAMAIPDKWIDYVKNKNDEDWSMKEVTSSLTNRRYTEKCIAYAESHDQSIVGDKTIAFLLMDKEMYSGMSCLTDASPVVDRGIALHKMIHFFTMALGGEGYLNFMGNEFGHPEWIDFPREGNNWSYDKCRRQWNLADSQHLRYKFMNAFDRAMNSLDEKFSFLASGKQIVSSIDDDNKVVVFERGDLVFVFNFHPNNTYEGYKVGCDLPGKYRVALDSDAWEFGGHGRVGHDVDHFTSPEGIPGVPETNFNGRPNSFKLLSPAHTCVAYYRVDECMSETEVYQTDISNELLPTANIEESDEKLKDSLSTNISNIGQTVVASVEERDKELKDSPICKHH

SEQ ID NO: 2772 - protein, 76 aa, Solanum lycopersicum; identical to SEQ ID NO: 526

SEQ ID NO: 2773 - protein, 175 aa, Solanum lycopersicum
MADVEYRCFVGGLAWATTDQTLSEAFSQYGEVVESKIINDRETGRSRGFGFVTFKDEQAMRDAIEGMNGQDLDGRNITVNEAQSRGGGGGGGGRGGGGYGGGRREGGGGGYGGGGGYGGGRREGGGGGYGGGGYGGGRREGGYGGGGGGYGGGDRYNDRSSRGGGGGGSDGNWRN

SEQ ID NO: 2774 - protein, 147 aa, Solanum lycopersicum
MGVKGKLIALVEVKCGGHPILDFFHIHTHHIPNISPNIINHLEIHAGETVKVGSIVSCNYNEAGQKKSAKQVIEAIDLDKKSITWKVIEGDVLESYSSFTGILSCEHEWTTWTIEYEKKTEDIPEPLIQLGLLLDLTKDIERHLFKK

SEQ ID NO: 2775 - protein, 160 aa, Solanum lycopersicum
MGVNTFTHESTTTIAPTRLFKGLVLDFDSLVPKLLSHDVKSIEIVEGDGGAGSIKQMNFVEGGPIKYLKHKIHVIDDKNLVTKYSLIEGDVLGDKLESIAYDVKFEAAGDGGCVCKTTTEYHTKGDHVVSEEEHNVGKGKAIDLFKAIEAYLLANPSVYA

SEQ ID NO: 2776 - protein, 179 aa, Solanum lycopersicum
MTSLHFLTAVAFTFFLTAHIAAAGSSEECVYTLYVRTGSIIKGGTDSKISVTLGDASGKSVWIPDLEKWGLMGPNYDYYERGNVDIFTGRGKCISTPICRLNVTSDGSGDHHGWFLDYVETTFTGPHMQCSQSIFYVDQWLASDAPPYELSVSLDGCKKKIGNHGRRFVVGKPIRSASE

SEQ ID NO: 2777 - protein, 197 aa, Solanum lycopersicum
MVHVSFYRNYGKTFKKPRRPYEKERLDAELKLVGEYGLRCKRELWRVQYALSRIRNAARMLLTLDEKDPRRIFEGEALLRRMNRYGLLDESQNKLDYVLALTVENFLERRLQTLVFKTGMAKSIHHARVLIRQRHIRVGRQVVNVASFMVRVDSQKHIDFSLTSPFGGGRPGRVKRKNQKSAAKKAAGGDGDEEDEE

SEQ ID NO: 2778 - protein, 204 aa, Solanum lycopersicum
MGAYTYVSELWRKKQSDVMRFLQRVRCWEYRQLPSIVRVTRPTRPDKARRLGYKAKQGYVVYRVRVKRGGRKRPVSKGIVYGKPTNQGVTQLKFQRSKRSVAEERAGRKLGGLRVLNSYWINEDSTYKYFEVILVDQAHAGIRNDPRINWICNPVHKHRELRGLTSAGKKYRGLRGRGHLHHKARPSRRATWKRNQTLSLRRYR

SEQ ID NO: 2779 - protein, 213 aa, Solanum lycopersicum
MVSLKLQKRLAASVLKCGRGKVWLDPNEGNEISMANSRQNIRKLVKDGFIIRKPTKIHSRSRARRMKEAKRKGRHSGYGKRKGTREARLPTKVLWMRRLRVLRRLLRKYRESKKIDKHMYHDMYMKVKGNVFKNKRVLMENIHKTKAEKAREKTLSDQFEARRAKNKASRERKFARREERLAQGPGGEKPVQPAAPAAAAPAQPAQGSKKSKK

SEQ ID NO: 2780 - protein, 247 aa, Solanum lycopersicum
MGYLTSSFVLFFLLCVTYTYAATIEVRNNCPYTVWAASTPIGGGRRLNRGQTWVINAPRGTKMARIWGRTGCNFNAAGRGTCQTGDCGGVLQCTGWGKPPNTLAEYALDQFSNLDFWDISLVDGFNIPMTFAPTKPSGGKCHAIHCTANINGECPRALKVPGGCNNPCTTFGGQQYCCTQGPCGPTELSKFFKKRCPDAYSYPQDDPTSTFTCPGGSTNYRVVFCPNGVADPNFPLEMPASTDEVAK

SEQ ID NO: 2781 - protein, 255 aa, Solanum lycopersicum
MASPREENVYMANVADEAERYEEMVEFMEKVVAALNGEELTVEERNLLSVAYKNVIGARRASWRIISSIEQKEESRGNEDHVASIKKYRSQIENELTSICNGILKLLDSKLIGSAATGDSKVFYLKMKGDYYRYLAEFKTGTERKEAAENTLSAYKSAQDIANGELAPTHPIRLGLALNFSVFYYEILNSPDRACNLAKQAFDEAIAELDTLGEESYKDSTLIMQLLRDNLTLWTSDMQDDGTDEIKEPSKADNE

SEQ ID NO: 2782 - protein, 271 aa, Solanum lycopersicum
MATEEPVVAIEPVNEPMVVAEPATEENPPAETDEPKKEKEIKAKKSSAPRKRNPPTHPSYFEMIKEAIVTLKDKTGSSQYAITKFIEDKQKNLPSNFRKMLLAQLKKLVASGKLVKVKSSYKLPAPKAAAPALAKKKSIAKPKAAQAKKATKAKPKPKPKVAAPKAKTATKSKAKPKPVVAAKAKPAAKPKAVVAKPKAAVKPKAPVKAKAAVKPKAANEKPAKVARTSTRSTPSRKAAPKPAVKKAPVKSVKSKTVKSPAKKASARKAKK

SEQ ID NO: 2783 - protein, 287 aa, Solanum lycopersicum
MATEEPVIVNEVVEEQAAPETVKDEANPPAKSGKAKKETKAKKPAAPRKRSATPTHPPYFEMIKDAIVTLKERTGSSQHAITKFIEEKQKSLPSNFKKLLLTQLKKFVASEKLVKVKNSYKLPSGSKPAAAAVPAKKKPAAAKSKPAAKPKAAVKPKAKPAAKAKPAAKAKPAAKAKPAAKAKPAAKAKPAAKAKPVAKAKPKAAAAAKPKAAVKPKAAPAKTKAAVKPNLKAKTTTAKVAKTATRTTPSRKAAPKATPAKKEPVKKAPAKNVKSPAKKATPKRGRK

SEQ ID NO: 2784 - protein, 286 aa, Solanum lycopersicum
MAENKEEDVKLGANKFRETQPLGTAAQTDKDYKEPPPAPLFEPGELSSWSFYRAGIAEFMATFLFLYITILTVMGLKRSDSLCSSVGIQGVAWAFGGMIFALVYCTAGISGGHINPAVTFGLFLARKLSLTRAVFYMVMQCLGAICGAGVVKGFMVGPYQRLGGGANVVNPGYTKGDGLGAEIIGTFVLVYTVFSATDAKRNARDSHVPILAPLPIGFAVFLVHLATIPITGTGINPARSLGAAIIYNDEHAWNDHWIFWVGPMIGAALAAIYHQIIIRAMPFHRS

SEQ ID NO: 2785 - protein, 287 aa, Solanum lycopersicum
MTKEVEAVHEQAVEYSAKDYTDPPPAPLIDFEELTKWSLYRAAIAEFIATLLFLYITILTVIGYKHQADVKAGGDICGGVGLLGIAWAFGGMIFVLVYCTAGISGGHINPAVTFGLFLARKVSLIRAILYMVAQCLGAICGVGFVKAFQSAYYNRYGGGVNVMAGGHTKGVGLAAEIIGTFVLVYVVFSATDPKRSARDSHVPVLAPLPIGFAVFMVHLATIPITGTGINPARSFGAAVIFNGDKAWDEHWIFWVGPFIGAFIAAVYHQYILRAGAIKALGSFRSNA

SEQ ID NO: 2786 - protein, 355 aa, Solanum lycopersicum
MGKGGSDENMAAWLLGVNTLKIQPFNLPALGPHDVRVRMKAVGICGSDVHYLKTMRCADFVVKEPMVIGHECAGIIEEVGGEVKTLVPGDRVALEPGISCWRCNLCKEGRYNLCPEMKFFATPPVHGSLANQVVHPADLCFKLPDDISLEEGAMCEPLSVGVHACRRANVGPETNILVLGAGPIGLVTLLAARAFGAPRIVIVDVDDYRLSVAKKLGADDIVKVSINIQDVATDIENIQKAMGGGIDASFDCAGFNKTMSTALGATRPGGKVCLVGMGHHEMTVPLTPAAAREVDVIGIFRYKNTWPLCLEFLRSGKIDVKPLITHRFGFSQEEVEEAFETSARGGDAIKVMFNL

SEQ ID NO: 2787 - protein, 380 aa, Solanum lycopersicum
MSTTVGQVIRCKAAVAWEAGKPLVMEEVDVAPPQKMEVRLKILYTSLCHTDVYFWEAKGQNPVFPRILGHEAAGIVESVGEGVTDLAPGDHVLPVFTGECKDCAHCKSEESNMCSLLRINTDRGVMLNDGKSRFSINGNPIYHFVGTSTFSEYTVVHVGCVAKINPLAPLDKVCVLSCGISTGLGASLNVAKPTKGSSVAIFGLGAVGLAAAEGARIAGASRIIGVDLNASRFEQAKKFGVTEFVNPKDYSKPVQEVIAEMTDGGVDRSVECTGHIDAMISAFECVHDGWGVAVLVGVPHKEAVFKTHPLNFLNERTLKGTFFGNYKPRSDIPCVVEKYMNKELELEKFITHTLPFAEINKAFDLMLKGEGLRCIITMAD

SEQ ID NO: 2788 - protein, 371 aa, Solanum lycopersicum
MKSSIKVLLLLVLLCAISSISIAVIDGLLKNGNFEMPPSKADLNGTEVLKHNAIPEWSISGFVEYIKAGQKQGDMLLVVPEGYAAVRLGNEASIKQILNVTKGMYYSLTFSAARTCAQEERINVSVTPDFGVLPIQTLYSSSGWDSYAWAFQAEFPQVEILLHNPGVEEDPACGPLIDSIAIRTLYPPRATNQNLLKNGDFEEGPYVFPNTSWGVLVPPNIEDDHSPLPAWMVESLKAVKYLDSDHFSVPHGKRAIELVAGKESAIAQVARTTIGKMYQLSFKVGDASNACEGSMIVEAFAGRDTLKVPYESMGKGGYKRAILRFKATASRTRIMFLSTYYHTRSDDFVSLCGPVVDDVTLLSVRTHRRVL

SEQ ID NO: 2789 - protein, 415 aa, Solanum lycopersicum
MAFQKIIVQNPIVEMDGDEMTRVIWKSIKDKLILPFLELDIKYFDLGLPHRDATDDKVTIESAEATQKYNVAIKCATITPDEARVKEFNLKSMWRSPNGTIRNILNGTVFREPIMCKNIPRLVPGWTKPICIGRHAFGDQYRATDTVIKGAGKLKLVFVPEGSDEKTEFEVYNFTGAGGVALSMYNTDESVRAFAEASMNMAFQKKWPLYLSTKNTILKKYDGRFKDIFQEVYEANWKSKYEEAGIWYEHRLIDDMVAYALKSEGGYVWACKNYDGDVQSDFLAQGFGSLGLMTSVLVCPDGKTIEAEAAHGTVTRHYRVHQKGGETSTNSIASIFAWTRGLAHRATLDNNERLLDFTEKLEAACIGAVESGKMTKDLALIIHGSKLSREHYLNTEEFIDAVADELKAKLLKAKA

SEQ ID NO: 2790 - protein, 477 aa, Solanum lycopersicum
MSPVPALSPADAEKLANLKSAVSSLTQISDNEKSGFLNLVTRYLSGEAQHVEWSKIQTPTDDVVVPYDKLAPLSEDPAETKKLLDKLVVLKLNGGLGTTMGCTGPKSVIEVRNGLTFLDLIVKQIEDLNTKYGCTVPLLLMNSFNTHDDTAKIVEKYSNSNIEIHTFNQSQYPRMVIEDFAPLPCKGNAGKDGWNPPGHGDVFPSLMNSGKLDALLSKGKEYVFVANSDNLGAVVDLKILNHLIQNKNEYCMEVTPKTLADVKGGTLISYDGKVQLLEIAQVPDQHVNEFKSIEKFKIFNTNNLWVNLNAVKRLVEADALKMEIIPNPKEVDGIKVLQLETAAGAAIRFFDRAIGANVPRSRFLPVKASSDLLLVQSDLYTLTDDGYVIRNPARANPSNPSIELGPEFKKVASFLSRFKSIPSIIELDSLKVTGDVYFGAGITLKGNVTINAKSGVKLEIPDGAVIKNKDVNRPEDI

SEQ ID NO: 2791 - protein, 587 aa, Solanum lycopersicum
MEGNNAIGSTAQSASVPASSPCGAGTLGRHLARRLVQIGVKDVFSVPGDFNLTLLDHLIAEPELNLIGCCNELNAGYAADGYARAKGVGACVVTFTVGGLSVLNAIAGAYSENLPVICIVGGPNSNDYGTNRILHHTIGLPDFSQELRCFQTVTCSQAVVNNLDDAHELIDTAISTALKESKPVYISIGCNLPGIAHPTFAREPVPFYLAPKVSNQLGLEAAVEAAAEFLNKSVKPVIVGGPKVRVGKAQKAFVELADACGYPLAVMPSGKGLVPEHHPSFIGTYWGAVSSSFCGEIIESADAYVFVGPIFNDYSSVGYSLLIKKEKLIVVEPHRVTIGNGPSFGWVFMTDFLSALAKKLKKNSTALENHHRIYVPPGVALKREKDELLRVNILFKHIQEMLSGNTAVIAETGDSWFNCQKLNLPENCGFEFQMQYGSIGWSVGATLGYAQAAKDKRIIACIGDGSFQVTAQDISTMIRCAQKNIIFLINNGGYTIEVEIHDGPYNVIKNWDYTGLVNAIHNGEGKCWTAKVKTEEDLTEAIATATSTHKDSLCFIEVFVHKDDTSKELLEWGSRVSAANSRPPNPQ

SEQ ID NO: 2792 - protein, 589 aa, Solanum lycopersicum
MAEETKKPASDETTPPTTVADVPVPEKESTPQPEPVPVPETPEKSADPVTEETDKEKTPVTESASFKEESNKVDELPNPEQKALAELKELVQDALNKHEFTAPPVKEEEKKPEAEAVAIAVAEEEKKEESAAEEPTTDAAPATTEPVKEEPPVPAAVVEEKKETTPVVEEKKEVPPVVEEKKETPASADPSETVEKVTEKVTADEEDGSKAVEEIKETIVEVTATSTAPVEEDAAVPAEEVAATEEEVSIWGIPLLADERSDVILLKFLRARDFKVKEAFAMLKSVVAWRKEFNIDELLEEDLSGLGLEKVVYNHGVDKEGHPVCYNAFGAFQDNELYQNTFADKEKMDKFLRWRIQFMEKSIRNLDFSPDGICTFVQVIDLKNSPGLYLYKKELRQATNRALQLLQDNYPEFVAKQVFINVPWWYPAYYRMINALFTTRTKSKFVFAGASRSAETLFKYIVPEQVPVQYGGLSREGEQEFTIADSATEDTVKPASKHTVEFPVTEKSNLVWEARVVGWDVCYGAEFVPSAEGGYTIIVEKSRKIAAANETVITNNYTAPEAGKVVLTFDNQTSKRKKLVYRSKTKSSD

SEQ ID NO: 2793 - protein, 623 aa, Solanum lycopersicum
MPSLFGGPLTTFEDSEKESEYGYVRKVSGPVVVADGMAGAAMYELVRVGHDNLIGEIIRLEGDSATIQVYEETAGLMVNDPVLRTRKPLSVELGPGILGNIFDGIQRPLKTIAKRSGDVYIPRGVSVPALDKDILWEFEPKKIGEGDILTGGDLYANVFENSLMEHHVALPPDAMGKITYIAPAGHYSLKDTVLELEFQGVKKQFTMLQSWPVRTPRPVAAKLAADTPLLTGQRVLDALFPSVLGGTCAIPGAFGCGKTVISQALSKYSNSDTVVYVGCGERGNEMAEVLMDFPQLTMTLPDGREESVMKRTTLVANTSNMPVAAREASIYTGITIAEYFRDMGYNVSMMADSTSRWAEALREISGRLAEMPADSGYPAYLAARLASFYERAGKVKCLGGPERNGSVTIVGAVSPPGGDFSDPVTSATLGIVQVFWGLDKKLAQRKHFPSVNWLISYSKYSGALESFYEKFDPDFINIRTKAREVLQREDDLNEIVQLVGKDALAETDKITLETAKLLREDYLAQNAFTPYDKFCPFYKSVWMLRNIIHFYNLANQAVERGAGMDGQKMTYTLIKHRLGDLFYRLVSQKFEDPAEGEDALVAKFKKLHDDLTAGFRNLEDETR

SEQ ID NO: 2794 - protein, 911 aa, Solanum lycopersicum
MNPEKFTHKTNEAIAEAHELAVSAGHAQLTPLHMALALLSDHSGIFWQAIVNAAGSEETANGVERVFNQAKKKIPSQSPAPDQVPASTSLIKVLRRAQSLQKSRGDSHLAVDLLILGLLEDSQIADLLKDSGLSAARVKSEVEKLRGKDGKKVESATGDTTFQALKTYGRDLVEQAGKLDPVIGRDEEIRRVIRILSRRTKNNPVLIGEPGVGKTAVVEGLAQRIVRGDVPSNLADVRLIALDMGALIAGAKYRGEFEERLKAVLKEVEDAEGKVILFIDEIHLVLGAGRTEGSMDAANLFKPMLARGQLRCIGATTLEEYRKYVEKDAAFERRFQQVYVAEPSVPDTISILRGLKEKYEGHHGVKIQDRALVIAAQLSARYITGRHLPDKAIDLVDEACANVRVQLDSQPEEIDNLERKRIQLEVEHHALEKEKDKASKARLVEVRKELDDLRDKLQPLMMRYKKEKERVDELRRLKQKRDELTYALQEAERRYDLARAADLRYGAIQEVESAIANLESSTDESTMLTETVGPDQIAEVVSRWTGIPVSRLGQNEKEKLIGLADRLHLRVVGQDQAVKAVAEAVLRSRAGLGRPQQPTGSFLFLGPTGVGKTELAKALAEQLFDDDKLMVRIDMSEYMEQHSVARLIGAPPGYVGHEEGGQLTEAVRRRPYSVVLFDEVEKAHPAVFNALLQVLDDGRLTDGQGRTVDFTNTVIIMTSNLGAEYLLSGLSGKCTMEKAREMVMQEVRKQFKPELLNRLDEIVVFDPLSHEQLRQVCRHQLKDVASRLAERGIALGVTEAALDVILAQSYDPVYGARPIRRWLEKKVVTELSKMLVKEEIDENSTVYIDAGRGGKDLTYRVENNGGLVNAATGQKSDVLIQLPNGPRNDAAQAVKKMRIEEIDDEDDEMAD

SEQ ID NO: 2795 - protein, 460 aa, Vitis vinifera
MILPHSFISLSFHLHFRTLSLLYIAPSHTLSLPHFIFPSLFPSLEREHPKPIVFGDWLGSLFLLRLRFSLLSVSAVFKRGNKRMADTEDIQPLVCDNGTGMVKAGFAGDDAPRAVFPSIVGRPRHTGVMVGMGQKDAYVGDEAQSKRGILTLKYPIEHGIVSNWDDMEKIWHHTFYNELRVAPEEHPVLLTEAPLNPKANREKMTQIMFETFNVPAMYVAIQAVLSLYASGRTTGIVLDSGDGVSHTVPIYEGYALPHAILRLDLAGRDLTDALMKILTERGYMFTTTAEREIVRDMKEKLAYVALDYEQELETAKSSSSVEKNYELPDGQVITIGAERFRCPEVLFQPSLIGMEAAGIHETTYNSIMKCDVDIRKDLYGNIVLSGGSTMFPGIADRMSKEITALAPSSMKIKVVAPPERKYSVWIGGSILASLSTFQQMWISKGEYDESGPSIVHRKCF

SEQ ID NO: 2796 - protein, 377 aa, Vitis vinifera
MAETEDIQPLVCDNGTGMVKAGFAGDDAPRAVFPSIVGRPRHTGVMVGMGQKDAYVGDEAQSKRGILTLKYPIEHGIVSNWDDMEKIWHHTFYNELRVAPEEHPVLLTEAPLNPKANREKMTQIMFETFNTPAMYVAIQAVLSLYASGRTTGIVLDSGDGVSHTVPIYEGYALPHAILRLDLAGRDLTDALMKILTERGYSFTTTAEREIVRDMKEKLAYIALDYEQELETAKTSSSVEKSYELPDGQVITIGAERFRCPEVLFQPSMIGMEAAGIHETTYNSIMKCDVDIRKDLYGNIVLSGGSTMFPGIADRMSKEITALAPSSMKIKVVAPPERKYSVWIGGSILASLSTFQQMWISKGEYDESGPSIVHRKCF

SEQ ID NO: 2797 - protein, 377 aa, Vitis vinifera
MADGEDVQPLVCDNGTGMVKAGFAGDDAPRAVFPSIVGRPRHTGVMVGMGQKDAYVGDEAQSKRGILTLKYPIEHGIVSNWDDMEKIWHHTFYNELRVAPEEHPVLLTEAPLNPKANREKMTQIMFETFNTPAMYVAIQAVLSLYASGRTTGIVLDSGDGVSHTVPIYEGYALPHAILRLDLAGRDLTDYMMKILTERGYSFTTTAEREIVRDMKEKLSYIALDYEQELETAKTSSSVEKSYELPDGQVITIGAERFRCPEVLFQPSFIGMEASGIHETTYNSIMKCDVDIRKDLYGNIVLSGGTTMFPGIADRMSKEITALAPSSMKIKVVAPPERKYSVWIGGSILASLSTFQQMWIAKAEYDESGPSIVHRKCF

SEQ ID NO: 2798 - protein, 445 aa, Vitis vinifera
MATIKVIKARQIFDSRGNPTVEVDVTLSDGTFARAAVPSGASTGIYEALELRDGGSDFLGKGVLKAVENVNAIIAPALIGKDPTEQVKIDNFMVQQLDGTVNEWGWCKQKLGANAILAVSLAVCKAGAMVNKIPLYKHIANLAGNKKLVLPVPAFNVINGGSHAGNKLAMQEFMILPLGASSFKEAMKMGVEVYHHLKSVIKKKYGQDATNVGDEGGFAPNIQENKEGLELLKTAIAKAGYTGKVVIGMDVAASEFYDNKDKTYDLNFKEENNDGSQKISGDSLKNVYKSFVNDYPIVSIEDPFDQDDWEHYAKMTSEIGEKVQIVGDDLLVTNPKRVEKAIKEKACNALLLKVNQIGSVTESIEAVKMSKRAGWGVMASHRSGETEDTFIADLSVGLATGQIKTGAPCRSERLAKYNQLLRIEEELGSAAVYAGAKFRAPVEPY

SEQ ID NO: 2799 - protein, 559 aa, Vitis vinifera
MGSSGFSWKLADHPKLPKGKILGMVVLDGWGEANPDQYNCIHVADTPTMDSLKKGAPEKWRLVKAHGSAVGLPTEDDMGNSEVGHNALGAGRIYAQGAKLVDFALDSGKIYEGEGFKYIKECFETGTLHLIGLLSDGGVHSRIDQLQLLLKGASENGAKRIRVHILTDGRDVLDGSSVGFVETLENDLAKLREKGVDAQIASGGGRMYVTMDRYENDWEVVKRGWDAQVLGEAPHKFRSAVEAVKKLREDTKASDQYIPPFVIVDENGKPVGPIVDGDAVVTFNFRADRMVMIAKSLEYEDFDKFDRVRFPKIHYAGMLQYDGELKLPNHYLVSPPEIERTSGEYLVHNGVRTFACSETVKFGHVTFFWNGNRSGYFDPSMEEYVEIPSDSGITFNVKPKMKAVEIAEKARDAILSRKFHQVRVNLPNGDMVGHTGDIEATIVACKAADEAVKIILDAIEQVGGIYVVTADHGNAEDMVKRNKSGQPLLDKTGKIQILTSHTLQPVPIAIGGPGLAAGVRFRNDVPGGGLANVAATVMNLHGYEAPSDYEPTLIEVIDN

SEQ ID NO: 2800 - protein, 853 aa, Vitis vinifera
MDFNRICLPLWVKFTVEELRRIMDYKHNIRNMSVIAHVDHGKSTLTDSLVAAAGIIAQEVAGDVRMTDTRQDEAERGITIKSTGISLYYEMSDESLKNYRGERQGNEYLINLIDSPGHVDFSSEVTAALRITDGALVVVDCVEGVCVQTETVLRQALGERIRPVLTVNKMDRCFLELQVDGEEAYQTFSRVIENANVIMATYEDPLLGDVQVYPEKGTVAFSAGLHGWAFTLTNFAKMYASKFGVDESKMMERLWGENFFDPSTRKWTTKNTGAPNCKRGFVQFCYEPIKQIINTCMNDQKDKLWPMLQKLGVTMKSDEKDLMGKALMKRVMQTWLPASTALLEMMIFHLPSPSTAQKYRVENLYEGPLDDIYATAIRNCDPEGPLMLYVSKMIPASDKGRFFAFGRVFSGKVSTGLKVRIMGPNYVPGEKKDLYVKSVQRTVIWMGKRQETVEDVPCGNTVAMVGLDQFITKNATLTNEKESDAHPIRAMKFSVSPVVRVAVQCKVASDLPKLVEGLKRLAKSDPMVVCSIEESGEHIIAGAGELHLEICLKDLQDDFMGGAEIVKSDPVVSFRETVLEKSCRTVMSKSPNKHNRLYMEARPLEEGLAEAIDDGRVGPRDDPKARSKILSEEFGWDKDLAKKIWCFGPETTGPNMVVDMCKGVQYLNEIKDSVVAGFQWASKEGALAEENMRGICFEVCDVVLHADAIHRGGGQVIPTARRVIYASQLTAKPRLLEPVYLVEIQAPEQALGGIYSVLNQKRGHVFEEMQRPGTPLYNIKAYLPVVESFGFSGTLRAATSGQAFPQCVFDHWDVMSADPLEAGSTAAQLVADIRKRKGLKEQMTPLSEFEDKL

SEQ ID NO: 2801 - protein, 436 aa, Vitis vinifera
MVTIQFVKARQIFDSRGNPTVEVDIGLSNGAKVSAAVPSGASTGIYEALELRDGGSDYLGKGVSKAVANVNTIIGPALIGKDPSDQTGIDNFMVQQLDGTVNEWGWCKQKLGANAILAVSLAVCKAGAIVKNIPLYKHIANIAGNKHLVLPVPAFNVINGGSHEFMILPIGAPSFKEAMKMGVEVYHHLKAVIKKKYGQDATNVGDEGGFAPNIQENKEGLELLKTAIAKAGYTKEVVIGMDVAASEFYGTDKTYDLNFKEENNDGSEKISGDALKNLYKSFVNEYPISSIEDPFDQDDWEHYTKLTCEIGEKVQIVGDDLLVTNPKRVEKAIKEKACNALLLKVNQIGTVTESIEAVKMSKRAGWGVMASHRSGETEDTFIADLSVGLATGQIKTGAPCRSERLAKYNQLLRIEEELGADAVYAGANFRKPVEPY

SEQ ID NO: 2802 - protein, 952 aa, Vitis vinifera
MAEDLDKPLLDPENFNREGIDLERIPLEEVFEQLRTSRGGLSSEDAEARLIIFGPNKLEEKPENKFLKFLSFMWNPLSWVMEAAAVMAIVLANGGGEGPDWQDFVGILCLLIINSTISFIEENNAGNAAAALMARLAPKTKVLRDGHWQEQDAAILVPGDIISIKLGDIIPADARLLEGDPLKIDQSALTGESLPVTKRTGDEVFSGSTCKHGEIEAVVIATGVHSFFGKAAHLVDSTEVIGHFQKVLTSIGNFCICSIAVGMILEIIVMFPIQHRSYRNGINNLLVLLIGGIPIAMPTVLSVTLAIGSHRLSQQGAITKRMTAIEEMAGMDVLCSDKTGTLTLNRLTVDRNLIEVFAKDMDKDTVVLLAARASRLENQDAIDTAIINMLADPKEARANITEVHFLPFNPVDKRTAITYIDSNGNWIRASKGAPEQYPHILNLCQEKEEIAGKVHAIIDKFAERGLRSLGVAYQEVPEQTKESPGGPWTFCGLLPLFDPPRHDSAETIRRALNLGVCVKMITGDQLAIAKETGRRLGMGTNMYPSSSLLGREKDESEVLPVDELIEKADGFAGVFPEHKYEIVRILQEKKHVCGMTGDGVNDAPALKKADIGIAVADATDAARSAADIVLTEPGLSVIISAVLTSRAIFQRMKNYTIYAVSITIRIVLGFVLLALIWEYDFPPFMVLIIAILNDGTIMTISKDRVKPSPKPDSWKLNEIFATGVVIGTYLALVTVLFYWVIDSTTFFQTHFHVSTLKSTEEISSAIYLQVSIISQALIFVTRSQSWSFMERPGALLMCAFVVAQLVATLIAVYAEISFASISGIGWGWAGVIWIYSVIFYVPLDIIKFTVRYALSGEAWNLLFDRKTAFTSKKDYGKEDREAKWVLSQRTIQGLMSSELEINGRRSSLIAEQARRRAEIARLGEIHTLRGHVESVVRLKNLDINVIQAAHTV

SEQ ID NO: 2803 - protein, 485 aa, Vitis vinifera
MSLLVEKTSSGREYKVKDMSQADFGRLEIELAEVEMPGLMSCRTEFGPQQPFKGAKITGSLHMTIQTAVLIETLTALGAEVRWCSCNIFSTQDHAAAAIARDSAAVFAWKGETLQEYWWCTERALDWGPGGGPDLIVDDGGDATLLIHEGVKAEEEYAKSGKLPDPSSTDNAEFQIVLTIIRDGLKTDPKRYHKMKGRLVGVSEETTTGVKRLYQMQANGTLLFPAINVNDSVTKSKFDNLYGCRHSLPDGLMRATDVMIAGKVAVVCGYGDVGKGCAAALKQAGARVIVTEIDPICALQALMEGIPVQTIEDVVSEADIFVTTTGNKDIIMVDHMRKMKNNAIVCNIGHFDNEIDMLGLETYPGVKRITIKPQTDRWVFPDTNSGIIVLAEGRLMNLGCATGHPSFVMSCSFTNQVIAQLELWKEKASGKYEKKVYVLPKHLDEKVAALHLGKLGAKLTKLSKDQADYISVPIEGPYKPPHYRY

SEQ ID NO: 2804 - protein, 650 aa, Vitis vinifera
MAGKGEGPAIGIDLGTTYSCVGVWQHDRVEIIANDQGNRTTPSYVAFTDTERLIGDAAKNQVAMNPINTVFDAKRLIGRRFSDASVQSDIKHWSFKVVPGPGDKPMITVTYKGEDKQFAAEEISSMVLIKMREIAEAYLGSTVKNAVVTVPAYFNDSQRQATKDAGVIAGLNVMRIINEPTAAAIAYGLDKKATSVGEKNVLIFDLGGGTFDVSLLTIEEGIFEVKATAGDTHLGGEDFDNRMVNHFVQEFKRKHKKDITGNARSLRRLRTSCERAKRTLSSTAQTTIEIDSLYEGIDFYSTITRARFEELNMDLFRKCMEPVEKCLRDAKMDKSTIHDVVLVGGSTRIPKVQQLLQDFFNGKELCKSINPDEAVAYGAAVQAAILSGEGNEKVQDLLLLDVTPLSLGLETAGGVMTVLIPRNTTIPTKKEQVFSTYSDNQPGVLIQVYEGERTRTRDNNLLGKFELSGIPPAPRGVPQITVCFDIDANGILNVSAEDKTTGQKNKITITNDKGRLSKEEIENMVQEAEKYKSEDEEHKKKVEAKNALENYAYNMRNTVKDEKISAKLPPADKKKIEDAVEQAIQWLDSNQLAEADEFEDKMKELESICNPIIAKMYQGAGGPDAGAGAMDDDGPSAGGSGAGPKIEEVD

SEQ ID NO: 2805 - protein, 358 aa, Vitis vinifera
MTCYKGKYHDELIANAAYIGTPGKGILAADESTGTIGKRLASINVENVEGNRRALRELLFCTPGALQYLSGVILFEETLYQKTASGKPFVDVMKEGGVLPGIKVDKGTVVLTGTDGETTTQGLDGLGERCAKYYAAGARFAKWRAVLKIGPTEPSELAIHENAYGLARYAMICQENGLVPIVEPEILVDGPHDIEKCAYVTERVLAACYKALNDHHVLLEGTLLKPNMVTPGSEAKKVSPEVVAEYTVRTLQRTVPAAVPAIVFLSGGQSEEEATLNLNAMNKLKGKKPWNLSFSFGRALQQSTLKAWSGKEENVVKARGAFLVRCKANSEATLGTYKGDAKLGEGAAESLHVKDYKY

SEQ ID NO: 2806 - protein, 401 aa, Vitis vinifera
MATKRSVGDLKEADLKGKRVFVRVDLNVPLDESLKITDDTRVRAAVPTIKYLMGHGAKVILASHLGRPKGVTPKYSLKPLVPRLSELLGVEVKMANDCIGEEVKILVAKIPEGGVLLLENVRFYKEEEKNDPEFAKKLASLADLYVNDAFGTAHRAHASTEGVAKYLKPSVAGFLMQKELDYLVGAVSNPKRPFAAIVGGSKVSSKIGVIESLLGKVDVLLLGGGMIFTFYKAQGYGVGSSLVEEDKLDLATSLLEKAKSKGVSLLLPADVVIADKFAADANSKVVPASCIPDGWMGLDIGPDSIKTFGESLDTTKTIIWNGPMGVFEFDKFALGTEAIAKKLADLSEKGVTTIIGGGDSVAAVEKVGLAEKMSHISTGGGASLELLEGKTLPGVLALDDA

SEQ ID NO: 2807 - protein, 447 aa, Vitis vinifera
MGKEKVHINIVVIGHVDSGKSTTTGHLIYKLGGIDKRVIERFEKEAAEMNKRSFKYAWVLDKLKAERERGITIDIALWKFETTRYYCTVIDAPGHRDFIKNMITGTSQADCAVLIIDSTTGGFEAGISKDGQTREHALLAFTLGVKQMICCCNKMDATTPKYSKARYDEIVKEVSSYLKKVGYNPDKIPFVPISGFEGDNMIERSTNLDWYKGPTLLEALDMINEPKRPTDKPLRLPLQDVYKIGGIGTVPVGRVETGVLKPGMVVTFGPSGLTTEVKSVEMHHESLPEALPGDNVGFNVKNVAVKDLKRGFVASNSKDDPAKEAANFTSQVIIMNHPGQIGNGYAPVLDCHTSHIAVKFAEILTKIDRRSGKELEKEPKFLKNGDAGFVKMIPTKPMVVETFSEYPPLGRFAVRDMRQTVAVGVIKSVEKKDPSGAKVTKSAAKKK

SEQ ID NO: 2808 - protein, 380 aa, Vitis vinifera
MSSTAGQVIRCKAAVAWEAGKPLVIEEVEVAPPQVMEVRLKILFTSLCHTDVYFWEAKGQTPLFPRIFGHEAGGIVESVGEGVTDLQPGDHVLPVFTGECKECRHCKSEESNMCDLLRINTDRGVMLSDNKSRFSINGKPVYHFVGTSTFSEYTVVHVGCVAKINPAAPLDKVCVLSCGISTGLGATLNVAKPSKGSSIAIFGLGAVGLAAAEGARIAGAARIIGIDLNPKRFNDAKKFGVTEFLNPKDHDKPIQEVIAEMTGGGVDRSVECTGNVNAMISAFECVHDGWGVAVLVGVPNKDDSFKTHPVNLLNERTLKGTFFGNYKPRSDLPSVVEKYMNKELEVEKFITHEVPFAEINKAFEYMLSGDGLRCIIRMDA

SEQ ID NO: 2809 - protein, 649 aa, Vitis vinifera
MAGKGEGPAIGIDLGTTYSCVGVWQHDRVEIIANDQGNRTTPSYVAFTDTERLVGDAAKNQVAMNPINTVFDAKRLIGRRFSDATVQSDIKLWPFKVVAGPGDKPMIVVNYKGEEKQFAAEEISSMVLMKMREIAEAYLGSAVKNAVVTVPAYFNDSQRQATKDAGVIAGLNVMRIINEPTAAAIAYGLDKKATSVGEKNVLIFDLGGGTFDVSLLTIEEGIFEVKATAGDTHLGGEDFDNRMVNHFVQEFKRKHKKDISGNPRALRRLRTACERAKRTLSSTAQTTIEIDSLYEGVDFYTTITRARFEELNMDLFRKCMEPVEKCLRDAKMDKSSVHDVVLVGGSTRIPKVQQLLQDFFNGKELCKSINPDEAVAYGAAVQAAILSGEGNDKVQDLLLLDVTPLSLGLETAGGVMTVLIPRNTTIPTKKEQVFSTFSDNQPGVLIQVYEGERTRTRDNNLLGKFELSGIPPAPRGVPQITVCFDIDANGILNVSAEDKTTGQKNKITITNDKGRLSKEEIEKMVQEAEKYKSEDEEHKKKVDAKNALENYAYNMRNTVKDEKIGAKLPPADKKKIEDAIEQAIQWLDNNQLAEADEFEDKMKELESICNPIIAKMYQGAGGPDMGGGMDEDGPSAGGSGAGPKIEEVD

SEQ ID NO: 2810 - protein, 340 aa, Vitis vinifera
MESSDKKIKIGINGFGRIGRLVARVALQSNDVELVAVNDPFITTDYMTYMFKYDSVHGHWKHHDVKVKDSKTLLFGEKSVTVFGVRNPEEIPWAETGADYVVESTGVFTDKDKAAAHLKGGAKKVIISAPSKDAPMFVMGVNEKEYKPDIDIVSNASCTTNCLAPLAKVINDRFGIVEGLMTTVHAITATQKTVDGPSSKDWRGGRAASFNIIPSSTGAAKAVGKVLPALNGKLTGMSFRVPTVDVSVVDLTVRLEKSATYDEVKAAIKEESEGKLKGILGYTEDDVVSTDFIGDSRSSIFDAKAGIALNANFLKLVSWYDNEWGYSSRVIDLIRHMASV

SEQ ID NO: 2811 - protein, 1052 aa, Vitis vinifera
MAGNDWINSYLEAILDVGPGLDDAKTSLLLRERGRFSPTRYFVEQVITGFDETDLHRSWVRAAATRSPQERNTRLENMCWRIWNLARQKKQLEGEEAQRIAKRRLERDRGRREAIADMSEDLSEGEKGDTVSDISAHGDSIRGRMPRISSVDAMETWVSYQKGKKLYIVLISLHGLIRGENMELGRDSDTGGQVKYVVELARALGSMPGVYRVDLLTRQVSSPEVDWSYGEPTEMLTPLNSESFMEDMGESSGSYIIRIPFGPKDKYVEKELLWPYIPEFVDGALNHIIQMSKVLGEQIGDGQPVWPVAIHGHYADAGDSAALLSGALNVPMLFTGHSLGRDKLEQLLKQGRISRDEINTTYKIMRRIEAEELALDASEIVITSTRQEIEQQWRLYDGFDPILERKLRARIRRNVSCYGRFMPRMVIIPPGMEFHHIVPHDGDMDGETEGNEDHPRTPDPVIWSEIMRFFTNPRKPMILALARPDPKKNITTLVKAFGECRPLRELANLTLIMGNRDGIDEMSSTSASVLLSILKLIDKYDLYGQVAYPKHHKQSDVPDIYRLAAKTKGVFINPAFIEPFGLTLIEAAAYGLPIVATRNGGPVDIHRVLDNGLLVDPHDQQSIADALLKLVADKQLWAKCRQNGLKNIHLFSWPEHCKTYLTKIASCKPRHPQWQRTDDGTENSDTDSPGDSLRDIQDISLNLKFSLDGHKNEASGNPENSDENAVDGKSKLENAVLTWSKGFVRDTRKAGFTEKSDQNTGTGKFPALRRRKHIFVIAVDCDTNTDTLETAGKILEAFGKEKTEGSVGFILSTSMSISEVHSFLVSGGLSPSDFDAFVCNSGSDLYYSSLTSEDSPFVLDLYYHSHIEYRWGGEGLRKSLVRWTASINDKMADNERIVVENEQVLTEYCYAFKVQKPGMVPPVKELRKLMRIHALRCHVIYCQNGTKLNVIPIMASRSQALRYLYVRWGVDLSNIVVFVGESGDTDYEGLLGGVHKTVILKGVCASNQLHANRTYPLTDVVPFDSPNIVQMTEDCSGSDIRSSLEKVGVLKG

SEQ ID NO: 2812 - protein, 811 aa, Vitis vinifera
MVTPKLGRSPSIRDRVEDTLSAHRNELVALLSRYVAQGNGILQPHHLIDELDNIVGDDVGRQKLSDGPFGQILKSTQEAIILPPFVAIAVRPRPGVWEYVRVNVHELSVDQLSVSEYLRFKEELVDGMFNDYYVLELDFEPFNASFPRPNRSSSIGNGVQFLNRHLSSIMFRNKESLEPLLDFLRVHKYKGQVIMLNDRIQSISRLQSALVKADDHLTKLPPETPFGEFEYEFQGMGFERGWGDTAQRVLEMIHLLLDILQAPDPSTLETFLGRIPMVFNVVILSPHGYFGQANVLGLPDTGGQVVYILDQVRALENEMLLRMQKQGLDVTPRILIVTRLIPDAKGTTCNQRLERVSGTEHSHILRVPFRTDKGILRKWISRFDVWPYLETFAEDAASEIAAELQGVPELIIGNYSDGNLVASLLASKLGVTQCTIAHALEKTKYPDSDIYWKNFDDKYHFSCQFTADLIAMNNADFIITSTYQEIAGSKNTVGQYESHTAFTLPGLYRVVHGIDVFDPKFNIVSPGADMCIYFPYSDVEKRLTALHGSIEKLLYDPEQNEEHIGMLNDRSKPIIFSMARLDQVKNITGLVECYAKNAKLREMANLVVVAGYNDVKKSNDREEIVEIEKMHDLMKEYNLHGQFRWMSSQTNRARNGELYRYIADTRGIFVQPAFYEAFGLTVVEAMTCGLPTFATCHGGPAEIIENGVSGFHIDPYHPDQVATTMVDFFEKCKEDSSHWNKISDAGLQRIYERYTWKIYSERLMTLAGVYGFWKYVSKLSRRETRRYLEMFYTLKFRDLAKSVPLAIDDQH

SEQ ID NO: 2813 - protein, 206 aa, Vitis vinifera
MEEEHHHSKTHECETTVVAEEAAVETKDRGIFDFLGKKEEEKPQEEVIVTDFEKVTISEPEPKVEEEEEKKHGLLEKLHRSDSSSSSSSEEEGEGGEKKKKKKKDKKKKEEDTCVPVEKCDEVVPPQPEEKKGFLDKIKEKLPGQHKKAEEVPPPPPPPAECSPSSETHEGEVKEKKGILEKIKEKLPGYHPKTEEEKKEKEKDCE

SEQ ID NO: 2814 - protein, 337 aa, Vitis vinifera
MGKIKIGINGFGRIGRLVARVALQRDDVELVAVNDPFITTDYMTYMFKYDSVHGQWKHHELKVKDSNTLLFGEKPVTVFGIRNPEEIPWGETGAEFVVESTGVFTDKDKAAAHLKGGAKKVVISAPSKDAPMFVVGVNEKEYKPELHIVSNASCTTNCLAPLAKVINDRFGIVEGLMTTVHSITATQKTVDGPSMKDWRGGRAASFNIIPSSTGAAKAVGKVLPSLNGKLTGMAFRVPTVDVSVVDLTVRLEKAATYEQVKAAIKEESEGKMKGILGYTEDDVVSTDFIGDNRSSIFDAKAGIALNEKFLKIVAWYDNEWGYSSRVIDLIVHMASCK

SEQ ID NO: 2815 - protein, 621 aa, Vitis vinifera
MEALSKGSLKMRELRRSSSLMCGPNGTQTPPYFSRWEAMVMFKVSRVTTSPFDGQKPGTSGLRKKVKVFKQQNYLHNFVQSTFNALSQDKIRGMTLVVSGDGRYFSKDAIQIIIKMAAANGVRSVWVGQNGLLSTPAVSAVIRERVGKDGTKASGAFILTASHNPGGPNEDFGIKYNMENGGPAQEAITDKIYENTKSIKEYIIAEDLPDVDISAIGITNFTGPEGQFDVEVFDSAFDYVKLMKSIFDFQSIQKLLSSPKFTFCYDALHGVGGAYAKRIFVEELGAQESSLLNCVPKEDFGGGHPDPNLTYAKELVACMGLGKSDAKNEPPEFGAASDGDADRNMILGKRFFVTPSDSVAIIAANAVDAIPYFSAGLKGVARSMPTSAALDVVAKHLNLKFFEVPTGWKFFGNLMDAGLCSICGEESFGTGSDHIREKDGIWAVLAWLSILAYENKENLGGAKLVTVEEIVRNHWATYGRHYYTRYDYENVDAGAAKELMAYLVKLQSSLPEVNKIIKGIHSDVSNVAKADEFEYKDPVDGSISKHQGIRYMFEDGSRLIFRLSGTGSEGATIRVYIEQYEKDSSKTGRDSQEALGPLVEVALKLSKMQEFTGRSAPTVIT

SEQ ID NO: 2816 - protein, 812 aa, Vitis vinifera
MSEFNEIPLHGTLHATIFEIDRLHSGGAPKFFRKLVENIEETVGFGKGTSKLYATIDIGRARVGRTRMIENEPSNPRWYESFHIYCAHMAGHIIFTVKDDNPIGATLIGRASVPIQEILGGEEVDKWVEIVNEELKPIHGGSKIHVKLQYFEVTADRSWGRGIRSLKFPGVPFTFFSQRKGCHVSLYQDAHVPDNFVPKIPLADGKYYEPRRCWEDVFDAINNAKHLIYITGWSVYTEITLVRDSRRPKPGGDLTIGELLKKKASEGVRVLMLVWDDRTSVPLLKKDGLMGTHDEETEHYFHDTDVHCVLCPRNPDDGGSIVQDLQISTMFTHHQKIVVVDSEMPSGGSEKRRIVSFVGGIDLCDGRYDTQFHSLFRTLDTAHHDDFHQPNFEGASIQKGGPREPWHDIHSRLEGPIAWDVLFNFEQRWRKQGGKDILLQLRDLDDVIIPPSPVMFPDDQEVWNVQLFRSIDGGAAFGFPETPEEAARAGLVSGKDNIIDRSIQDAYINAIRRAKDFIYIENQYFLGSSFGWAPDEGIKIEDVGALHLIPKELSLKIASKIEAGEKFTVYIVVPMWPEGMPESGSVQAILDWQRRTMEMMYKDIIKALADKGIEDDPRNYLTFFCLGNREVKKSGEYEPSEHPEPDTDYSRAQEARRFMIYVHAKMMIVDDEYIIIGSANINQRSMDGARDSEIAMGGYQPYHLASRQPARGQIHGFRMSLWYEHLGMLDESFLQPESKECIQKVNQIAEKYWDLYASETLEHDLPGHLLRYPIAVSCGGDITELPGAEFFPDTKARVLGTKSEYLPPILTT

SEQ ID NO: 2817 - protein, 413 aa, Vitis vinifera
MAGVAPEGSQFDTRNYDAKMTELLSTDGQDFFTSYDEVYDSFDSMGLQENLLRGIYAYGFEKPSAIQQRGIVPFCKGLDVIQQAQSGTGKTATFCSGILQQLDYGLVECQALVLAPTRELAQQIEKVMRALGDYLGVKVHACVGGTSVREDQRILSSGVHVVVGTPGRVFDMLRRQSLRPDYIKMFVLDEADEMLSRGFKDQIYDIFQLLPSKVQVGVFSATMPPEALEITRKFMNKPVRILVKRDELTLEGIKQFYVNVDKEEWKLETLCDLYETLAITQSVIFVNTRRKVDWLTDKMRSRDHTVSATHGDMDQNTRDIIMREFRSGSSRVLITTDLLARGIDVQQVSLVINFDLPTQPENYLHRIGRSGRFGRKGVAINFVTRDDERMLFDIQRFYNVVIEELPSNVADLL

SEQ ID NO: 2818 - protein, 591 aa, Vitis vinifera
MESTLKDIRDGASVLDLDPKATVGGGVEDLYGEDFATEDQLVTPWTVSVASGYSLLRDPRHNKGLAFNDKERDAHYLCGLLPPVVSTQELQERKLMNSIRQYQVPLQKYMAMMDLQERNERLFYKLLIDNVEELLPVVYTPTVGEACQKYGSIFRRPQGLYISLKEKGKILEVLKNWPERRIQVIVVTDGERILGLGDLGCQGMGIPVGKLSLYTALGGVRPSACLPITIDVGTNNEKLLANEFYIGLKQRRATGKEYSEFLQEFMSAVKQNYGEKVLIQFEDFANHNAFDLLAKYGTTHLVFNDDIQGTASVVLAGIVSALRLLGGTLADHKFLFLGAGEAGTGIAELIALEMSKQTKCPIEETRKKIWLVDSKGLIVSSRKDSLQQFKKPWAHEHEPVKDLLHAVKVIKPTVLIGSSGVGKAFTKEVIEAMASCNEKPLILALSNPTSQSECTAEEAYTWTQGRAIFASGSPFDPVEYNGKTFVPGQANNAYIFPGLGMGLVISGAIRVHDEMLLAASEALARQVTQENFDKGLIYPPFSNIRKISAHIAANVAAKAYELGLATRLPQPENLVKYAESCMYSPVYRSYR

SEQ ID NO: 2819 - protein, 606 aa, Vitis vinifera
MAEDGKKPVSEEAQKPVAEASVVEEVVAVAEVTAPPPAVPEAEEAAEKLKEEEEVVEKLEEEVAAAEEEKPKVVEEGEKMTESVSFKEESNVVGDLPESQRKALEELKVLVREALEKHEFTAPPPPPPPPAKEEEKAPATEEEPKTEAPAEPAPEVVCPPPVEESEKKEEKEEEKKEEEKKEEEKKEEEKVAPPEPAEPVVVAAVVETVTAVVVDEDGTKTVEAIEETIVVAPPAPPAEEAAAVVEEVTPPPPAEEVPPPPPPPPEEVEIWGIKLFDDDRTDVVLLKFLRARDFKPKEALTMLKNTVLWRKSFGIETLLGDDLGTHLESVVFMEGSGKEGHPVCYNAYGKFLNKELYQNTFSDEEKRQNFLRWRIQFLEKSIRKLDFSPNGINTIIQVNDLKNSPGPFKRELRQSTNQALHLLQDNYPEFVAKQIFINVPWWYLAFNRMISPFLTQRTKSKFVFAGPSKSAETLFKYIAPEQVPVQYGGLKRDGDTEFSICDPVTLVTIKPGCKHVIEFPYSEPCQLIWELRVIGWDVTYGAEFVPTVEGGYTVIVQKARKIAPTDEPVISNSFKIGEPGKVILTIDNQTSKKKKLLYRSKTQPCD

SEQ ID NO: 2820 - protein, 806 aa, Vitis vinifera
MSNQAESSDSKGTKRDFSTAILERKKAANRLVVDEAVNDDNSVVALHPDTMEKLQLFRGDTILIKGKKRKDTICIALADDTCDEPKIRMNKVVRSNLRVRLGDVVSVHQCPDVKYGKRVHILPVDDTIEGVTGNLFDAYLKPYFLEAYRPVRKGDLFLVRGGMRSVEFKVIETDPAEYCVVAPDTEIFCEGEPVRREDEDRLDEVGYDDVGGVRKQMAQIRELVELPLRHPQLFKSIGVKPPKGILLYGPPGSGKTLIARAVANETGAFFFCINGPEIMSKLAGESESNLRKAFEEAEKNAPSIIFIDEIDSIAPKREKTHGEVERRIVSQLLTLMDGLKSRAHVIVIGATNRPNSIDPALRRFGRFDREIDIGVPDEVGRLEVLRIHTKNMKLSEDVDLERIAKDTHGYVGADLAALCTEAALQCIREKMDVIDLEDESIDAEILNSMAVTDEHFKTALGTSNPSALRETVVEVPNVSWEDIGGLENVKRELQETVQYPVEHPEKFEKFGMSPSKGVLFYGPPGCGKTLLAKAIANECQANFISVKGPELLTMWFGESEANVREIFDKARQSAPCVLFFDELDSIATQRGSSVGDAGGAADRVLNQLLTEMDGMSAKKTVFIIGATNRPDIIDPALLRPGRLDQLIYIPLPDEDSRHQIFKACLRKSPVSKDVDLRALAKYTQGFSGADITEICQRACKYAIRENIEKDIERERRRRENPEAMEEDVDEEVAEIKAAHFEESMKYARRSVSDADIRKYQAFAQTLQQSRGFGTEFRFSETSTGAAGSDPFAASAGGAADEDDLYS

SEQ ID NO: 2821 - protein, 309 aa, Vitis vinifera
MATLSVTEDCEQLRKAFAGWGTNEGLIISILAHRNAAQIKSIRQTYAQTYGEDLLKDLNKELSNDFERVVLLWTLDPAERDAFLANEATKRWTSSNQVLVEIACTRTSQQLLLAKQAYHARFKRSLEEDVAYHTSGDFRKLLVPLVGTYRYEGEEVNMTLAKSEAKILHEKISEKAYNHEDVIRILATRSKAQINATLNHYKNEFGNDINKDLKTDPKDEFLAILRATVKCLTRPEKYFEKVLRLAINKRGTDEGALTRVVTTRAEIDMKIIKEEYHKRNSVTLDHAIGKDTTGDYEKMLLALIGHGDA

SEQ ID NO: 2822 - protein, 451 aa, Vitis vinifera
MEFSPRAAELTTLLESRITNFYTNLKVDEIGRVVSVGDGIARVYGLNEIQAGEMVEFASSVKGIALNLDNENVGIVVFGSDTAIKEGDLVKRTGSIVDVPAGKAMLGRVVDALGVPIDGRGALSDHERRRVEVKAPGIIERKSMHEPMQTGLKAVDSLVPIGRGQRELIIGDRQTGKTAIAIDTILNQKLLNSKATSDSDTLYCVYVAIGQKRSTVAQLVQILSEANALEYSILVAATASDPAPLQFLAPYSGCAMGEYFRHNGMHALIIYDDLSKQAVAYRQMSLLLRRPPGREAFPGDLFYRGIRPAINVGLSVSRVGSAAQLKAMKQVCGSSKLELAQYREVAALAQFGSDLDAANQALLNRGARLTEVSKQPQYAPLPIEKQILVIYAAVNGFCDRMPLDRISQYERAIPSSIKPEFLQSLLEKGGLTNERKMEPDAFLKESALPYL

SEQ ID NO: 2823 - protein, 572 aa, Vitis vinifera
MDSENVDGVAHDLVSLLTREDRDFLVRNNGHQVKVESLKGKKIWLYFSASWCGPCRRFTPKLVEAYNELSSNDDFEIIFVSGDNDDESFNGYFSKMPWLAIPFSDSDARDQLNELFKVMGIPNLVMLDESGKVLSEDGVDIIQEYGVEAYPFTPEKIKEMKEKEETARKEQSLRSILVSQSRDYVISTDGKKVPVSELEGKFVGLFFSLSSYKACLEFTPTLVDVYEKLRAKGESFEIVMISLDDEEESFKKYFGSMPWLALPFRDKSCEKLARYFELSALPTLVVIGPDGKTLHSNVAEAIQEHGIQAYPFTPEKFAELEEIEKAKREAQTLESILVSGDRDFVIGKDGVKIPVSDLVGKNILLYFSAHWCPPCRAFLPKLIEAYQKIKTKDEAFEVIFISSDKDQTSFDEFFSGMPWLALPFGDKRKASLSRTFKVHGIPSLIAIGPTGRTVTTEARNLVMIHGADAYPFTEEHIREIEAQYEEMAKGWPEKVKHALHEEHELVLTKRRVYVCNGCEKQGHLWSFYCEECDFDLHPKCALEEDKGSKDDEMEKASPGEGWKCDGEVCYKA

SEQ ID NO: 2824 - protein, 1009 aa, Vitis vinifera
MYMATSPYSSLALLRASRVRFAPSISRVSLSSSSSSSSPHPPCPSRIPASASSSSLPFSTISGGYRSLGFLSAFRSRRWSHGVDWRSPVSLRAQIRAAAPVIERFERKMATIASEHPFKGILTSVPKPGGGEFGKFYSLPALNDPRIDKLPYSIRILLESAIRNCDNFQVTKDDVEKIIDWENTSPKQVEIPFKPARVLLQDFTGVPAVVDLACMRDAMNNLGSDSNKINPLVPVDLVIDHSVQVDVTRSENAVQANMDLEFQRNKERFSFLKWGSTAFRNMLVVPPGSGIVHQVNLEYLGRVVFNNDGILYPDSVVGTDSHTTMIDGLGVAGWGVGGIEAEAAMLGQPMSMVLPGVVGFKLSGKLCSGVTATDLVLTVTQMLRKHGVVGKFVEFYGEGMGELSLADRATIANMSPEYGATMGFFPVDHVTLQYLKLTGRSDETVAMIEAYLRANRMFVDYNEPQVERFYSSYLQLNLEDVEPCMSGPKRPHDRVPLKEMKTDWKACLDNKVGFKGFAVPKEAQDKVAKFSFHGQPAELKHGSVVIAAITSCTNTSNPSVMLGAGLVAKKASELGLEVKPWIKTSLAPGSGVVTKYLLQSGLQKYLNQQGFHIVGYGCTTCIGNSGDLDESVASAISENDIIAAAVLSGNRNFEGRVHALTRANYLASPPLVVAYALAGTVDIDFEKEPIGTGKDGKDVYFKDIWPTSEEIAEVVQSSVLPEMFKSTYEAITKGNPIWNQLSVHSSSLYSWDPNSTYIHEPPYFKNMTMNPPGPHGVKDAYCLLNFGDSITTDHISPAGSIHKDSPAAKYLIERGVAPKDFNSYGSRRGNDEVMARGTFANIRIVNKLLNGEVGPKTIHIPTGEKLYVFDAAMRYKADGHDTIVLAGAEYGSGSSRDWAAKGPMLQGVKAVIAKSFERIHRSNLVGMGIIPLCFKAGEDADTLGLTGHERYNIDLPSKISEIRPGQDVTVTTDNGKSFTCTVRFDTEVELEYFNHGGILPYAIRNLINQ

SEQ ID NO: 2825 - protein, 1705 aa, Vitis vinifera
MAAANAPISMKEALTLSSIGISPQFMTFTHVTMESDKYICVRETAPQNSVVIIDMSMPMQPLRRPITADSALMNPNSRILALKAQLPGTTQDHLQIFNIEMKAKMKSHQMPEQVVFWKWITPKMLGLVTQTSVFHWSIEGDSEPVKMFERTANLVNNQIINYRCDPSEKWLVLIGIAPGSPERPQLVKGNMQLFSVDQQRSQALEAHAASFASFKVLGNENPSTLICFASKTTNAGQITSKLHVIELGAQPGKPGFTKKQADLFFPPDFADDFPVSMQVSQKYGLIYVITKLGLLFVYDLETASAVYRNRISPDPIFLTAEASSIGGFYAINRRGQVLLATVNEATIVPFVSGQLNNLELAVNLAKRGNLPGAENLVVQRFQELFAQTKYKEAAELAAESPQGLLRTPDTVAKFQSVPVQSGQTPPLLQYFGTLLTRGKLNAFESLELSRLVVNQNKKNLLENWLAEDKLECSEELGDLVKTVDNDLALKIYIKARATPKVVAAFAERREFDKILIYSKQVGYTPDYLFLLQTILRSDPQGAVNFALMMSQMEGGCPVDYNTITDLFLQRNLIREATAFLLDVLKPNLPEHGFLQSKVLEINLVTFPNVADAILANGMFSHYDRPRIAQLCEKAGLYVRALQHYTELPDIKRVIVNTHAIEPQALVEFFGTLSREWALECMKDLLLVNLRANLQIIVQTAKEYSEQLGVEACIKLFEQFKSYEGLYFFLGSYLSSSEDPDIHFKYIEAAAKTGQIKEVERVTRESNFYDAEKTKNFLMETKLPDARPLINVCDRFGFVPDLTHYLYTNNMLRYIEGYVQKVNPGNAPLVVGQLLDDECPEDFIKGLILSVRSLLPVEPLVEECEKRNRLRLLTQFLEHLVSEGSQDVHVHNALGKIIIDSNNNPEHFLTTNPYYDSRVVGKYCEKRDPTLAVVAYRRGQCDDELINVTNKNSLFKLQARYVVERMDADLWEKVLSPDNEYRRQLIDQVVSTALPESKSPEQVSAAVKAFMTADLPHELIELLEKIVLQNSAFSGNFNLQNLLILTAIKADPSRVMDYINRLDNFDGPAVGDVAVEAQLYEEAFAIFKKFNLNVQAVNVLLDNIQSIERAVEFAFRVEEDAVWSQVAKAQLKEGLVSDAIESFIRADDATQFLDVIRAAENANVYHDLVRYLLMVRQKTKEPKVDSELIYAYAKIDRLGDIEEFILMPNVANLQNVGDRLYDEALYEAAKIIFAFISNWAKLACTLVKLRQFQGAVDAARKANSSKTWKEVCFACVDAEEFRLAQICGLNIIIQVDDLEEVSDYYQNRGCFNELISLMESGLGLERAHMGIFTELGVLYARYRPEKLMEHIKLFSTRLNIPKLIRACDEQQHWKELTYLYIQYDEFDNAATTIMNHSPEAWDHMQFKDVAVKVANVELYYKAVHFYLQEHPDLINDLLNVLALRVDHTRVVDIMRKAGHLHLVKPYMVAVQSTNVAAVNEALNGIHVEEEDYDRLRESIDMHDNFDQIGLAQKVEKHELLEMRRIAAYIYKKAGRWKQSIALSKKDNLYKDAMETCSQSGDRELAEELLVYFIEQKKKECFASCLFVCYDLIRPDVVLELAWMNNMIDFAFPYLLQFIREYTGKVDDLVKDRIEALKETKAKEEEEKDVVKQQNMYAQLLPLALPAPPMPGMGGAGMGGGFAAPPPMGGMGMPPMPPFGMPPMGSY

SEQ ID NO: 2826 - protein, 51 aa, Vitis vinifera; identical to SEQ ID NO: 615

SEQ ID NO: 2827 - protein, 114 aa, Vitis vinifera
MAEEGQVVGCHSVESWKEQFQHGIESKKLVVVDFTASWCGPCRVISPFLAELAKKMPNVIFLKVDVDELETVAKEWEVEAMPTFLFLKEGNVVDKVVGAKREELVQKTEKHATA

SEQ ID NO: 2828 - protein, 250 aa, Vitis vinifera
MGKSYPTVSEEYKKAVEKAKKKLRGLIAEKNCAPIMLRIAWHSAGTFDVKTRTGGPFGTMKKPEELAHGANNGLDIAVRLLEPIKEQFPIISYADFYQLAGVVAVEVTGGPEIPFHPGREDKPEPPPEGRLPDATKGCDHLRQVFVTQMGLSDKDIVALSGAHTLGRCHKERSGFEGPWTSNPLIFDNSYFKELLSGEKEGLLQLPSDKALLSDPAFRPLVEKYAADEDAFFEDYKEAHLKLSELGFADA

SEQ ID NO: 2829 - protein, 368 aa, Vitis vinifera
MRAVAFLLLLLCATCHIALSFTDGLLPNGNFELGPKPSDMKGTEVIGPHAIPEWETSGFIEYIKAGQKQGDMLLVVPEGAFAVRLGNEASIKQRVKVIKGMYYSITFSAARTCAQEERLNISVAPDWGVLPMQTLYSSNGWDSYAWAFQADYDVIEIVIHNPGVEEDPACGPLIDSVAFRALYPPRPSSKNLLKNGGFEEGPYVFPNTSWGVLIPPNIEDDHSPLPGWMVESLKAVKYIDSDHFSVPQEKRAVELVAGKESAIAQVARTIPGKTYALSFSVGDASNSCEGSMVVEAFAGRDTIKVPYESKGKGGFKRAVLRFVAVSNRTRIMFLSTFYTMRSDDYASLCGPVLDDVKLLSLRTPPRHI

SEQ ID NO: 2830 - protein, 434 aa, Vitis vinifera
MAEKHFKYVILGGGVSAGYAAREFAKQGVKPGELAIISKEAVAPYERPALSKAYLFPEGAARLPGFHVCVGSGGERLLPEWYKEKGIELILSTEIVKADLASKTLISAAGETFKYHILIIATGSTVIRLTDFRVEGADAKNILYLREINDADKLIDVIKAKKNGKAVIVGGGYIGLELSAVMKINNLDVCMVYPEPWCMPRLFTAGIAAFYEGYYANKGIKIIKGTVAVGFTSDANGEVKEVKLKDGRVLEADIVVVGVGGRPLTTLFKGQVEEEKGGIKTDEFFKTSVPDVYAVGDVATFPLKLYNEIRRVEHVDHARKSAEQAVKAIKASEEGKSVEEYDYLPYFYSRAFDLSWQFYGDNVGETVLFGDNNPASPKAKFGTYWIKDGKVVGAFLEGGTPEENTAIAKVARLQPAVENLDQLTKEGLTFACKI

SEQ ID NO: 2831 - protein, 489 aa, Vitis vinifera
MEKLSQLRSAVAGLDQISENEKSGFINLVSRYLSGEAQHIEWSKIKTPTDEVVVPYDTLAPTPEDSVETKKLLDKLVVLKLNGGLGTTMGCTGPKSVIEVRNGLTFLDLIVIQIENLNNKYGCKVPLLLMNSFNTHDDTLKIVQKYEKSNIEIHTFNQSQYPRVVVDDFSPLPSKGNTGKDGWYPPGHGDVFPALMNSGKLEKLLSQGKEYVFVANSDNLGAVVDLKILNHLIKNKNEYCMEVTPKTLADVKGGTLISYEGKVQLLEIAQVPDEHVNEFKSIEKFKIFNTNNLWVNLNAIKRLVEADALKMEIIPNPKEVDGIKVLQLETAAGAAIRFFDNAIGINVPRSRFLPVKATSDLLLVQSDLYTLSDGFVVRNKARKNPENPVIELGPEFKKVGNFLSRFKSIPSIIELDSLKVAGDVWFGSGVILKGKVTIEAKAGVKLEIPNGAVVANKGKVNIEAKAGVKLEIPNGAVVANKVINGPQDI

SEQ ID NO: 2832 - protein, 729 aa, Vitis vinifera
MAAASASSSLYLLPRTLNHHSSTPHPNRLSLSGLTPKTQALRTRHGRRARATVRAAAVETLQKADTSLVEKSINTIRFLSIDAVEKANSGHPGLPMGCAPMGHILYDEVMRYNPSNPYWFNRDRFVLSAGHGCMLQYALLHLAGYDSVKEEDLKSFRQWGSRTPGHPENFETPGVEVTTGPLGQGIANAVGLAAVEKHLAARFNKPDNEIVDHYTYVILGDGCQMEGISNEVCSLAGHWGLGKLIAFYDDNHISIDGDTEIAFTESVDTRFEGLGWHVIWVKNGNTGYDEIRAAIKEAKAVKDKPTLIKVTTTIGYGSPNKANSYSVHGSALGAKEVDATRKNLGWPHEPFHVPEDVKKHWSRHIPDGAALEAEWNAKFAEYEKKYKEEAAELKSIITGELPAGWDKALPTYTPESAADATRNLSQQCLNALAKVLPGLLGGSADLASSNMTLLKMFGDFQKGTPEERNVRFGVREHGMGAICNGIALHSLGLIPYCATFFVFTDYMRAAIRISALSEAGVIYVMTHDSIGLGEDGPTHQPIEHLASFRAMPNILMLRPADGNETAGAYKVAVVNRKRPSILALSRQKLPQLPGTSIAGVEKGGYAISDNSSGNKPDVILIGTGSELEIAAKAGDELRKEGKTVRVVSLVSWELFDDQSDAYKESVLPAAVTARVSIEAGSTFGWEKIVGSKGKAIGIDRFGASAPAGKIYKEFGITVEAVIEAAKAVW

SEQ ID NO: 2833 - protein, 765 aa, Vitis vinifera
MASHIVGYPRMGPKRELKFALESFWDKKSSAEDLQKVAADLRASIWKQMADAGTKYIPSNTFSYYDQVLDTTAMLGAVPPRYGWNGGEIEFDVYFSMARGNASVPAMEMTKWFDTNYHYIVPELGPEVKFSYASHKAVKEYQEAKALGVDTVPVFVGPVSYLLLSKPAKGVEKSFSLLSLLDKILPIYKEVVAELKAAGASSIQFDEPTLVMDLDSHKLQAFTHAYSELEASCSGLNVIVETYFADVPSEAFKTLTSLKGVTGFGFDLVRGTKTLDLIKVGFPTGKYLFAGVVDGRNIWANDLAASLSVLQELESIVGKDKLVVSTSCSLLHTAVDLINEPKLDQEIKSWLAFAAQKIVEVNALAKALAGHKEEAFFSDNASAQASRKSSPRVTNEAVQKAASALKGSDHRRATDVSARLDAQQRKLKLPVLPTTTIGSFPQTMDLRRVRREYKAKKISEEDYVKAIKEEINKVVKLQEELDIDVLVHGEPERNDMVEYFGEQLSGFAFTANGWVQSYGSRCVKPPIIYGDVSRPKPMTVFWSTMAQSMTARPMKGMLTGPVTILNWSFVRNDQPRFETCYQIALAIKDEVEDLEKAGITVIQIDEAALREGLPLRKSEHAFYLDWAVHSFRITNCGVQDTTQIHTHMCYSNFNDIIHSIIDMDADVITIENSRSDEKLLSVFREGVKYGAGIGPGVYDIHSPRIPSTEEIADRINKMLAVLETNILWVNPDCGLKTRKYTEVMPALKNMVAAAKLLRTELASAK

SEQ ID NO: 2834 - protein, 918 aa, Vitis vinifera
MFLCRKYSQSNFSKRKNNYASSNPFASILKTLEKPAGGEFGKYYSLPALGDPRIDRLPYSIRILLESAIRNCDEFQVKAKDVEKIIDWENSSPKQVEIPFKPARVLLQDFTGVPAVVDLACMRDAMNKLGGDSNKINPLVPVDLVIDHSVQVDVAGSENAVQANMELEFQRNKERFGFLKWGSNAFHNMLVVPPGSGIVHQVNLEYLGRVVFNTEGILYPDSVVGTDSHTTMIDGLGVAGWGVGGIEAEAAMLGQPMSMVLPGVVGFKLSGKLRDGVTATDLVLTVTQMLRKHGVVGKFVEFYGEGMRELSLADRATIANMSPEYGATMGFFPVDHVTLQYLKLTGRRDETVSMIESYLRANNMFVDYSQPQVEKVYSSYLELNLEDVEPCVSGPKRPHDRVPLKEMKADWHSCLDNKVGFKGFAIPKESQSKVVEFSYHGTPAQLRHGDVVIAAITSCTNTSNPSVMLGAALVAKKACELGLEVKPWIKTSLAPGSGVVTKYLEKSGLQKYLNQLGFHIVGYGCTTCIGNSGDINESVASAISENDMVAAAVLSGNRNFEGRVHPLTRANYLASPPLVVAYALAGTVDIDFEKEPIGVGKDGKQIFFRDIWPSTEEVANVVQSSVLPAMFKATYEAITQGNPMWNQLSVPSSTLYTWDPKSTYIHDPPYFKSMTMSPPGPHGVKDAYCLLNFGDSITTDHISPAGSIHKDSPAARYLMERGVDRRDFNSYGSRRGNDEIMARGTFANIRIVNKLLKGEVGPKTLHIPSGEKLSVFDAAMRYKSEGQDTIILAGAEYGSGSSRDWAAKGPMLLGVKAVIAKSFERIHRSNLVGMGIIPLCFKPGQDAETLGLTGHERYTIDLPSSVSEIKPGQDITVVTDNGKSFTCTMRFDTEVELAYFDHGGILQYAIRNLIGGRS

SEQ ID NO: 2835 - protein, 254 aa, Vitis vinifera
MGRKFFVGGNWKCNGTGEEVKKIVSTLNAGEVPSGDVVEVVVSPPFVFLPLVKSTLRPDFHVAAQNCWVKKGGAFTGEISAEMLVNLGIPWVIIGHSERRLLLNESNEFVGEKVAYALSKGLKVIACVGETLEQRESGSTMEVVAAQTKAIADKVSNWANVVLAYEPVWAIGTGKVATPAQAQEVHSELRNWFQANASPEVAATIRIIYGGSVSGANCKELAAKPDVDGFLVGGASLKPEFIDIIKSAEVKKNC

SEQ ID NO: 2836 - protein, 383 aa, Vitis vinifera
MTYNRNEDVSDEFDEYDPTPYGGGYDITVIYGRPLEPSEETCYPISSKSGDIDYDRPSYTSCSEPSAYGDEALENEYKSYARPKPRPVLGYAGPPPGQGGFGGSGDGGEYGYQPKPPSSFGGEGEYGSGHGRKPDYEEPSSEYGSGYGRKPECEQPSSEYGSGYGRKPEYEQPSSEYGSGYGRKPEYEQPSSEYGSGYGRKPEYEQPSTEYGSGYGRKPEYEQPSSEYGSGYGRRPEFEQPSSEYGSGYGRRPEYEAPSSEYGSGYGRKPSFGEEQGGGYGYGGEGSPRKPQYGRPSYESPEVEEPPRRPSYGRPSNEGQEEEGYEKPAYERRDDDDEPRKYGYGEEGYGRKKYGDDNSDDDEEKKSRKHHHHHHHRQSYDDE

SEQ ID NO: 2837 - protein, 429 aa, Vitis vinifera
MALYSLFRSAPSAAAAAAATVVDSSRPSDRCKVSCIGFNSNADSLKVQTTIFGTPCIGNSSSLQKCSARSLQPIKATATELPPTVQKSWSSGQTKIGINGFGRIGRLVLRVATSRDDIDVVAVNDPFVDAKYMAYMFKYDSTHGVFKGTIKVLDESTLEINGKQIKVTSKRDPSEIPWGDYGIDYVVESSGVFTTTEKASAHIKGGAKKVVISAPSADAPMFVVGVNETSYKPSMNIVSNASCTTNCLAPLAKVVHEEFGIVEGLMTTVHATTATQKTVDGPSMKDWRGGRGASQNIIPSSTGAAKAVGKVLPELNGKLTGMAFRVPTPNVSVVDLTCRLKKSATYEDVKAAVKYASEGPLKGILGYTDEDVVSNDFVGDSRSSIFDAKAGIGLSASFMKLVAWYDNEWGYSNRVLDLIEHMALVAASK

SEQ ID NO: 2838 - protein, 457 aa, Vitis vinifera
MQIFVKTLTGKTITLEVESSDTIDNVKAKIQDKEGIPPDQQRLIFAGKQLEDGRTLADYNIQKESTLHLVLRLRGGMQIFVKTLTGKTITLEVESSDTIDNVKAKIQDKEGIPPDQQRLIFAGKQLEDGRTLADYNIQKESTLHLVLRLRGGMQIFVKTLTGKTITLEVESSDTIDNVKAKIQDKEGIPPDQQRLIFAGKQLEDGRTLADYNIQKESTLHLVLRLRGGMQIFVKTLTGKTITLEVESSDTIDNVKAKIQDKEGIPPDQQRLIFAGKQLEDGRTLADYNIQKESTLHLVLRLRGGMQIFVKTLTGKTITLEVESSDTIDNVKAKIQDKEGIPPDQQRLIFAGKQLEDGRTLADYNIQKESTLHLVLRLRGGMQIFVKTLTGKTITLEVESSDTIDNVKAKIQDKEGIPPDQQRLIFAGKQLEDGRTLADYNIQKESTLHLVLRLRGGF

SEQ ID NO: 2839 - protein, 500 aa, Vitis vinifera
MRAVSSSWVWFVEKVMAPVSRIGLSGLAVMGQNLALNIAEKGFPISVYNRTTSKVDETVERAKQEGNLPLYGFHDPESFVNSIQKPRVIIMLVKAGAPVDQTIKTLSGYLEKGDCIIDGGNEWYENTERREKAMAELGLLYLGMGVSGGEEGARHGPSLMPGGSFEAYKYIEDILLKVAAQVPDSGPCVTYIGKGGSGNFVKMVHNGIEYGDMQLIAEAYDVLKSVGKLSNEELRNVFSEWNKGELLSFLIEITADIFSIKDDKGDGFLVDKVLDKTGMKGTGKWTVQQAADLSVAAPTIASSLDARFLSGLKEERVEAAKVFKSSGFENVLSDQTVDKKKLIDDVRQALYASKICSYAQGMNLIRAKSIEKGWDLKLGELARIWKGGCIIRAIFLDRIKKAYDRNADLANLLVDPEFAKEIVERQSAWRRVVCLAINSGISTPGMSSSLAYFDSYRRDRLPANLVQAQRDYFGAHTYERIDTTGSFHTEWFKIAQQSKI

SEQ ID NO: 2840 - protein, 606 aa, Vitis vinifera
MDTKISVTDASVPTNSNVGCPSNGIVSSILSSVPPSVISSSEATLGRHLARRLVQIGVSDVFSVPGDFNLTLLDHLIAEPGLKNIGCCNELNAGYAADGYARSRGVGACVVTFTVGGLSVLNAIAGAYSENLPVICIVGGPNSNDYGTNRILHHTIGLPDFSQEFRCFQTVTCYQAVVNNLEDAHEQIDTAISTALKESKPVYISISCNLPGIPHPTFSREPVPFCLAPKVTNQMGLEAAVEAAAAFLNKAVKPVMVGGPKLRVAKACEAFVELADACGYPVAVMPSAKGLVPECHPRFIGTYWGAVSTAFCAEIVESADSYIFAGPIFNDYSSVGYSLLLKKDKAILVQPERVVIGNGPAFGCILMKDFLKALSKRLKCNTTAYENYHRIYVPEGQPLRSDPKEPLRVNVLFQHIQKMLSSETAVIAETGDSWFNCQKLKLPKGCGYEFQMQYGSIGWSVGATLGYAQAVPNKRVISCIGDGSFQQVTAQDVSTMIRCEQRTIIFLINNGGYTIEVEIHDGPYNVIKNWNYTGLVDAIHNGEGKCWTTKVVCEEDLINAIETATGSKKDCFCFIEVIAHKDDTSKELLEWGSRVSAANSRPPNPQ

SEQ ID NO: 2841 - protein, 793 aa, Vitis vinifera
MRRWRDDGLKIEDSLRCSKMTVTPKISINEGNLVVQGKTILTGVPDNIVLTPGSGGGLVAGTFIGATASHSKSLHVFPMGTLDGLRFMCCFRFKLWWMTQRMGTCGKDVPFETQFMLIESKETTEGGEHDDAPTIYTVFLPLLEGQFRAVLQGNDKNEIEICLESGDTAVETNQGLHLVYMHSGTNPFEVIDQAVKAVEKHMQTFLHREKKKLPSFLDWFGWCTWDAFYTDVTAEGIEEGLQSLSKGGAPPKFLIIDDGWQQIGNENKDNNCVVQEGAQFANRLTGIKENEKFQKNGRNNEQVPGLKHVVEDAKQRHNVKFVYVWHALAGYWGGVKPAAAGMEHYECALAYPVQSPGVMGNQPDIVMDSLSVHGLGLVPPRTVFNFYNELHAYLASCGVDGVKVDVQNIIETLGAGHGGRVALTRSYQQALEASIARNFTDNGCISCMCHNTDGLYSTKQTAVVRASDDFYPRDPASHTIHISSVAYNTLFLGEFMQPDWDMFHSLHPAAEYHGAARAVGGCAIYVSDKPGHHNFELLRKLVLPDGSVLRAQLPGRPTRDCLFADPARDGTSLLKIWNVNKCSGVVGVFNCQGAGWCKIEKKTRVHDTSPDTLTGSVCAADVDQIAHVAGTNWKGDVVVYAYKSGEVVRLPEGASLPVTLKVLEFEVFHFCPLKEIATNISFAPIGLLDMLNSGGAVEQFEVHMASEKPELFDGEIPFELSTSLSENRSPTATIALTARGCGRFGAYSSQRPLKCQVGDAEVEFSYDPNNGLLTFTIPIPEEEMYRWSIAIQV

SEQ ID NO: 2842 - protein, 961 aa, Vitis vinifera
MAVSMRDLDPAFQGAGQKAGIEIWRIENFRPMPVPKSSYGKFFTGDSYVILKTTALKNGALRHDIHYWLGKDTTQDEAGTAAVKTVELDAALGGRAVQYREVQGHETEKFLSYFKPCIIPQPGGVASGFKHAEAEEHKTRLYVCKGKHVVHVKEVSFARSSLNHDDIFILDTKSKIFQFNGSNSSIQERAKALEVVQYIKDTYHDGKCEVASIEDGKLMADAETGEFWGFFGGFAPLPRKTANEDDKAVDSLPAKLFCILKGQAEPVQADSLTRELLDTNKCYILDCGVEVFVWMGRNTSLDERKSASSAAEELLRSLDRPKSHIIRVIEGFETVMFRSKFDMWPETTAVTVSEDGRGKVAALLKRQGVNVKGLLKAAPVKEEPQPYIDCTGNLQVWRVNGQEKTLLSASDQSKFYSGDCYIFQYSYPGEDKEEHLIGTWFGKQSVEEERTSAISLATKMVESLKFLPAQARIYEGNEPIQFFSIFQSFIVFKGGVSDGYKKYIAEKEVPDDTYTEDRVALFRVQGSGPDNMQAIQVEPVASSLNSSYCYILNSGSSVFNWSGNLTTPEDQELVERQLDVIKPNVQSKPQKEGSESEQFWEFLGGKSEYPSQKIARDAENDPHLFSCTFSKGNLKVTEIFNFTQDDLMTEDIFILDCHSEIFVWVGQQVDSKNRMHALTIGEKFLERDFLLEKLSHTAPIYIIMEGSEPPFFTRFFTWDSGKSAMQGNSFQRKLAIVKNGISPTPEKPKRRTPVSYGGRSSSLPEKSQRSRSMSFSPDRVRVRGRSPAFNALAANFENPNSRNLSTPPPMVRKLYPKSVTPDSSKLDSRSAAIAALSASFEQPAREPVVPKTPKVTEEAPKPKPKPETNSKEKAMSSRIEALTIEEDVKEGEAEDEEGLPIYPYERLKTTSIEPVAEIDVTKRETYLSSEEFRQKFGMTKDAFYKLPKWKQNKLKMALQLF

SEQ ID NO: 2843 - protein, 148 aa, Vitis vinifera
MEQTFIMIKPDGVQRNLVGEIIGRFEKKGFSLKGLKLLSVERGFAEKHYEDLSSKPFFNGLVEYIISGPVVAMIWEGKNVVTTGRKIIGATNPSDSAPGTIRGDFAVDIGRNVIHGSDSVGSARKEIALWFPEGPVAWSSSLNHWIYE

SEQ ID NO: 2844 - protein, 172 aa, Vitis vinifera
MANPKVFFDMSVGGVPAGRIVMELFADTTPRTAENFRALCTGEKGTGRSGKPLHYKGSKFHRVIPGFMCQGGDFTAGNGTGGESIYGSKFADENFIHKHTGPGILSMANAGPGTNGSQFFICTAKTSWLDGKHVVFGKVIEGLDVVKAIEKVGSSSGSTAKAVVVSDCGQLS

SEQ ID NO: 2845 - protein, 172 aa, Vitis vinifera
MTNPRVFFDVSIGGAPAGRIVMELYADTTPRTAENFRALCTGEKGVGRSGKPLHFKGSIFHRVIPSFMCQGGDFTRGDGTGGESIYGAKFEDENFIKKHTGPGILSMANAGPGTNGSQFFICTDKTEWLDGKHVVFGQVVEGMDVVKAVEKVGSGSGRTAKTVKIEDCGQLS

SEQ ID NO: 2846 - protein, 173 aa, Vitis vinifera
MATAEVVSATPALSEEKTEESVKAEETPVEEVAAAPPTPEPVAEEPKEAETAAVPEESAAPEAEAPADQDETKEVVEQVEVETKEVVEKTDQAVVEEPAVEKTEEVPEETPDQETNSPVVEETKEATEPAEEPAPKPEPAPADEAPKEEGPAAEEEEKPAEAKVKVETDEKAE

SEQ ID NO: 2847 - protein, 169 aa, Vitis vinifera
MASQSSPQSVHSFTVKDARGNDVDLSIYKGKALLIVNVASQCGLTNSNYTELHQLYEKYKDQGCLEILAFPCNQFGAQEPGSNEEIEKFVCTRFKAEYPIFDKIDVNGDSAAPLYKFLKSSKGGLFGDNIKWNFSKFLVDKDGKVVDRYAPTTSPLSIEKDIKKLLGIS

SEQ ID NO: 2848 - protein, 510 aa, Vitis vinifera
MANIDIEGILKELPNDGRIPKTKIVCTLGPASRSVPMLEKLLRAGMNVARFNFSHGTHDYHQETLDNLRIAMQNTQILCAVMLDTKGPEIRTGFLKDAKPIQLKEGEEITISTDYSIKGDEKMISMSYKKLPVDLKPGNTILCADGTITLTVLSCDLGAGTVRCRCENTATLGERKNVNLPGVVVDLPTLTEKDKEDILGWGVPNNIDMIALSFVRKGSDLVNVRKVLGSHAKRIQLMSKVENQEGVINFDEILRETDSFMVARGDLGMEIPVEKIFLAQKMMIYKCNLVGKPVVTATQMLESMIKSPRPTRAEATDVANAVLDGTDCVMLSGESAAGAYPEIAVKIMARICIEAESSLDYAAIFKEMIRSTPLPMSPLESLASSAVGTANKAKAKLIVVMTRGGTTAKLVAKYRPAVPILSVVVPLLTTDSFDWTCSDEAPARHSLIYRGLIPILAEGSAKATDAESTEVILEAALKSATGKGLCKPGDAVVVLHRIGVASVIKICIVK

SEQ ID NO: 2849 - protein, 488 aa, Vitis vinifera
MALSETASESNASIHSTFASRYVRVSLPRFKIPENSIPKEAAYQIINDELMLDGNPRLNLASFVTTWMEPECDKLIMASINKNYVDMDEYPVTTELQNRCVNMIAHLFNAPLGESEAAVGVGTVGSSEAIMLAGLAFKRKWQNKRKAEGKPHDKPNIVTGANVQVCWEKFARYFEVELKEVKLTDGYYVMDPVKAVEMVDENTICVAAILGSTLNGEFEDVKHLNDLLTKKNKETGWDTPIHVDAASGGFIAPFLHPELEWDFRLPLVKSINVSGHKYGLVYAGIGWVIWRSKEDLPDELIFHINYLGADQPTFTLNFSKGSSQVIAQYYQLIRLGHEGYRNIMENCQENARVLKEGLEKTGHFNIVSKENGVPLVAFSLKDNSCHNEFEVSDMLRRYGWIVPAYTMPPDAQHVTVLRVVIREDFSRTLAERLVTDIQKVLYELDTLPAKITAKVQQSNKKSEIETQREITEAWKKFVREKKKTNGVC

SEQ ID NO: 2850 - protein, 260 aa, Vitis vinifera
MAAAPSAREENVYMAKLAEQAERYEEMVEFMEKVSAAVDSEELTVEERNLLSVAYKNVIGARRASWRIISSIEQKEESRGNEDHVAMIRDYRSKIESELSSICDGILKLLDSRLIPSASSGDSKVFYLKMKGDYHRYLAEFKTGAERKEAAESTLTAYKSAQDIANAELAPTHPIRLGLALNFSVFYYEILNSPDRACNLAKQAFDEAIAELDTLGEESYKDSTLIMQLLRDNLTLWTSDMQDDGADEIKEAPKRDDEQQ

SEQ ID NO: 2851 - protein, 305 aa, Vitis vinifera
MPFCYNNNYCYFIKSKKIVITKLFRDLIQRLREIASIKGYNENTRRLLIYIRLKLLLPPHSKLKPSFQSAPWRLPYEKLTLTLQMALPNQQTVDYPSFKLVIVGDGGTGKTTFVKRHLTGEFEKKYEPTIGVEVHPLDFFTNCGKIRFYCWDTAGQEKFGGLRDGYYIHGQCAIIMFDVTARLTYKNVPTWHRDLCRVCENIPIVLCGNKVDVKNRQVKAKQVTFHRKKNLQYYEISAKSNYNFEKPFLYLARKLAGDVNLHFVESPALAPPEVQIDMAAQAHHEAELAAAAAQPLPDDDDDTFE

SEQ ID NO: 2852 - protein, 332 aa, Vitis vinifera
MAKEPVRVLVTGAAGQIGYALVPMIARGVMLGADQPVILHMLDIPPAAEALNGVKMELVDAAFPLLKGVVATTDVVEACTGVNIAVMVGGFPRKEGMERKDVMSKNVSIYKSQASALENHAAANCKVLVVANPANTNALILKEFAPSIPEKNISCLTRLDHNRALGQVSERLNVQVSDVKNVIIWGNHSSTQYPDVNHATVKTPAGEKPVRGLVGDDAWLNGEFITTVQQRGAAIIKARKLSSALSAASAACDHIRDWVLGTPEGTWVSMGVYSDGSYNVPAGLIYSFPVTCCAGEWKIVQGLHIDEFSRKKLDLTAQELSEEKELAYSCLS

SEQ ID NO: 2853 - protein, 393 aa, Vitis vinifera
MASVTFAKFNASSSQWIGQQSFSQRQGSSARFPARRVSVPIRAGSYSEELVQTAKTVASPGRGILAIDESNATCGKRLASIGLDNTEPNRQAYRQLLLTTPGLGEYISGAILFEETLYQSTTDGKKFVDCLREKKIVPGIKVDKGLVPLPGSNNESWCQGLDGLASRSAEYYKQGARFAKWRTVVSIPCGPSALAVKEAAWGLARYAAISQDNGLVPIVEPEILLDGDHPIDRTLEVAEKVWSEVFFYLAQNNVLFEGILLKPSMVTPGAEHKEKASPETIAKYTLTMLRRRVPPAVPGIMFLSGGQSEVEATLNLNAMNQSPNPWHVSFSYARALQNTVLKTWQGHPENVEAAQKSLLVRAKANSLAQLGKYSAEGESEEAKKGMFVQGYTY

SEQ ID NO: 2854 - protein, 411 aa, Vitis vinifera
MNSQHPDGSVFSNIVRAPEDPILGVTVAYNKDTSPIKLNLGVGAYRTEEGKPLVLNVVRRAEQLLVNDPSRVKEYLPIVGLAEFNKLSAKLIFGADSPAIQENRVATVQGLSGTGSLRIGAEFLARHYYQHTIYIPVPTWGNHPKIFTIAGLSVKTYRYYDPETRGLDFKGLLEDLGAAPTGAIVLLHACAHNPTGVDPTLEQWEQIRQLMRSKGLLPFFDSAYQGFASGSLDADAQSVRMFVADGGECLAAQSYAKNMGLYGERVGALSIVCKAADVASRVESQLKLVIRPMYSNPPIHGASIVATILKDSDMYNEWTLELKAMADRIISMRQLLFDTLRDRGTPGDWSHIIKQIGMFTFTGLNTEQVAFMTKEYHIYMTSDGRISMAGLSSRTVPHLADAIHAAVTRIP

SEQ ID NO: 2855 - protein, 448 aa, Vitis vinifera
MREILHVQGGQCGNQIGSKFWEVICDEHGVDPTGRYNGDGSSDLQLERINVYYNEASGGRYVPRAVLMDLEPGTMDSIRSGPYGQIFRPDNFVFGQSGAGNNWAKGHYTEGAELIDAVLDVVRKEAENCDCMQGFQVCHSLGGGTGSGMGTLLISKMREEYPDRMMLTFSVFPSPKVSDTVVEPYNATLSVHQLVENADECMVLDNEALYDICFRTLKLSTPSFGDLNHLISATMSGVTCCLRFPGQLNSDLRKLAVNLIPFPRLHFFMVGFAPLTSRGSQQYISLTVPELTQQMWDAKNMMCAADPRHGRYLTASAMFRGKMSTKEVDEQMINVQNKNSSYFVEWIPNNVKSSVCDIPPRGLKMASTFVGNSTSIQEMFRRVSEQFTAMFRRKAFLHWYTGEGMDEMEFTEAESNMNDLVSEYQQYQDATADDEGEYEEGPEENYEA

SEQ ID NO: 2856 - protein, 445 aa, Vitis vinifera
MREILHIQGGQCGNQIGAKFWEVICDEHGIDNTGKYSGDSDLQLERINVYYNEASGGRYVPRAVLMDLEPGTMDSVRSGLFGQIFRPDNFVFGQSGAGNNWAKGHYTEGAELIDSVLDVVRKEAENCDCLQGFQVCHSLGGGTGSGMGTLLISKIREEYPDRMMLTFSVFPSPKVSDTVVEPYNATLSVHQLVENADECMVLDNEALYDICFRTLKLATPTFGDLNHLISATMSGVTCCLRFPGQLNSDLRKLAVNLIPFPRLHFFMVGFAPLTSRGSQQYRALTVPELTQQMWDAKNMMCAADPRHGRYLTASAMFRGKMSTKEVDEQMINVQNKNSSYFVEWIPNNVKSSVCDIPPKGLKMASTFIGNSTSIQEMFRRVSEQFTAMFRRKAFLHWYTGEGMDEMEFTEAESNMNDLVAEYQQYQDATADEEYEEEEEEEEITA

SEQ ID NO: 2857 - protein, 495 aa, Vitis vinifera
MYKTLLGSQGFRKGMDLYFKRHDGQAVTCEDFFAAMRDANDADFANFLLWYSQAGTPLVKVTSSYNAEAHTYSLKFSQEVPPTPGQPVKEPMFIPVAVGFLDSTGKEMPLSSVYHDGTLQSVVSNDQPTYTTVLRVTKKEEEFLFSDISEKPIASLLRGYSAPIRLDTDLTDSDLFFLLAHDSDEFNRWEAGQVLARKLMLGLVADFQQNRPLVLNPKFVHGLKSILLDSSLDKEFIAKAITLPGEGEIMDIMEVADPDAVHAVRSFIRKQLASELRAELLSTVEKNRSSEDYVFNHPNMARRALKNVALGYLALLDDPELTELALHEYRTAANMTEQFAALAAIAQIPGKTRDDVLADFYSKWQQDFLVVNKWFALQAMADIPQNVENVRNLLNHPAFDLRNPNKVYSLIGGFCGSPVNFHAKDGSGYKFLGEMVVQLDKINPQVASRMVSAFSRWKRYDDTRKSLAKAQLEMIVACNGLSENVYEIASKSLAA

SEQ ID NO: 2858 - protein, 549 aa, Vitis vinifera
MLIWQLSNSEKVEHFLISFSIIPETTDFHHTVLSEFQRRPKPGDLFGSESMAKHEDLPVPVFSALEPVYGGGSQLEEAQLRFDGLKSKFVEVFGQAPDIFARSPGRVNLIGEHIDYEGYSVLPMAIRQDTIVAIRKHDAGESPKLLRIANVSDKYTMCTYPADPEQEIDLKNHKWGHYFICGYKGYYEYAKLKGVDVGVPVGLDVLIDGTVPTGSGLSSSAAFVCSSMIAIMAAYDVSFPKKDVAQLTCECERHIGTQSGGMDQAISIMAKSGFAELIDFNPVRATDVQLPAGGSFVIAHSLAESQKAVTAATNYNNRVVECRLAAIVLGIKLGMKPQQAIAEVKTLSDVEGLCVSFASDHGSSDPVVAVKEFLKEEPYTAEEIEKIIEESLPSVFGNSPTSLDVLKAAKHFKLFQRASHVYSEARRVHAFRDTVLSGLSEEDMLKKLGDLMNKSHDSCSVLYECSCPELEELVKICRDNGALGARLTGAGWGGCAVALVKESIVPQFILNLKDQFYQSRIEKGVINKNDLGLYIFASKPSSGAAIFKF

SEQ ID NO: 2859 - protein, 537 aa, Vitis vinifera
MFAWQRTAFHFQPEKNWMNDPDGPLFHMGWYHLFYQYNPDSAVWGNITWGHAVSRDMIHWLYLPLAMVPDRWFDLNGVWTGSATILPNGQIIMLYTGDTNDSVQVQNLAYPANLSDPLLLHWIKYENNPVMVPPAGIGSDDFRDPTTMWVGADGNWRVAVGSLVNTTGIVLVFQTTNFTDFELLDGELHGVPGTGMWECVDFYPVSINGVYGLDTSAHGPGIKHVLKASMDDNRHDYYALGEYDPMTDTWTPDDPELDVGIGLRLDYGKYYASKTFYDQVKKRRILYGWISEGDIESDDLKKGWASLQSIPRTVLHDNKTGTYLLLWPIEEVESLRTNSTEFEDVLLEPGSVVPLDIGSASQLDIVAEFEVDNETLEAMVEADVIYNCSTSAGAAGRGALGPFGILVLADDTLSELTPIYFYIAKDTDGSYKTFFCTDLSRSSLAVDDVDQRIYGSIVPVLDDEKPTMRVLVDHSIVEGFSQGGRSCITTRVYPTEAIYGAARLFLFNNATGVNVTASIKIWEMASADIHPYPLDQP

SEQ ID NO: 2860 - protein, 577 aa, Vitis vinifera
MEEADWSAVTGSCSGTLGGHLARRLVQIGVRDVFSVPGDFNLTLLDHLIAEPGLNLVGCCNELNAGYAADGYARARGVGACVVTFTVGGLSVLNAIAGAYSENLPVICIVGGPNSNDYGTNRILHHTIGLPDFTQELRSFQTVTCTQAVVNHLEDAHEQIDTAISTALKESKPVYLSISCNLPGIPHPTFSREPVPFFLAPKVSNQIGLEAAVEATADFLNRAVKPVIVGGPKLRVAKAQRALMELADASGYPIAVMPSGKGLVPEQHPHFIGTYWGAVSTTFCGEIVESADAYVFAGPIFNDYSSVGYSLLIKKEKAVIVEPNRVTVGNGPSFGWVFMADFLSALAKKLKKNETAVENYRRIYVPPGVPLRREEHEALRVNVLFKHIQDMLDGNSAVIAETGDSWFNCQKLRLPENCGYEFQMQYGSIGWSVGATLGYAQGAKDKRVIACIGDGSFQVTAQDVSTMIRCGQRTIIFLINNGGYTIEVEIHDGPYNVIKNWDYTALINAIHNGEGKCWTAKVRTEDELTEAIATATGAHKDSLCFIEVFVHKDDTSKELLEWGSRVSAANGRPPNPQ

SEQ ID NO: 2861 - protein, 667 aa, Vitis vinifera
MYGAWGLRASSVVLGILLVGCLVAISIAKEESNKLGTVIGIDLGTTYSCVGVYKNGHVEIIANDQGNRITPSWVAFTDTERLIGEAAKNQAAVNAERTVFDVKRLIGRKFDDKEVQKDMKLFPFKIVNKDGKPYIQVKIKDGETKVFSPEEISAMILTKMKETAEAFLGKTIKDAVVTVPAYFNDAQRQATKDAGIIAGLNVARIINEPTAAAIAYGLDKKGGEKNILVFDLGGGTFDVSILTIDNGVFEVLATNGDTHLGGEDFDQRIMEYFIKLIKKKHGKDISKDNRAIGKLRRESERAKRALSSQHQVRVEIESLYDGLDFSEPLTRARFEELNNDLFRKTMGPVKKAMEDAGLEKRQIDEIVLVGGSTRIPKVQQLLKEYFDGKEPNKGVNPDEAVAYGAAVQGSILSGEGGDETKDILLLDVAPLTLGIETVGGVMTKLIPRNTVIPTKKSQVFTTYQDQQTTVSIQVFEGERSLTKDCRELGKFDLSGIAPAPRGTPQIEVTFEVDANGILNVKAEDKASGKSEKITITNDKGRLSQEEIDRMVREAEEFAEEDKKIKEKIDARNSLESYVYNMKTQINDKDKLADKLESEEKEKIETAVKEALEWLDDNQNAETEDYQEKLKEVEAVCNPIITAVYQRSGGAPGGSSDAGEDEDSHDEL

SEQ ID NO: 2862 - protein, 662 aa, Vitis vinifera
MAQKRFIIEMEKAKEAKDGRPSIGPVYRSSFARDGFPKPIEGMESCWDVFRLAVEKYPGNRMLGQREIVNGKAGKYVWLTYKEVYDKVMKVGNSIRSCGVNEGGRCGIYGANSAEWIMSMEACNAHGLYCVPLYDTLGAGAVEFIICHSELSIVFVEEKKIPEVLKTFPNTTEYLKTIVSFGKVTPEQREEVEKFGLAIYYWEEFLQLGDDKKFDLPLTKKNDICTIMYTSGTTGDPKGVMISNESIVTLIAGVKRLLQSVNEELNEKDVFISYLPLAHIFDRVIEELFISHGASIGFWRGDVKLLVEDIGELKPTIFCAVPRVLDRIYSGLKQKISAGGLLRNTLFNIAYKYKQYNLWKGVKTLEAAPICDKIVFGKVKQGLGGNVRLILSGAAPLSTHVEAYLRVVTCAHVLQGYGLTETCAGTFVSLPNEISMLGTVGPPVPNVDVCLESVPEMGYDALSSTPRGEICIRGKTLFSGYYKREDLTKEVLVDGWFHTGDVGEWQPDGSMKIIDRKKNIFKLSQGEYVAVENLENIYGLVSDIDSIWIYGNSFESFLVAVANPNQQALERWAKENNISGDFDSLCENPKAKEYILGELSKIGKEKKLKGFEFVKAVHLDPVPFDMERDLITPTYKKKRPQLLKYYQNVIDKMYKSINKPSA

SEQ ID NO: 2863 - protein, 767 aa, Vitis vinifera
MGSTILSDLATEIVVPVCAVIGIVFSLIQWFLVSRIKVSPDRHSSSSNNGKGAGYGDYLIEEEEGLNDHNVVVKCAEIQSAISEGATSFLFTEYQYVGVFMVAFAILIFLFLGSVNGFSTKSQVCTYNPQEMCKPALATAIFSTVSFMLGAVTSVISGFLGMKIATYANARTTLEARKGVGKAFIVAFRSGAVMGFLLAANGLLVLYIAINLFKLYYGDDWEGLFEAITGYGLGGSSMALFGRVGGGIYTKAADVGADLVGKVERNIPEDDPRNPAVIADNVGDNVGDIAGMGSDLFGSYAESSCAALVVASISSFGINHDFTAMCYPLLVSSMGILVCLITTLFATDFFEIKAVKEIEPALKKQLIISTVLMTVGVAIVSWIALPSSFTIFNFGSQKVVKNWQLFLCVGVGLWAGLIIGFVTEYYTSNAYSPVQDVADSCRTGAATNVIFGLALGYKSVIIPIFAIAVSIFVSFSFAAMYGIAVAALGMLSTIATGLAIDAYGPISDNAGGIAEMAGMSHRIRERTDALDAAGNTTAAIGKGFAIGSAALVSLALFGAFVSRASISTVDVLTPKVFIGLLVGAMLPYWFSAMTMKSVGSAALKMVEEVRRQFNTIPGLMEGLAKPDYATCVKISTDASIKEMIPPGALVMLTPLIVGTFFGVETLSGVLAGSLVSGVQIAISASNTGGAWDNAKKYIEAGASEHARTLGPKGSDPHKAAVIGDTIGDPLKDTSGPSLNILIKLMAVESLVFAPFFATHGGLLFKIF

SEQ ID NO: 2864 - protein, 963 aa, Vitis vinifera
MANRNIEKMASIDAQLRLLVPAKVSEDDKLVEYDALLLDRFLDILQDLHGEDLKETVQECYELSAEYEGKHDPKKLEELGNVLTSLDAGDSIVIAKSFSHMLNLANLAEEVQIAYRRRNKLKKGDFADENNATTESDIEETLKKLVVQLKKSPEEVFDALKNQTVDLVLTAHPTQSVRRSLLQKHGRIRNCLAQLYAKDITPDDKQELDEALQREIQAAFRTDEIRRTPPTPQDEMRAGMSYFHETIWKGVPKFLRRVDTALKNIGINERVPYNAPLIQFSSWMGGDRDGNPRVTPEVTRDVCLLARMMAANLYYSQIEDLMFELSMWRCNDELRVRADELLRSSKKDAKHYIEFWKQIPPSEPYRVILGEVRDKLYQTRERSRHLLAHGISDIPGEATYTNLEQFLEPLELCYRSLCACGDRPIADGSLLDFLRQVSTFGLSLVRLDIRQESDRHTDVIDAITRHLEIGSYREWSEERRQEWLLSELSGKRPLFGPDLPKTEEIADVLDTFHVIAELPADNFGAYIISMATAPSDVLAVELLQRECHVKQPLRVVPLFEKLADLEAAPAAVARLFSIDWYKNRINGKQEVMIGYSDSGKDAGRLSAAWALYKAQEELIKVAKQYGIKLTMFHGRGGTVGRGGGPTHLAILSQPPDTIHGSLRVTVQGEVIEQSFGEEHLCFRTLQRFTAATLEHGMHPPISPKPEWRALMDEMAVVATENYRSIVFQEPRFVEYFRLATPELEYGRMNIGSRPSKRKPSGGIESLRAIPWIFAWTQTRFHLPVWLGFGGAFKYAIEKDIRNLHLLQEMYNEWPFFRVTIDLVEMVFAKGDPGIAALYDKLLVSKDLWSFGERLRSNYEQTKSLLLQIAGHKDLLEGDPYLKQRLRLRDSYITTLNVCQACTLKRIRDPSYDVKVRPHICKDIMESAAQELVNLNPTSDYGPGLEDTLILTMKGIAAGMQNTG

SEQ ID NO: 2865 - protein, 162 aa, Vitis vinifera
MASAEIEYRCFVGGLAWATDDQSLERAFSQFGEILESKIINDRETGRSRGFGFVTFSSEQSMRDAIEGMNGQNLDGRNITVNEAQSRGSGGGGGGGGGGGGYRGGGGYGGGGRREGGYSRGGGGGYGGGGGGYGGGSRDRGYGDGGSRYSRSGGASDGNWRN

SEQ ID NO: 2866 - protein, 158 aa, Vitis vinifera
MGVFTYEQEITSSVPPAKMFKAAVLDADNLIPKVRPQAIKCVEVIQGDGGPGTIKKIHFGEGHKFKSMTHRVDAIDKEKFSFCYTVIDGDVLTDGVESICHELTVVPAPGGGSIYKNTSKYHTKGAEVCEEHVKGGKEDALATFKAIEAYVLAHPDAY

SEQ ID NO: 2867 - protein, 198 aa, Vitis vinifera
MKRKEKSQPKNDTRFISDSLQLESSPEGTWNRMALVTTAEVCDANPQLIVSGELRALQPVFQIYGRRPVFSGPIVTLKVFEDNVLIREFLEEKGNGRVLVVDGGGSMRCAILGGNPVVQAQNNGWAGIVVNGCIRDVDEINGCDIGVRALNSHPMKANKKGIGEKHVPIAIAGTRISDGEWLYADTDGILISRTELSV

SEQ ID NO: 2868 - protein, 199 aa, Vitis vinifera
MGSFKDDREEVLQAWYMDDSDEDQRLPHHRDPKEFVSLDQLAKLGVLSWRLDADNYETDEELKKIREARGYSYMDFCEVCPEKLPNYEEKIKNFFEEHLHTDEEIRYCVAGSGYFDVRDQNDSWIRVWLKKGGMIVLPAGIYHRFTLDSNNYIKAMRLFVGDPVWTPFNRPHDNLPARQEYLEAFGQKEAANHVVDAAA

SEQ ID NO: 2869 - protein, 220 aa, Vitis vinifera
MANSPVVWLASVCLVFNILSLPFLALGLSSCGGSCQTLNDCEGQLICINGKCNDDPEVGTHICGGNSSTPSPPSPSTCQPSGTLACKGGKPKNTYTCSPPVTSSTPAVLTNNNFEKGGDGGGPSACDNKYHDNSERIVALSTGWYNGGSRCGKMIRITAQNGRSVLAKVVDECDSMHGCDKEHAGQPPCDNNIVDGSNAVWNALGLDINIGEVDVTWSMA

SEQ ID NO: 2870 - protein, 252 aa, Vitis vinifera
MASTLPENLTREQYVYLAKLAEQAERYEEMVKFMEKLVIGWTSMSELTVEERNLLSVAYKNVIGSLRAAWRIVSSIEQKEESRKNEEHVALVKDYRSTVETELSEVCAGILKLLDSHLIPSASTSESKVFYMKMKGDYHRYLAEFKVGNEKKDAAEETMLAYKSAQDIALADLAPTHPIRLGLALNFSVFYYEILNSSDKACSMAKQAFEEAIAELDTLGEESYKDSTLIMQLLRDNLTLWTSDAQDQLDEP

SEQ ID NO: 2871 - protein, 287 aa, Vitis vinifera
MEGKEEDVKLGANKFTERQPLGTAAQTDKDYKDLPPAPLFEPGELKSWSFYRAGIAEFMATFLFLYITILTVMGVKKSPTMCASVGIQGIAWAFGGMIFALVYCTAGISGGHINPAVTFGLLLARKLSLTRAIFYIIMQCLGAICGAGVVKGFEGSQSYEVLGGGANVVNSGYTKGDGLGAEIVGTFVLVYTVFSATDAKRNARDSHVPILAPLPIGFAVFLVHLATIPITGTGINPARSLGAAIIFNREHAWDDMWIFWVGPFIGAALAAMYQQIVIRAIPFKSRA

SEQ ID NO: 2872 - protein, 356 aa, Vitis vinifera
MSLLADLQNINLSDSTEKIIAEYIWIGGSGNDLRSKARTLSGPVTGPAQLPKWNYDGSSTGQAPGEDSEVILYPQAIFKDPFRGGDNILVMCDAYTPGGEPIPTNKRFNAAKIFSHPEVTAEEPWYGIEQEYTLLQKDVNWPLGWPVGGFPGPQGPYYCGIGADKAFGRDIVDAHYKACLYAGINISGINGEVMPGQWEFQVGPAVGISAGDELWVARYILERITEIAGVVVSFDPKPIKGDWNGAGAHTNYSTKSMRNTGGYDVIKKAIEKLGLRHKEHISAYGEGNERRLTGRHETADINTFCWGVANRGASIRVGRDTEKEGKGYFEDRRPASNMDPYVVTSMIAETTILWKP

SEQ ID NO: 2873 - protein, 358 aa, Vitis vinifera
MELNLAPKFAQKIFEGEGGTYYSWSSAEYELLKEAKVGGGRLVLGPRGFALPHYADSNKIGYVLQGSCGVVGMVFPEASEEVVLKLKEGDIIPVPSGAVSWWYNDGDSELVIVFLGETSKAYVPGEFTYFLLTGTQGILGGFSTEFNSRAYNISNEEAEKLAKSQTGVLLIKLPEGQKMPHPCKNSTDKLVYNIDAALPDIHVQNAGLLTALTAKKFPFLGEVGLSATLVKLDANAMSSPVYAADSSVQVIYVAKGSGRIQVVGINGERALDTKVKAGHLYVVPRFFVASTIADGEGMEYFSLITATQPVFGEFTGKTSVWGALSPQVLQASLNVAPEFEQLFRAKIKKSTILVPPQN

SEQ ID NO: 2874 - protein, 365 aa, Vitis vinifera
MGKGGMSQGGDGRGEGEENMAAWLLGVNNLKIQPFILPPLGPHDVRVRMKAVGICGSDVHYLKKLRCADFIVKEPMVIGHECAGIIDEVGPQVKSLVPGDRVALEPGISCWRCQLCKEGRYNLCPEMKFFATPPVHGSLANQVVHPADLCFKLPDNVSLEEGAMCEPLSVGVHACRRADIGPESNVLVMGAGPIGLVTMLAARAFGAPRIVIVDVDDYRLSVAKDLGADEIVKVSTNIQDVAEEVVQIHKAMGARVDVSFDCAGFDKTMSTALSATSTGGKVCLVGMGHNEMTVPLTPAAAREVDVVGVFRYKNTWPICIEFLRSVKIDVKPLITHRFGFSQREVEEAFETSARGGTAIKVMFNL

SEQ ID NO: 2875 - protein, 376 aa, Vitis vinifera
MDFDEKQAVVCDNGSGLVKAGFAGDDAPCVVFPSVIGWPRNKHAMIGIGQKEMYLGDEAQARRGVLRLSYPINHGMVRDWEAMERLWQHTFEKELRVSIEERPVLLTEPPLNPKFNKEKMVEIMFEAFEIPATYVAIQAVLSLYASGRTTGIVMDSGEGVTHVVPIYEGYALPHAIQRLDLAGRDLTDYLTKILTEEGYVFTTSADREIVKDIKEQTTYVAMDFEKELATSRESLELDKQYELPDGQVITIGTGRFKCPEILFDPSKVGIESCGVHDIVLKSIRRCDMDIRRDMYGNVVLSGGTTMVPGLADRLAKELSSLAPPGVRVRVVAPPERKYSVWIGGSILASLSTFEQMWIKKEEYMESGSSIVHMKCF

SEQ ID NO: 2876 - protein, 405 aa, Vitis vinifera
MAAAARPLVTVQVLKSDMATDGGNAVPLPDVMKASIRPDIVNFVHSNISKNSRQPYAVSRRAGHQTSAESWGTGRAVSRIPRVPGGGTHRAGQGAFGNMCRGGRMFAPTKIWRRWHRKINVNQKRYAVVSAIAASAVPSLVMARGHRIESVPELPLVIGDSAESVEKTSAAIDILKQVGAYPDAEKAKDSHGIRPGKGKMRNRRYISRKGPLIVYGTEGAKLVKAFRNIPGVEVANVERLNLLKLAPGGHLGRFIIWTKSAIEKVDSIYGSFDKTSEKKKGYLLPRAKMVNADLARIINSDEVQSVVRPIKKEVKRAPMKKNPLKNLNTMLKLNPYAKTARRMALLAEAQRVKAKKEKLDKKRAQIPKEEAAAIKAAGKAWYQTMISDSDYTEFDNFSKWLGVSQ

SEQ ID NO: 2877 - protein, 482 aa, Vitis vinifera
MARLILPCKGSGLARTGLLGLISSAPLQAPCCVSSLKHSAKNISRYRQSLNLEVSHRRNYRFPHPSLYRAKQVSRRFVCSVATESSPKQVEESKMDMPKEIFLKDYKLPDYYFDTMDLNFLLGEEKTTVYSKITVLPRVEGSPFPLVLDGVDLKLVSVKVNSKELKEEDYVLSPRHLTLPSLPSGEFTLEIVTEICPQKNTSLEGLYKSSGNFCTQCEAEGFRKITFYQDRPDIMAKYTCRIEGDKSLYPVLLSNGNLIEHGDLEGGKHYAIWEDPFKKPCYLFALVAGQLESRDDTFVTRSGRTVSLRIWTPAQDVPRTVHAMYSLKAAMKWDEDVFGLEYDLDLFNIVAVPDFNMGAMENKSLNIFNSKLVLASPETATDADYAAILGVIGHEYFHNWTGNRVTCRDWFQLSLKEGLTVFRDQEFSSDMGSRTVKRIADVSRLRNYQFPQDAGPMAHPVRPHSYIKMDNFYTGKFVFSVI

SEQ ID NO: 2878 - protein, 492 aa, Vitis vinifera
MDPYKYRPSSAYNSPFWTTNSGAPVWNNNSSLTVGPRGPILLEDYHLVEKLANFDRERIPERVVHARGASAKGFFETTHDISNLTCADFLRAPGVQTPVILRFSTVIHERGSPETLRDPRGFAVKFYTREGNFDLVGNNFPVFFIRDGMKFPDMVHALKPNPKSHIQENWRIVDFFSHHPESLHMFSFLFDDVGIPQDYRHMEGSGVNTYTLINKAGKAHYVKFHWKPTCGVKCLLEEEAIRVGGSNHSHATQDLYDSIAAGNYPEWKLFIQTIDPDHEDKFDFDPLDVTKTWPEDILPLQPVGRLVLNRNIDNFFAENEQLAFCPAIVVPGVYYSDDKLLQTRIFSYSDTQRHRLGPNYLQLPANAPKCAHHNNHHEGFMNFMHRDEEVNYFPSRYDPVRHAERYPIPPAILTGRREKCIIPKENNFKQPGERYRSFAPDRQERFIQRWVDALSDPRVTYEIRSIWISYWSQADKSLGQKLASRLNVRPSI

SEQ ID NO: 2879 - protein, 492 aa, Vitis vinifera
MDPYKYRPSSAYNSPYFTTNAGAPVYNNDSSLTVGSRGPVLLEDYHLVEKLANFQRERIPERVVHARGASAKGFFEVTHDVSDLTCADFLRAPGVQTPVIVRFSTVIHERGSPETIRDPRGFAVKFYTREGNFDMVGNNFPVFFIRDAMKFPDVIHAFKPNPKSHIQEYWRVVDFLSYHPESLSTFAFLFDDVGVPQDYRHMEGFGVHTFTLINKAGKANYVKFHWKPTCGVKCLLEDEAIRVGGTNHSHATQDLYDSIKAGNYPEWKLFIQTMDPEHEDKFDFDPLDVTKTWPEDILPLQPVGRLVLNKNIDNFFAENEMLAFNPALVVPGIYYTNDKMLQGRIFAYSDTQRHRLGPNYLQLPVNAPKCAFHNNHHDGSMNFMHRDEEVDYFPSRFDPVRHAETFPIPSTICHGKREKVVIEKENNFKQPGERYRSFAPDRQERFINRWVETLSDPRVTYEIRSIWISYWSQADRSLGQKLASRLNVKPKY

SEQ ID NO: 2880 - protein, 519 aa, Vitis vinifera
MGFGEKWLGWIKWCISTASFSVLINGTPKGFFQSSRGLRQGDPLSPYLFVIAMEVFSSFLNRAVDNVKEISAPEDIEGPEDAEGYKKRHLNVVFIGHVDAGKSTTGGQILFLSGQVDDRTIQKYEKEAKDKSRESWYMAYIMDTNEEERVKGKTVEVGRAHFETETTRFTILDAPGHKSYVPNMISGASQADIGVLVISARKGEFETGYERGGQTREHVQLAKTLGVSKLLVVVNKMDDPTVNWSKERYDEIESKMIPFLRSSGYNVKKDVHFLPLSGLVGLNMKTRVDKSLCSWWNGPCLFEALDAIDVPFRDPKGPFRMPIIDKFKDMGTVVMGKVESGSVREGDSLLVMPNKVQVKVFAVYCDENKVKLAGPGENVRVRLSGIEEEDIISGFVLSSIAKPIPAVYEFVAQLQILELLDNAIFTAGYKAVLHIHSIVEECEIIELLQQIDPKTKKPMKKKVLFVKNGAVVLCRIQVNNLICIEKFSDFPQLGRFTLRTEGKTVAMGKVMDLNSASSI

SEQ ID NO: 2881 - protein, 554 aa, Vitis vinifera
MASRKLLSSLLRTSVRRPISRSVLSNPRSPLPRPSPVGHLLARAANYASSASAAAPAASTPSAAKGAGPSGKITDEFTGAGAIGQVCQVIGAVVDVRFDEGLPPILTALEVLDNSIRLVLEVAQHLGENMVRTIAMDGTEGLVRGQRVLNTGSPITVPVGRATLGRIINVIGEPIDERGDIKTDHFLPIHREAPSFVDQATEQQILVTGIKVVDLLAPYQRGGKIGLFGGAGVGKTVLIMELINNVAKAHGGFSVFAGVGERTREGNDLYREMIESGVIKLGEKQSESKCALVYGQMNEPPGARARVGLTGLTVAEHFRDAEGQDVLLFIDNIFRFTQANSEVSALLGRIPSAVGYQPTLATDLGGLQERITTTKKGSITSVQAIYVPADDLTDPAPATTFAHLDATTVLSRQISELGIYPAVDPLDSTSRMLSPHILGEEHYNTARGVQKVLQNYKNLQDIIAILGMDELSEDDKLTVARARKIQRFLSQPFHVAEVFTGAPGKYVELKESITSFQGVLDGKYDDLSEQSFYMVGGIEEVIAKAEKIAKESAA

SEQ ID NO: 2882 - protein, 697 aa, Vitis vinifera
MEAPPVVPPAPPLSSGLGVGVGGPHMSYPDSVDSSPRSRNTDSWDDPLPSVPGAKLRLMCSYGGHIFPRPHDKSLCYVGGDTRIVVADRNSSLADLSARLSKILLQGRSFTLKYQLPNEDLDSLISVTTDEDLENMIDEYDRTSALKPSRLRLFLFPNKPESASSIGSILDNSTKSDDWFLNCLNGTNLMTRGFSDSASVNCLLSLDEDAVANNLDSSSARDLEASQPGGFGTCKTVKQGQDVHSVPDSPMLETSSSFGSTSSSPSLANLPPIRVHVEDGSGGGSVRLQDQKLGIEEQFAQMSVAMQKQDEGFVVLSSPATAGAAVPVMAGGDYPNRVFSDDERSDQGMPVGYRKPPPPQPQQQPLPPQSQQKSVGGIDLASPDSVSSDNSIPNAISRPKPMIYQEPVIQIPSGTNRVSSNPVEQNINLFDPNSRIHMQQPVQDSGYILAPQFDQQQQQQQQQQHQQQQQHQQQQQQQPQPQPQFIHAGTHYIHHHPTGPLQVPSFYPVYPSQQQHHHHHPHQLDPQYPMYFVPSRQAQAYSLSMQQSNFSEAATGIPSGRSQAPSAPAMVTSPAAYNPTRNAPLQKPEMAAGMYRTGTAAAPLVQVPSSQHQQQYVGYSQIHHPSQSIAPPSAATANYAYEFSDPAHAQIFYAQAMAPTLPQYQTMTSAPAVVVPEASAQLSTDNIKQQIRTSQPL

SEQ ID NO: 2883 - protein, 740 aa, Vitis vinifera
MNGAVLVAIAAAIGNFLQGWDNATIAGAIVYIKKELDLESTVEGLVVAMSLIGATLVTTCSGAISDWIGRRPMLIVSSMLYFISGLIMLWSPNVYVLLIARLLDGFGIGLAVTLVPIYISETAPADIRGSLNTLPQFTGSGGMFLSYCMVFGMSLLSSPSWRLMLGILSIPSLLYFALTVFYLPESPRWLVSKGRMVEAKKVLQRLRGREDVSAEMALLVEGLGIGGETSIEEYIIGPTGELTEDQDPDAVKDQIKLYGPEAGLSWVAKPVPGGQSTLSLVSRQGSLATQTLPLMDPLVTLFGSVHEKLPETGSMRSMLFPNFGSMFSTADPQIKTEQWDEESLQREGEDYASDGGGDSDHDLQSPLISRQTSSMEKDMVPPPSHSSIMSMRRHSSLMQGTAGEAAGGMGIGGGWQLAWKWSEREGEDGKKEGGFKRIYLHEEGVPGSRRGSLVSLPGGDVPAEGDYIQAAALVSQPALYSKELMDQDPVGPAMVHPAETASRGPMWAALLEPGVKHALFVGAGIQILQQFSGINGVLYYTPQILEEAGVEVLLESLGLGTESASFLISAFTTLLMLPCIVVAMKLMDIVGRRRLLLTTIPVLIVTLLVLVIGDLVTTTTVIHAAISTACVIIYFCCFVTAYGPIPNILCSEIFPTRVRGLCIAICALVYWIGDIIVTYTLPVMLTSIGLTGIFGIYAVVCVISWVFVFLKVPETKGMPLEVIAEFFAVGARQVTAAKND

SEQ ID NO: 2884 - protein, 848 aa, Vitis vinifera
MSVVGFDFGNESCIVAVARQRGIDVVLNDESKRETPAIVCFGDKQRFIGTAGAASTMMNPKNSISQMKRLIGRQFSDPELQQDLKSLPFTVTEGPDGYPLIHARYLGEVRTFTPTQVLGMMFSNLKGIAEKNLNAAVVDCCIGIPVYFTDLQRRAVLDAATIAGLHPLRLLHETTATALAYGIYKTDLPENDQLNVAFVDIGHASMQVCIAGYKKGQLKILAHSFDQSLGGRDFDEVLFNHFAAKFKEEYKIDVFQNARACLRLRSACEKLKKVLSANPVAPLNIECLMDEKDVRGFIKRDEFEQISVPILERVKGPLEEALSDAGLSAENIHAVEVVGSGSRVPAIIRILTEFFGKEPRRTMNASECVAKGCALQCAILSPTFKVREFQVNESFPFTIALTWKGDAQNGAADNQQNTVVFPKGNPIPSVKALTFYRSGTFSVDVVYADASEIQGQVKISTYTIGPFQSTKVERAKLKVKVRLNLHGIVSVESATLLEEEEVEIPVVKEPAKDATKMDTDETPGDAAAPPGTSETDANMQDAKGDAPGVENGVPESGDKSVQMETDTKVEVPKKKVKKTNIPVSELVYGTMVPADVQKAVEKEFEMALQDRVMEETKDKKNAVEAYVYDMRNKLHDKYQDFVTSSERDEFTAKLQEVEDWLYEDGEDETKGVYIAKLEELKKQGDPIEERYKEYSERGTVVDQLVYCINSYREAAMSNDPKFEHIDVSEKQKVLSECVEAEAWLREKKQQQDSLPKHATPVLLSADVRRKAEAVDRACRPIMTKPKPAKPAAPETPPTPPPQGNEPQPQGGENAASAHDSAADGSSSEVPPAAAEPMDTDKSETTTAA

SEQ ID NO: 2885 - protein, 873 aa, Vitis vinifera
MAAPPSSSATASIMLAIYEKKTVTVELYRPLRQYIAFTYSEREAQNLEDDLQALKQMRSDLERPGDSLPTRRDLLQSYFKALCLVESRFPISPDRDHINSITFTWYDAFKQKQKASQQNIHLEKAAVLFNLGAVYSQLGLFYDRSSVDGMRQAAQAFIAAAGAFAFLRDNAAMKASIGSSTTVDVSVECAGMLERLMLAQAQECVFENTIAKGSTPMVCTKIARQVGLYYEETFAALNVAPLNQHFDKTWISHIQLKAALFYGEACYRYGLELHQKEEIAEEIARLKSGISALSEAKKSSKGAAAQILDTITKLETNLNRNLERAVKENDRVYLMRVPSPSTLPPLPAFSMVKSMPMNEVLDASKERMFSSLVPDSSAKALSRYTEMVDDIIRTQAEKLQQGSELARVRLKEMDLPDSILALEGNFTLPTDLKEDVEAVQICGGPAGLEAELQQLMDLRRVNQELLVQTDELLQKEAREDGQFRSQFGTRWTRPQSSTLTKNLQDRLNRFAANLKQASESDARIERSVREHMALMSILDRRPIESALPTLARPIMSLDANEDAIVGALKQSLRQLETLGAQRAGLEDMLKEMKRKDDILPKLMTSTGSYEDLFRKEIAKYDNICEDIAQNLEAQEQLLLQIQAQNDEFAAIFNLEDYKASREKSYKQIAAAIAKFREIKENINEGLKFYVTLQDAITNIKQQCSDFVMTRNIQCREMIEDVQRQMAGLSFQDGKNTGAYNYPSVSQPHQTQRATSQQQTEPVNMTHPSRPQAPYYQPPPPEQPTMPGYAHSLPPYGSTQQPPPPYHVAGGPYHPQQAQQPPPSHEYGQPAYPGWRGPYYNNAHAQQPGSLPRPPYTIPAPYPPHHQSGYYKQQ

SEQ ID NO: 2886 - protein, 167 aa, Vitis vinifera
MLVYQDLLTADELLSDSFPYKELFNGALWEVEGKWVVQGAIDVDIGANPSAEGGEEEGVDDQTVKVVDIVDTFRLQEQPPFDKKQFVTYMKRYIKLLTPKLEGEKQEEFKKNIEGATKFLLSKLSDLQFFVGESMHDDGSLVFAYYKDGATDPTFLYFGHGLKEIKC

SEQ ID NO: 2887 - protein, 180 aa, Vitis vinifera
MPHPCKNSTDKLVYNIDAALPDIHVQNAGLLTALTAKKFPFLGEVGLSATLVKLDANAMSSPIYAADSSVQVIYVAKGSGRIQVVGINSERALDTKVKAGHLCVVPRFFVASVIADGEGMEYFSMITTTQPVFGEFTGKTSVWGALSPQVLQASLNVGPEFEQLFRAKIKKSTILVPPQN

SEQ ID NO: 2888 - protein, 190 aa, Vitis vinifera
MGYWKSKVLPKIKKIFEKSGTKKTAAAEACKSFDDSKEEINKDFEAKKDELQPKVIEIYEASSTEIKTLVKEPKEAGLKNSTAVQKFLDELVKIEFPGSKAVCEASSKYGPGLVSGPVLFLFEKVSTFIVTEENEEELPPPTTNTTGEEEASGKEKEIVIEEEKKEEVAVMVEEREATEAVAAAAEPAKP

SEQ ID NO: 2889 - protein, 206 aa, Vitis vinifera; identical to SEQ ID NO: 491

SEQ ID NO: 2890 - protein, 236 aa, Vitis vinifera; identical to SEQ ID NO: 508

SEQ ID NO: 2891 - protein, 249 aa, Vitis vinifera
MLAVFHKSIAEAPEGLRTPDSASLPALKDGFLPQFFASLHPSAVTVNLGSSGAISYSVDKQNPLLPRLFAVVDDIFCLFQGHIENVALLKQQYGLNKTANEVIIVIEAYRTLRDRGPYPADQVVRDLHGKFAFVLYDSSNRTAFLAADADESVPFFWGVDSEGHLVLSDDEETVKKGCGISFAPFPKGCFFTTSGGLRSFEHPLNELRAEPRVDSSGQVCGANFKVDVEAKKETGMPRVGSAANWSTHY

SEQ ID NO: 2892 - protein, 273 aa, Vitis vinifera
MAERGGGGERGGFGRGFGRGGRGDRGRGGRRRSAGRREEEEKWVPVTKLGRLVKDGKIRTVEEIYLHSLPIKEHQIIDTLVGPSLKDEVMKIMPVQKQTRAGQRTRFKAFVVVGDGNGHVGLGVKCSKEVATAIRGAIILAKLSVIPVRRGYWGNKIGKPHTVPCKVTGKCGSVTVRMVPAPRGAGIVAARVPKKVLQFAGIEDVFTSSRGSTKTLGNFVKATFDCLLKTYAYLTPDFWRETRYTKSPFQEHTDLLAKPTKAIYQDDVERVEA

SEQ ID NO: 2893 - protein, 284 aa, Vitis vinifera
MTKDVEVAEHGSFSAKDYHDPPPAPLFDSVELTKWSFYRALIAEFIATLLFLYITVLTVIGYKSQTAGGDPCGGVGILGIAWSFGGMIFILVYCTAGISGGHINPAVTFGLFLARKVSLIRAILYMVAQCLGAICGVGLVKAFQSAYYDRYGGGANELSTGYSKGTGLGAEIIGTFVLVYTVFSATDPKRSARDSHVPVLAPLPIGFAVFMVHLATIPITGTGINPARSLGAAVIYNNEKAWDDQWIFWVGPFIGAAIAAFYHQFILRAGAVKALGSFRSTTHV

SEQ ID NO: 2894 - protein, 306 aa, Vitis vinifera
MSEKSKILIIGGTGYIGKFIVAASARSGHPTFALVRESTVSNPSMSEIIESFKSSGVTLVYGDLHDHESLVKAIKQVDVVISTVGRAQFSDQVKIIAAIKEAGNVKRFFPSEFGNDVDRIHAVGPAKTAFGIKAQIRRAIEAEGIPYTYLEATAAFFVSRLSQPGATGPPRDKIIIPGDGNPKAVFNKEDDIGTYTIKAVDDPRTLNKNLYVRPPQNTYSYNEIVSLWEKKIGKTLEKIYVPEEQVLKNIQEASAPLNAILSIDHSVFIKGDQTNFEIEPSFGVEASELYPDVKYTTVDELLNQLV

SEQ ID NO: 2895 - protein, 316 aa, Vitis vinifera
MSAFYGPPKPEEDMIALIHHAVNSGITLLDTSDMYGPFTNEILLGKALKGGVREKVELASKFGIIYADGKRDVRGDPAYVRAACEASLKRLEVDCIDLYYQHRIDTRVPIEVTIGELKKLVEEGKIKYIGLSEASASTIRRAHAVHPITAVQLEWSLWTRDVEEEIVPTCRELGIGIVAYSPLGRGFFSSGTKLIENLSNNDFRKNLPRFQPENLGHNKILYERVSEIATRKGCTPSQLALAWVHHQGDDVCPIPGTTKIENLKQNIGALSVKLTPEEMAELESIASADGVKGDRYESTAFTWKTADTPPLDSWKA

SEQ ID NO: 2896 - protein, 345 aa, Vitis vinifera
MAKEVSNGDHNSVTKPPPTPSPLRNSKFFQSNMRILVTGGAGFIGSHLVDKLMQNEKNEVIVADNYFTGSKDNLRKWIGHPRFELIRHDVTEPLLIEVDQIYHLACPASPIFYKYNPVKTIKTNVIGTLNMLGLAKRVGARILLTSTSEVYGDPLVHPQEESYWGNVNPIGVRSCYDEGKRVAETLMFDYHRQHGIEIRIARIFNTYGPRMNIDDGRVVSNFIAQAIRGESLTVQAPGTQTRSFCYVSDMVDGLVRLMEGDNTGPINIGNPGEFTMLELAETVKELINPKVEISMVENTPDDPRQRKPDITKAKELLGWEPNVKLREGLPLMEEDFRLRLGVAKN

SEQ ID NO: 2897 - protein, 379 aa, Vitis vinifera
MALLSDLINLNLSETTEKVIVEYIWVGGSGMDLRSKARTLSGPVSDPAKLPKWNYDGSSTGQAPGEDSEVILYPQAIFKDPFRRGNNILVMCDTYTPAGEPIPTNKRCNAAKIFSHPDVAAEVPWYGIEQEYTLLQKEVKWPIGWPVGGFPGPQGPYYCGIGADKAWGRDIVDAHYKACLYAGINISGINGEVMPGQWEYQVGPSVGISAGDELWVSRYILERITEIAGVVLSFDPKPIQGDWNGAGAHTNYSTKSMRNDGGFEVIKKAIEKLGLRHKEHIAAYGEGNERRLTGRHETADINTFLWGVANRGASIRVGRDTEKKACFKHGSLCGHLHDCRNYHPLEAIRHPSPPSQQACGIVLLEFPVKIVSLELLVLV

SEQ ID NO: 2898 - protein, 397 aa, Vitis vinifera
MENLRRRRMSHRKFEHPRHGSLGFLPRKRAARHRGKVKAFPKDDPSKPCRLTAFLGYKAGMTHIVREVEKPGSKLHKKETCEAVTIVETPPMVIVGVVAYVKTPRGLRSLNTVWAQHLSEEVKRRFYKNWCKSKKKAFTKYSKQYETEEGKKSIQAQLEKMKKYASVIRVLAHTQIRKMKGLKQKKAHLMEIQVNGGTIAQKVDYAYGFFEKQVPVDAIFQKDEMIDIIGVTKGKGYEGVVTRWGVTRLPRKTHRGLRKVACIGAWHPARVSFTVARAGQNGYHHRTEMNKKIYKLGKIEQESHTALTEFDRTEKDITPMGGFPHYGVVKDDYVMIKGCCVGPKKRVVTLRQSLLKQTSRVALEEIKLKFIDTSSKFGHGRFQTTQEKQKFYGRMKA

SEQ ID NO: 2899 - protein, 429 aa, Vitis vinifera
MALRHLTPLSPLSPFTRIPPRRCFTQKPFSLSVSASMGSSSRKVLVPIAHGSEPMEAVIIIDVLRRAGADVTVASVEKRLQVDACHGVKIVADALISDCADTGFDLISLPGGMPGAATLRDCGMLESMVKKHAADGQLYAGICAAPAVALGSWGLMKGLKATCYPSFMEQLSSTATTVESRVQQDGKVVTSRGPGTTMEFSVSLVEQLYGKEKANEVSGPLVMCSNLGDKFIMAELNPIDWKCDNPQILVPIANGTEEMEAVIIIDFLRRAKANVVVASVEDKLEIVASRKVKLVADVLLDEAVKLSYDLIVLPGGLGGAQAFASSEKLVNLLKNQRESNKPYGAICASPALVLEPHGLLKGKKATAFPALCSKLSDQSEIENRVLVDGNLITSRGPGTSMEFALAIIEKFFGHGKALELAKVMLFSSQ

SEQ ID NO: 2900 - protein, 473 aa, Vitis vinifera
MWAIVRRKVASGSSAASVLGQSLSKIRPAAASVPRGYTTTAKEALLLGGGSKIIRNVGHYKYLGSLVSSKPVREVTSFLQIDSPIQVQHRPFSSDKGDLVDAVVPFMGESISDGTLAKFLKKPGDHVEVDEPIAQIETDKVTIDVASPEAGVVQKFVAKEGDVVEPGTKIAVISKSGEGVTHVAPSEKTPSKASPEPSPTEKEAVDKPKPKSETPPPKEKPKAPAPPPPRPSATEPVLPPKERERRVPMTRLRKRVATRLKDSQNTFAMLTTFNEVDMTNLMKLRSDYKDAFLEKHGVKLGLMSGFIKAAVSGLQNQPIINAVIDGDDIIYRDYIDISIAVGTPKGLVVPVIRNADGMNFADIEKAINTLARKANDGTISIDEMAGGSFTISNGGVYGSLLSTPIINPPQSAILGMHSIVNRPMVVGGNVVSRPMMYIALTYDHRLIDGREAVFFLRRIKDVVEDPRRLLLDI

SEQ ID NO: 2901 - protein, 514 aa, Vitis vinifera
MASILEPSKASFFPAMTKIVGTLGPKSRSVEVISGCLKVGMSVARFDFSWGDPDYHQETLENLKAAVKSTKKLCAVMLDTVGAELQVVNKCEKSISLLADGFVVLTPYQDQEASSELLPINFNGLAKAVKKGDTIFVGQYLFTGSETTSVWLEVSEVKGDDVVCMIKNSATLAGSLFTLHVSQIHIDLPTLSDKDKEVISTWGVKNKIDFLSLSYTRHAEDVRHARDHLSKLGDLHQTQIFAKIENVEGLNHFDEILQEADGIILSRGNLGIDLPPEKVFLFQKAAVYKCNMAGKPAVITRVVDSMTDNLRPTRAEATDVANAVLDGSDAILLGAETLRGLYPVETISIVGKICAEAEKVFNQDLYFKKTVKYVGEPMTHLESIASSAVRAAIKVKASVIICFTSSGRAARLIAKYRPTMPVLSVVIPRLKTNQLKWSFSGAFEARQSLIVRGLFPMLADPRHPAESTSATNESVLKVALDHGKASGVIKSHDRVVVCQKVGDASVVKIIELED

SEQ ID NO: 2902 - protein, 505 aa, Vitis vinifera
MVISTTISDSSEHLHATFASRYVRDPLPKFKMPERSIPKEAAFQIISDELMLDGNPRLNLASFVTTWMEEECDKLIMASVNKNYVDMDEYPVTTELQNRCVNMIAHLFNAPVGENETAIGVGTVGSSEAIMLAGLAFKRKWQQKRKSEGKPYDKPNIVTGANVQVCWEKFARYFEVELKEVKLREGYYVMDPVKAVEMVDENTICVAAILGSTLTGEFEDVKLLNELLTKKNTETGWGTPIHVDAASGGFIAPFLHPDLEWDFRLPLVKSINVSGHKYGLVYAGVGWVVWRTKDDLPEELIFHINYLGSDQPTFTLNFSKGSSQIIAQYYQFIRLGFEGYKNIMTNCMDNANVLKQGLVETGRFEIVSKDIGVPLVAFSLKDTSNYTVFDISNNLRRYGWIIPAYTMPPDAEHIAVLRVVVREDFSRSLAERLLSDIEKVMREMDAVQSRATTRATHVIATVDETREGEGEGSEKLNKKTVMENREEIAMYWKRVVDRKKTSGVC

SEQ ID NO: 2903 - protein, 526 aa, Vitis vinifera
MRRFVSGVLSSYQKRSLSHRSLRFFSSTTSLSNSDSPSSSSSAAMPTPVTLETINPKVLECEYAVRGEIVTLAQRLQQELQEKPGSLPFDEILYCNIGNPQSLGQQPITFFREVIALCDHPPILDKSETQGLFSADAIERAWQILDQIPGRATGAYSHSQGIKGLRDTIAAGIEARDGFPSNPNDIFLTDGASPAVHMMMQLLIRTEKDGILCPIPQYPLYSASIVLHGGTLVPYYLDEATGWGLEISELQKQLEDAKSKGITVRALVVINPGNPTGQVLSEDNQRDIVEFCKKEGLVLLADEVYQENVYVPDKKFHSFKKISRSMGYGEEDISVVSFQSVSKGYYGECGKRGGYMEVTGFGADVREQIYKVASVNLCSNITGQILASLVMSPPKVGDESYESYFMEKDGILSSLARRAKTLEDALNSLEGVTCNKAEGAMYLFPRIHLPEKAIKAAEAAKTAPDAFYARRLLNATGIVVVPGSGFGQVPGTWHFRCTILPQEDKIPAVVSRLTEFHKGFMEEFRD

SEQ ID NO: 2904 - protein, 563 aa, Vitis vinifera
MNTSQFMDKQIMDLSAGSQSNDFINLMSPEDDHLTGVGGGGGVGSKKEEIVPSYDFLPIRPKGSSQFSNLDAVGGAGGPRAWSSTDSKTNTPGIRNYGSLDSNELSKISLEKDRNIDAAIVSEIDRTMKKHADNLLHVLEGLSARLTQLESRTRNLENSVDDLKVSVGNNHGSADGKMRQLENILREVQTGVQVLRDKQEIVEAHLQLAKLQVSKADQQSETQNTVTLDSAKQAASPPQQSHQPLPPPVTPQTLPALPPPNAPPPPPQLNMQSPPAQLPSQFPPNQIPSIPQREPYFQPPGQAQEAPNQQYQLPPTQQPQPPPAAPSHQQYQPASLPQYSQPPQLPQQHHSIAPINPPPQHQPPLGHHPEETSYVPPQTYPPSLRQPPSQPPSQPLSGAPPSQQFYGPPSHMYEVPSGRSSSGFSTGFVPPPSGPTEPYSYSGSPSQYGSNMPMKPQQFSSGVQGGGSGYPQLPTARVLPHALPTASGPVGGSGPGSGSSGSGNRVPIDDVVDKVTNMGFPRDVVRATVRKLTENGQSVDLNVVLDKLMNDGEVQPPRGWFGR

SEQ ID NO: 2905 - protein, 575 aa, Vitis vinifera
MADSDCKTHDSQALVDGNLLAAKSFAAAGITHMFGVVGIPVTSFANRAVSMGIRFLAFHNEQSAGYAASAYGYLTGKPGLLLTVSGPGCVHGLAGLSNAAVNAWPMVLISGSCDQADFGRGDFQELDQVAVVRPFSKFSAKATDISQIPNCVFKVLDQALSGRPGGCYLDLPTDVLHQTVSQSEAETLLAAAEKSRAKPQFPSVESSLIEKAVSLLRHAERPLIVFGKGAAFARAENSIKKLVESTGIPFLPTPMGKGLLPDAHELAATAARSLAIGKCDVALVVGARLNWLLHFGEPPKWSKDVKFILVDVCEEEIQLRKPCLGLAGDAKQVLDMISLEIKDDPFCLGKSHPWVEAISKKARDNVSRMEAQLAKDVVPFNFLTPMRIIRDAILGVGSPAPILVSEGANTMDVGRSVLIQTEPRTRLDAGTWGTMGVGLGYCIAAAVASPDRLVVAVEGDSGFGFSAMEVETLVRYQLPVVVIVFNNGGVYGGDRRNPEEVTGPYKDDPAPTSFVPGAAYHVLIEAFGGKGYLVGTPDELKSALAESFSSRKPAVINVTIDPYAGAESGRMQHKN

SEQ ID NO: 2906 - protein, 616 aa, Vitis vinifera
MDSDFGIPRELSDLQKHRCLYEPELPPCLQGTTVRVEFGDATTASDLSGARTISRSFPHTYGQPLAHFLRATAKVPDAQVITEHPPIRVGVVFCGRQSPGGHNVIWGLHNALKIHNPKNILLGFLGGSEGLFAQKTLEITDDILSTYKNQGGYDLLGRTKDQIRTTEQVNAALSTCKNLKLEGLVIIGGVTSNTDAAQLAETFAEAKCQTKVVGVPVSLNGDLKNQFVESNVGFDTICKVNSQLISNVCTDALSAEKYYYFIRLMGRKASHVALECTLQSHPNMVILGEEVAASKLTLFDLTKQICDAVQARAEQDKYHGVILLPEGLIESIPEVYALLQEIHGLLRQGVSAVNISSKLSPWASALFEFLPPFIKKQLLLYPESDDSAQLSQIETEKLLAHLVEAEMNKRLKEGTYKGKKFNAICHFFGYQARGSLPSKFDCDYAYVLGHICYHVLAAGLNGYMATVTNLKNPVNKWRCGAAPITAMMTVKRYSRGPGTSSIGKPAVHPYALDLKGKAYELLSQNATKFLLDDLYRNPGPLQFDGPGADAKAVTLCVEDQDYMGRIKKLQQYLDKVRTIVKPGCSQDVLKAALSAMASVTEILSVMTSPSSGQTPL

SEQ ID NO: 2907 - protein, 644 aa, Vitis vinifera
MASVVGSTTEKLSKLDINGESIFSVPNLHKNLSILSPDQIKLARMLVEAGQSHLFQSWAEPGVEDEEKRGFFEQVARLNASYPGGLTSYIKTARELLADSKAGKNPFDGFTPSVPTGEVLTYGDDNFVNFEELGIREARNAVFVLVAGGLGERLGYNGIKLALPSETTMGTCFLQNYIESILALQDASCRLVQGYNHILRMPQSTIPTKRVSASIAKTKLGGGCQNQIPLVIMTSDDTHARTIELLESNAYFGMEPSQVKLLKQEKVACLDDNDARLAVDPKSKYRIQTKPHGHGDVHSLLYSSGLLNIWYDAGLRWVLFFQDTNGLLFKAIPAALGVSSSKLYDVNSLAVPRKAKEAIGGITKLTHADGRTMVINVEYNQLDPLLRATGHPDGDVNCETGYSPFPGNINQLILKLGPYIKELTKTGGAIKEFVNPKYKDSSKTSFKSSTRLECMMQDYPKTLPPSARVGFTVMDAWLAYAPVKNNPEDAAKVPKGNPYHSATSGEMAIYRANSLILRKAGGVQIDDPVQEVFNGQEMEVWPRITWKPIWGLTFSEIKRKISGSCSISQRSTLVIKGCNIFLEDLSLDGTLVVNSVEDAEVKVGGVVQNKGWILEKVDYKDTTVPEEVRTRGFRIKKVEQLEKN

SEQ ID NO: 2908 - protein, 699 aa, Vitis vinifera
MAETETFAFQAEINQLLSLIINTFYSNKEIFLREIISNSSDALDKIRFESLTDKSKLDAQPELFIHIVPDKTNNSLTIIDSGIGMTKADLVNNLGTIARSGTKEFMEALAAGADVSMIGQFGVGFYSAYLVAEKVIVTTKHNDDEQYVWESQAGGSFTVTRDTSGESLGRGTKITLYLKEDQLEYLEERRLKDLIKKHSEFISYPISLWIEKTTEKEISDDEDEEDKKDEEGKVEEVDEEKEKEEKKKKKIKEVSHEWSLVNKQKPIWMRKPEEITKEEYAAFYKSLTNDWEEHLAVKHFSVEGQLEFKAILFVPKRAPFDLFDTRKKPNNIKLYVRRVFIMDNCEELIPEYLGFVKGIVDSEDLPLNISREMLQQNKILKVIRKNLVKKCLELFFEIAENKDDYNKFYEAFSKNLKLGIHEDSQNKGKLAELLRYHSTKSGDELTSLKDYVTRMKEGQNDIYYITGESKKAVENSPFLEKLKKKGIEVLFMVDAIDEYAVGQLKEFEGKKLVSATKEGLKLDESEDEKKKQEALKEKFEGLCKVIKDVLGDRVEKVVVSDRVVDSPCCLVTGEYGWTANMERIMKAQALRDSSMAGYMSSKKTMEINPENPIMEELRKRADADKNDKSVKDLVLLLFETALLTSGFSLDEPNTFGNRIHRMMKLGLSIDEDGPEADTDMPPLEEADADAEGSKMEEVD

SEQ ID NO: 2909 - protein, 752 aa, Vitis vinifera
MKKKTHLLHFVLLHSLLFLGCLALCSAEQISISSHGHLTDAEVMYIKRRQLLYYRDEFGDRGEDVTVDPSLVFENPRQRNAYIALQAWKQAILSDPLNLTLNWVGSNVCNYTGVYCAQAPDNSSIRTVAGIDLNHGDIAGYLPEELGLLTDLALFHINSNRFCGTVPHKFAKLKILFELDLSNNRFAGKFPEVVLHLPTLKFLDLRFNEFEGTVPKELFDKDLDAIFINHNRFAFDLPDNFGNSPVSVIVVANNKLHGCVPASLGNMADTLNEIILMNNQFRSCLPVEIGLLKNLTVLDVSYNGLLGPLPKEIGGMVELEQLNVAHNMLSGSIPASICKLPNLENFTFSYNFFTGEPPACLGLADFEDRRNCLPGRPEQRSAGQCNSFLSRPVDCSSFRCSPFVPSLPTPPPPSPPVFPSPPPTPVYSPPPVFSPPPPVLSSPPPPSPPPPSPSPPPPPVYSPPPPPPVYSPPPPPPPPPPPPPVYFPPPPPPSPPPPSPPPPSPPPPSPSPPPPPSPPPPVLSPPPPVYCVRSPPPPPPNSPPPPIYSPPPPPVHSPPPPSPYYSSPPPPPPHHSPPPPPHSPPPPPPIYPYASPPPPPVHSPPPPVHSPPPPCIEPPPPSPPPPSPPPCIEPPPPPSPPPCVEYSPPPPSPHSPPPPPVHYLPPPSPSPPPPPVYASPPPPPSLPPPVYYHSPPPPSPPPPTPCENPPPTPSPPPPIIYESPPPPTPVYEGPLPPIFGVSYASPPPPPFY

SEQ ID NO: 2910 - protein, 841 aa, Vitis vinifera
MATETLLSDHHSPDKTMEKVFEETQTVKLEDVDPPKEVGGKDEEEKLDADGLAGSETPVNKLEETTGMQTKLPTAVEVKKVDDAPVVDVHVEADSEKIENCALNPESLSASGMGDGAVETQSGDPEKCIVVEKVENPSLVDVPAEVDLKVVENSVLDPESDSASKPGETPEEHSVDVLKVDDGPIVDIPTETGSKVVENSVLEPEPSSASEPGGENFERQLEAPKGDTTEVEKVDVVSVADVLVEAGPKVVENSVLEPESSPSEPIAVAAERLSEEHPTVVEKVDDATIVDVPCEASLEVVENSVPEPESSPSEPIGVAAERLSEEHPTVVEKVDDATIVDVPCEASLEVVENSVLEPESSPSKPIGVAAERLSEEHPTVVEKVDDATIVDVPCEASLEVVENSVLEPESSPSEPIGVAAEKLSEEHPTVVEKVDDAAIVDVLCEASLEVVENSVLEPESSPSEPIGVAAERLSEEHPTVVEKVDDATIVDVPCEASLEVVENSVLDPESSSASKPGDEMVESQREALEEHPVEVEKVDNIPIVDFPAEAGAAARATDKEEGGGDVVERLSKDETVVAAKVEQQKEEKNVKIEDSEGKNTKVEESIQTETAKTDDRNGSNFVAEVAEIDREQVSRDVEEVAEVKKLENVEEDIPLSVEADKKNVKIEDCEGKNTKVEESIQTETAKTDDRNGSNFVAEVAEIDREQVSRDVEVVAEVKKLENVEEDIPLSVEADKDKDGEGKLSEVDAKETVKTNADNLESAKTDGEIAKSNPPNLETLKNGDDSKTSAKPPKQDDSVKKHSNNLISKVKQSIVKVKKAITGKSPSPKALLPEAKGDEKVK

SEQ ID NO: 2911 - protein, 1116 aa, Vitis vinifera
MDPESTQLQQAQLAAILGPDPGPFETLISHLMSTSNDQRSHAELLFNLCKQSDPNSLSLKLAHLLQFSPHIEARAMAAILLRKQLTRDDSYLWPRLSASTQSSLKSILLGCIQREDAKSISKKLCDTVSELASSILPENGWPELLPFMFQCVTSDSAKLQEAAFLIFAQLAQYIGETLVPHIKHLHSVFLQSLTSSSSSDVKIAALSAAINFIQCLSSSADRDRFQDLLPAMMRTLTEALNCGQEATAQEALELLIELAGTEPRFLRRQLVDVVGSMLQIAEAESLEEGTRHLAVEFVITLAEARERAPGMMRKLPQFISRLFAILMKMLLDIEDDPAWHSADSEDEDAGESSNYSVGQECLDRLAISLGGNTIVPVASELLPAYLAAPEWQKHHAALIALAQIAEGCSKVMIKNLEQVVTMVLNTFQDPHPRVRWAAINAIGQLSTDLGPDLQVQYHQRVLPALAASMDDFQNPRVQAHAASAVLNFSENCTPDILTPYLDGIVGKLLVLLQNGKQMVQEGALTALASVADSSQEHFQKYYDAVMPYLKAILMNATDKSNRMLRAKAMECISLVGMAVGKDKFRDDAKQVMEVLMSLQGSQMETDDPTTSYMLQAWARLCKCLGQDFLPYMSVVMPPLLQSAQLKPDVTITSADSDNEIEESDDESMETITLGDKRIGIKTSVLEEKATACNMLCCYADELKEGFFPWIDQVAPTLVPLLKFYFHEEVRKAAVSAMPELLRSAKLAVEKGLAQGRNESYVKQLSDYIIPALVEALHKEPDTEICASMLDALNECLQISGRILDESQVRSIVDEIKQVITASSSRKRERAERTKAEDFDAEEGELLKEENEQEEEVFDQVGEILGTLIKTFKASFLPFFDELASYLTPMWGKDKTAEERRIAICIFDDVAEQCREAALKYYDTYLPFLLEACNDDNSDVRQAAVYGLGVCAEFGGAAFKPLVGEALSRLNVVIRHPNALQPDNVMAYDNAVSALGKICQFHRDSIDSAQVVPAWLSCLPIKGDLIEAKVVHDQLCSMVEMSDRELLGPNNQYLPQIVAVFAEVLCAGKDLATEQTISRMINLLRQLQQTLPPSTLASTWSSLQPQQQLALQSILSS

SEQ ID NO: 2912 - protein, 151 aa, Vitis vinifera
MALTGKLETETEIKAPADKFFKIFRSQAHHLPNICSDKIHKIEVHEGDWETQGSVKHWSLTVGENSESIKETVDQIDEENRSITFKVLDGEVLKDYKSYKFTTQAIPKGEGCLVIWTIEYEKASEGGPDPHNCLEFSVNITKDIESHLLNA

SEQ ID NO: 2913 - protein, 160 aa, Vitis vinifera
MSDEEHHFESKADAGASKTYPQQAGAIRKNGYIVIKARPCKVVEVSTSKTGKHGHAKCHFVGIDIFNGKKLEDIVPSSHNCDVPHVTRTDYQLIDISEDGFVSLLTDSGGTKDDLRLPTDDNLLTQIKDGFAEGKDLVVTVMTAMGEEQICALKDIGPKN

SEQ ID NO: 2914 - protein, 180 aa, Vitis vinifera
MASSMVSSATVATINRATPAQANMVAPFTGLKSLSTFPGTRKANTDITSVASNGGRVRCMKVWPTEGLMKFETLSYLPPLNDEQLCKEVDYLLRMKWIPCLEFTKLYPYPHREHNRSPGYYDGRYWTMWKLPMFGCTDSAQVIKEVQEARTAYPDAHIRIIGFDNNRQVQCIAFIAYKPS

SEQ ID NO: 2915 - protein, 200 aa, Vitis vinifera
MKLVLWSLLLLGTLAISQAKKSTENLKEVTHKVYFDVEIDGKPAGRVVMGLFGKTVPKTVENFRALCTGEKGIGSSGKPLHFKGSAFHRIIPSFMIQGGDFTLGDGRGGESIYGEKFADENFKLKHTGPGLLSMANAGPDTNGSQFFITTVTTSWLDGRHVVFGKVLSGMDVVYKMEAEGRQSGTPKTKVVIADSGELPL

SEQ ID NO: 2916 - protein, 196 aa, Vitis vinifera; identical to SEQ ID NO: 495

SEQ ID NO: 2917 - protein, 222 aa, Vitis vinifera
MRFTTTLPILFPLLLSLLFTSTHAATFDILNKCTYTVWAAASPGGGRRLDSGQSWTITVNPGTTNARIWGRTSCTFDANGRGKCETGDCNGLLECQGYGSPPNTLAEFALNQPNNLDYIDISLVDGFNIPMDFSGCRGIQCSVDINGQCPSELKAPGGCNNPCTVFKTNEYCCTDGPGSCGPTTYSKFFKDRCPDAYSYPQDDKTSLFTCPSGTNYKVTFCP

SEQ ID NO: 2918 - protein, 236 aa, Vitis vinifera
MATPDESSSAKKWLPLEANPDVMNQFLWGLGLLEDEAECYDVYGLDEELLAIVPKPVLAVLFLYPITTQSEEERILQDSTKRETSNKVYFMRQTVGNACGTIGLLHAIGNVTSEIKLVEGSFLNRFFKSTASMDPLERAAYLENDQEMEVSHSVAATAGDTEASTNADAHFICFSCVDGELYELDGRKSGAVSHGPSSPSTLLQDAAKVIQGIIQKNPDSINFNVIAISKKLEGPY

SEQ ID NO: 2919 - protein, 245 aa, Vitis vinifera
MAVTFYGVNSGSGLKKLDEYLLTRSYISGYQASKDDITVHAALSKAPSSEYVNVSRWYNHIESLLRISGVSGEGCGVTIEGFAPVDAVATPPAEDTKATAAEDDDDDDVDLFGEETEEEKKAAEARAAAVKASGKKKESGKSSVLLDVKPWDDETDMKKLEEAVRSIKMEGLLWGASKLVPVGYGIKKLQIMLTIVDDLVSVDDLIEEQLTVEPTNEYVQSCDIVAFNKILLIHALIHLICVYRI

SEQ ID NO: 2920 - protein, 277 aa, Vitis vinifera
MAFFGKVGNILRQTVSKQVNSQFSVSNPSIYQAIRCMSSSKLFIGGLSYSTDDTSLREAFHKYGEVIEARVIVDRETGRSRGFGFVTFTSSEEASSAIQALDGQDLHGRRVRVNYATDRARSGGFGGGGGYGGGGGGYGGGGYGGGGYGGSGGYGGGGYGGGSGGYGGGGDSYGSGGGNYGSGGGGYGGSSGGYGSGGNFSVAGGSDNYVGGAAGSSSGFPSGGGSSFASGGADQLGTNESSSVGDGAGEFSPDEPATEGNYRDDDDEPDDYANRRA

SEQ ID NO: 2921 - protein, 271 aa, Vitis vinifera
MGSSLLLPLLCAGVVTVATLFLPSSFASEAYPSAYGSGSCNVELIPVKREVYADGRIFDITHPYTPNMPTFGTDEGIGEVIWLEKSMKNGSITNNSHMKMPTHTGTHVDSPGHVFDHYFDAGFDVETLDLEVLNGPALLVDAPRDKNITAEAMESLQIPKGVRRVLFRTLNTDRKLMFKKEFESDYAGFTEDGARWLVENTDIKLVGIDYVSVATYDHIVSAHLPFLEGREVILVESLKLDDVPAGMYNVHCLHLRLPGAEGAPIRCILIK

SEQ ID NO: 2922 - protein, 286 aa, Vitis vinifera
MAGRYEIELIISSAKDLKNVNWRHGSLKPYVVVWVDPAAKLSTKVDNDGDTFPCWNETLLIPVPSRIEDSTLYLDVVHLKADDEDDTKPVVGSARLFLRDVVDDVGFGAQAIRTLELRRPSGRPHGKVEVKVSVRDPRYRAPGSAYSPPYGVPPPAGTRGAGYAASPAYATPYGAPPPDPYYSNAPPYGQDPYRQPAYGQPQPRYGDPAYGQGPYAQGPYGQTVVEQPQKKSGMGMGTGLAVGAVAGVLGGLAISEGVDALEDHIADDVEDRIDGDDLEDYDGDDF

SEQ ID NO: 2923 - protein, 294 aa, Vitis vinifera
MVDEQRLPENNVQQIELLTGTEDSYGGVRIEIKNRMDSNVFGDVLRASISQWRQKGTKGVWIKLPIQHANLVEAAVKEGFWYHHAEPDYLMLVLWIPKTAHTLPANASHRVGIGAFVINSKREVLVVQENSGRFKGTGVWKLPTGVVNEGEDICTAAIREVEEETGIKTEFVEILAFRQSHKAFFTKSDLFFVCMLQPLSTEIQKQEEELEAAQWMAMEEYAAQPFVKKNPLFDSIANICLAKKDMKYTGFSPFSATSSSGKTNILYFNNQDLKQPLSSGKYKKTEPVQYKNNK

SEQ ID NO: 2924 - protein, 332 aa, Vitis vinifera
MAASLQAAATLMQPTKVGVPTRTSLQLRSSQSVCKAFGLEPAGARFTCSLQADLKDLAHKCVDATKIAGFALATSALLVSGASAEGAPKRLTYDEIQSKTYMEVKGTGTANQCPTIDGGVDSFAFKSGKYQLKKFCLEPTSFTVKAEGVSKNAPPEFQNTKLMTRLTYTLDEIEGPFEVSSDGTVKFEEKDGIDYAAVTVQLPGGERVPFLFTIKQLVASGKPDKFGGEFLVPSYRGSSFLDPKGRGGSTGYDNAVALPAGGRGDEEELKKENIKDASSSTGKITLSVTKSKPETGEVIGVFESIQPSDTDLGAKTPKEVKIQGFWYGQLES

SEQ ID NO: 2925 - protein, 327 aa, Vitis vinifera
MAETLVLRGTMRAHTDMVTAIATPIDNSDMIVTSSRDKSIILWHLTKDDKTYGVPRRRLTGHSHFVQDVVLSSDGQFALSGSWDGELRLWDLAAGTSARRFVGHTKDVLSVAFSVDNRQIVSASRDRTIKLWNTLGECKYTIQDADAHSDWVSCVRFSPNNLQPTIVSASWDRTVKVWNLTNCKLRATLAGHGGYVNTVAVSPDGSLCASGGKDGVILLWDLAEGKRLYSLDAGAIIHALCFSPNRYWLCAATEQSIKIWDLESKSIVEDLKVDLKTEAEKSEDTTTTAKKKGKIIYCTSLSWSADGSTLFSGYTDGVVRVWGIGRY

SEQ ID NO: 2926 - protein, 329 aa, Vitis vinifera
MSSESGSVTRSEVVCVTGGSGYIGSWLVCLLLRRGYTVHATVKNLKDERETKHLEALEGADSRLRLFQIDVLDYDSIVAAVNGAAGVFHLASPCIVDQVQDPEKELLDPAIKGTNNVLTAAKELGVGRVVVTSSISAIIPSPNWPADVVKGEDCWTDTEYCKQKGIWYPLSKTLAEKAAWEFAKEKGLDVVVVNPGTVMGPILPPGLNASMLMILRLLQGCTDIYEDFFMGSVHVKDVALAHILVYENKSASGRHLCVEAISHYGDFAAKVAELYPEYKVPRLPKDTQPGLLRAKTASKKLMDLGLQFIPMEQIIKDSVESLRSKGFIS

SEQ ID NO: 2927 - protein, 383 aa, Vitis vinifera
MAMMKRVAESAVRAFALGSTSGALTKHLHASAGSKKIVGVFYKANEYAAMNPNFVGCVEGALGIRDWLESQGHQYIVTDDKEGPDCELEKHIPDLHVLISTPFHPAYVTAERIKKAKNLQLLLTAGIGSDHIDLKAAAAAGLTVAEVTGSNVVSVAEDELMRILILVRNFLPGHHQVISGEWNVAGIAYRAYDLEGKTVGTVGAGRIGRLLLQRLKPFNCNLLYHDRIKMDPELENQIGAKFEEDVDVMLPKCDIIVINMPLTEKTKGMFNKERIAKLKKGVLIVNNARGAIMDTQAVADACSSGHIAGYSGDVWYPQPAPKDHPWRYMPNQAMTPHISGTTIDAQLRYAAGVKDMLDRYFKGEDFPAQHYIVKEGQLASQYQ

SEQ ID NO: 2928 - protein, 393 aa, Vitis vinifera
MAERHQHPNIMRKVAGQLHLSSSISQDVHTHYGSFQSPALYQRRSAFGNYSNVVLQYPMTQSCQATQDLSLIASTASPVFVQAPQEKGFASFAVDFLMGGVSAAVSKTAAAPIERVKLLIQNQDEMIKAGRLSEPYKGIGDCFSRTIKDEGFASLWRGNTANVIRYFPTQALNFAFKDYFKRLFNFKKDRDGYWKWFAGNLASGGAAGASSLLFVYSLDYARTRLANDAKAAKKGGGDRQFNGLVDVYRKTLKSDGIAGLYRGFNISCVGIIVYRGLYFGMYDSLKPVILTGKLQDSFFASFALGWVITNGAGLASYPIDTVRRRMMMTSGEAVKYKSSLDAFNQILKNEGAKSLFKGAGANILRAVAGAGVLAGYDKLQVLVLGKKYGSGGA

SEQ ID NO: 2929 - protein, 388 aa, Vitis vinifera
MWMKMESFRALLGGILVAWVLGVGGEVGMGLPSCGFPAIYNFGDSNSDTGGISAAFLPISAPYGENFFHKPAGRDSDGRVLIDFIAEHLGLPYLSAYLDSIGANYRHGANFATGGSTILRPNETIYQYGISPFFLDMQISQFDQFKARTRDLYIQAKSPSDRDKLPRPEDFPKALYTFDIGQNDLSVGFRQSYGQLRASIPDIVNKFTAAVQHLYQEGARTFWIHNTGPIGCLPVAVMYIRNPPPGMLDQYGCNKAQNEIAVEFNKQLKDGVMRLRAQLPQASITYVDLYAAKYGLISDAKGQGFVDPLKICCGNRVNDYNVWCGQKAIINGTEVYGSSCASPSAYISWDGVHYSQAANHWFANHILNGSLSDSSLPIAQACHKPYHF

SEQ ID NO: 2930 - protein, 389 aa, Vitis vinifera
MFVKSSVCFDFILMGSTGGTTYGEYTYENLEREPYWPSEKLRISITGAGGFIASHIARRLKTEGHYIIASDWKKNEHMPEDMFCHEFHLVDLRVMDNCLKVTTGVGHVFNLAADMGGMGFIQSNHSVIMYNNTMISFNMLEASRINGVKRFFYASSACIYPEFKQLETNVSLKESDAWPAEPQDAYGLEKLATEELCKHYTKDFGIECRIGRFHNIYGPFGTWKGGREKAPAAFCRKAITSTDKFEMWGDGLQTRSFTFIDECVEGVLRLTKSDFREPVNIGSDEMVSMNEMAEIVLSFENKNLPIHHIPGPEGVRGRNSDNNLIKEKLGWAPTMRLKDGLRITYFWIKEQIEKEKVQGIDLSVYGSSKVVGTQAPVQLGSLRAADGKE

SEQ ID NO: 2931 - protein, 423 aa, Vitis vinifera
MVRGLVNKLVSRSLNVAGKWQQQQLRRLNIHEYQGAELMSKYGINVPKGVAVGSIEEVRKTIQDVFPKENELVVKSQILAGGRGLGTFKSGLKGGVHIVKTDQVEELAGKMLGQILVTKQTGPQGKVVSKVYLCEKMSLVNEMYFAITLDRSSAGPIIIACRKGGTSIEDLAEKFPDMIVKVPIDVFQGITDEDAAKVVDGLAPKVADRNASIEQVKKLYKLFCECDCTLLEINPIAETSDNQLVAADAKLNFDDNAAFRQKHIFALRDATQEDPREVAAAKADLNYIGLDGEIGCMVNGAGLAMATMDIIKLHGGTPANFLDVGGNASESQVVEAFKILTADDKVKAILVNIFGGIMKCDIIASGIVNAAKEVSLKVPVVVRLEGTNVDQGKRILKESGMALITAEDLDDAAEKAVKASGTC

SEQ ID NO: 2932 - protein, 390 aa, Vitis vinifera
MSWWWAGAIGAAKKKFDEDDAPRGFQSVGLVIGVTGIVGNSLAEILPLSDTPGGPWKVYGVARRPRPDWNADHPVEYIQCDISDSEDALAKLSPLTDVTHVFYVTWTNRATEIENCEANGTMLRNVLRALIPNAPNLRHICLQTGGKHYIGPFEAFGKIKPHDPPYHEDLPRLDAPNFYYTLEDILFEECEKKDDLTWSVHRPVIIFGFSPYSMMNILGTLCIYAAICKHEGIPLKFPGSKAAWDCYSDASDADLIAEQQIWATVDPYARNEAFNITNGDLFKWKHLWKVLAEQFDMEYAEFEEGEEKQSMVEMMKDKGPVWEEIVREKELLPTKLEDVAQWWFIDLVLGGESLLNCMNKSKEHGFLGFRNSRNSFVWWIDKMRGHKLIP

SEQ ID NO: 2933 - protein, 410 aa, Vitis vinifera
MTTMTMKVAREEPAVSHTSRYALPTEPKDNGTRSNLCSGPLILLSHGDPTGFKPFWRSVGDKCKVTIDSCDFMSYLTDVGKVCWFLEKELEEAIRQLHRTVGNAATDDRYIVVGTGSTQLFQATLYALTSPGGPESVNVVSAVPYYSSYPEETNFLRSALYKWAGDAYTFDKEGPYLELVTMPNNPDGQVRGPVVNRNDGKLIHDLAYYWPQYTPITAQADYDIMLFTFSKSTGHGGSRIGWAVVKDEDVAIKMTKYIELNSIGVSRESQHRAAKILGAVSDSSQCIGANFFQYGKSLMAERWTKFREVISRSRLFSLPKYMEEYCQFSGEDTEPHPAFAWLKCNNDIEDLEIFLRRYKIMGRGGRLFGSDPKLVRVSMLGDEETFNLFLERLSSIQDTIGNGNGNGNYI

SEQ ID NO: 2934 - protein, 424 aa, Vitis vinifera
MGKKAVLIGCNYQGTKAELKGCINDVNRMYNSLVNRFGFSQDDITVLIDTDPDGVQPTGKNIRRALLNLIRSAQPGDILFVHYSGHGTRLPAETGEDDDTGYDECIVPTDMNLITDDDFRSFVDKVPEGCRITIVSDSCHSGGLIDEAKEQIGESTRLQQEQESGSGFGFKSFLHQTVQGAIESRGIQLPSALQHHRHHRRRHHEEDVDEGGVDAEYGDRGYVKSRSLPLSTLIEILKQKTGKDDIDVGKLRPTLFDVFGEDASPKVKKFMNVVMNKLQQGGEGGGEGGGFLGMVGSLAQDFLKQKLEENNEDYAKPALETEVGSKQEVYAGSGKRALPDNGILISGCQTDQTSADASPSGNSAEAYGALSNAIQTIIEESDGSIRNQELVLKARETLKRQGFTQRPGLYCSDHHADAPFICDI

SEQ ID NO: 2935 - protein, 432 aa, Vitis vinifera
MEEQQTMEVPFLSEAKSEIADKESKRLSSYQYVGRTGSVIPTASLAGTEVSVEEIRSAAAFSDYYPPSLHAALISSPEPDPDEQAIVCQGAYGGDYGGNTNEFQRQILDEVEIRELLIDHVGHRCCWGSRPARTWKIHAVEDCNVYVGTLETFIEEREIIKEREPYHGGKIDGKDKGPGLGIWELDLRSEFPVLFVPHKESCAKIPHSEAIEKCSGCAGRGDIVCSTCNPGQEPGFYNENRMSQCPTCHGRGLIAHRDGSDTKCVKCNGKGNISCPICGSRGLIKCELCRGGGSLLTHDVAVIRWKTLSTRKVSATSGAASVPDEVFHRAKGVQLCNTQAHQCTPAFFADSFSLNKFSSEVIADRSPVPPTARVVCERHSISVVPVTRVTMAHRRQSFSFYIIGFSREVYLKDYYPSRFCWGLCPCLDWLKL

SEQ ID NO: 2936 - protein, 451 aa, Vitis vinifera
MRECISIHIGQAGIQVGNACWELYCLEHGIQPDGQMPSDKTVGGGDDAFNTFFSETGAGKHVPRAVFVDLEPTVIDEVRTGAYRQLFHPEQLISGKEDAANNFARGHYTIGKEIVDLCLDRIRKLADNCTGLQGFLVFNAVGGGTGSGLGSLLLERLSVDYGKKSKLGFTVYPSPQVSTSVVEPYNSVLSTHSLLEHTDVAVLLDNEAIYDICRRSLDIERPTYTNLNRLVSQVISSLTASLRFDGALNVDVTEFQTNLVPYPRIHFMLSSYAPVISAEKAYHEQLSVAEITNSAFEPSSMMAKCDPRHGKYMACCLMYRGDVVPKDVNAAVATIKTKRTIQFVDWCPTGFKCGINYQPPTVVPGGDLAKVQRAVCMISNSTSVAEVFSRIDNKFDLMYSKRAFVHWYVGEGMEEGEFSEAREDLAALEKDYEEVGAESAEGDEGDEGDEY

SEQ ID NO: 2937 - protein, 464 aa, Vitis vinifera
  MOD_RES (295)..(328): Any amino acid
MASLPWSLTTSTAIANTTNISAFPPSPLFQRASHVPVARNRSCRFAPSKVSCNSANGDPNSDSTSDVRETSSGKLDRRNVLLGIGGLYGAAGGLGATKPLAFGAPIQAPDISKCGTATVPDGVTATNCCPPVTTKIIDFQLPSSDSPMRTRPAAHLVSKEYLAKYKKAIELQKALPDDDPRSFKQQANVHCTYCQGAYDQVGYTDLELQVHASWLFLPFHRYYLYFNERILAKLIDDPTFALPYWAWDNPDGMYMPTIYASSPSSIYDEKRNAKHLPPTVIDLDYDGTEPTIPDXXXXXXXXXXXXXXXXXXXXXXXXXXXXXXXXXXQQHRRLPKSSNSVIRVEVPRPKKSRSKKEKEDEEEVLLIKGIELDRENFVKFDVYINDEDYSVSRPKNSEFAGSFVNVPHKHMKEMKTKTNLRFAINELLEDLGAEDDESVIVTIVPRAGGDDVTIGGIEIEFVSD

SEQ ID NO: 2938 - protein, 464 aa, Vitis vinifera
MTKNVGILAMDIYFPPTCVQQEALEVHDGASKGKYTIGLGQDCMAFCSEVEDVISMSLTVVTSLLEKYGIDPKQIGRLEVGSETVIDKSKSIKTFLMQIFEECGNNDIEGVDSSNACYGGTAALFNCVNWVESSSWDGRYGLVVCTDSAVYAEGPARPTGGAAAIAMLVGPDAPIAFESKLRGSHMSHAYDFYKPNLASEYPVVDGKLSQTCYLMALDSCYKLLCSKYEKLEGKQFSIADADYFVFHSPYNKLVQKSFARLVFNDVVRNASSVDEAGKQKLEPFSSLSGDESYQNRDLEKASQQVAKPLYDAKVQPSTLLPKQVGNMYTASLYAAFVSVLHNKHSELSGKRVVMFSYGSGLTATMFSFQLRDGQHPFSLSNIATVMDVAGKLKARHEFPPEKFVEILKLMEHRYGAKDFVTSKDCSLLPPGTHYLTEVDSMYRRFYSKKAGSCTCENGSLANGH

SEQ ID NO: 2939 - protein, 475 aa, Vitis vinifera
MSPQTETKASVGFKAGVKDYKLTYYTPEYETKPTDILAAFRVTPQPGVPPEEAGAAVAAESSTGTWTTVWTDGLTSLDRYKGRCYHIEPVAGEESQFIAYVAYPLDLFEEGSVTNMFTSIVGNVFGFKALRALRLEDLRIPPAYSKTFQGPPHGIQVERDKLNKYGRPLLGCTIKPKLGLSAKNYGRAVYECLRGGLDFTKDDENVNSQPFMRWRDRFLFCAEAIFKSQAETGEIKGHYLNATAGTCEEMIKRAVFARELGVPIVMHDYLTGGFTANTSLAHYCRDNGLLLHIHRAMHAVIDRQKNHGMHFRVLAKALRLSGGDHIHAGTVVGKLEGEREITLGFVDLLRDDFVEKDRSRGIYFTQDWVSLPGVLPVASGGIHVWHMPALTEIFGDDSVLQFGGGTLGHPWGNAPGAVANRVALEACVQARNEGRDLAREGNEIIRAASKWSPELAAACEVWKEIKFEFPAMDTL

SEQ ID NO: 2940 - protein, 488 aa, Vitis vinifera
MESSNNASTTKVITGDAGYVLEDVPHLNDYIQGLPTYPNQLQTNPAYSVVKQYFVNVDDSVAQKIVCHKNSPRGTHFRRAGPRQKVYFESDEVHACIVTCGGLCPGLNTVIREIVCGLSHMYGVTRILGIDGGYKGFYSRNTIPLTPKVVNDIHKRGGTVLGTSRGGHDTSKIVDSIQDRGINQVYIIGGDGTQKGASVIFEEIRRRGLKVAVAGIPKTIDNDIPVIDKSFGFDTAVEEAQRAINAAHVESESIENGIGMVKLMGRYSGFIAMYATLASRDVDCCLIPESPFYLEGKGGLFEFIERRLKENGHMVIVMAEGAGQELLSESLLSMGQDASGNNLLQDVGLWMSHRIKDHFARQRKIAINLKYIDPTYMIRAIPGNASDNVYCTLLAQSAVHGAMAGYTGFTIGIVNGRHAYIPFHRINESRNKVVITDRMWARLLSSTNQPSFQNPKDVAEVKKEEAPATGLLDGDNSKDDHKPVDQKA

SEQ ID NO: 2941 - protein, 521 aa, Vitis vinifera
MTFDITLHGVLLWASTGFLMPIGVITIRMCNREECGRKVRVIFYVHTTLQVLSVLIATAGAIMSIKNFENSFNNYHQRIGLALYGAIWVQALIGFCRPGRRSKGRSVWYFVHWILGTTVSVVGMINIYTGLEAYQKKTSRSIRLWTVLFTAEVCLMAFFYLFQDKWEYMQKQGVIMGNEAVTPSDQVNGLELRILEEKTRLKDYEGLVSMQEEAGLVKETSDATKKSDSHDDDHDCDGNDSHGEDYEPGNDHHHESSDDHKHHHHGHPDMKAESWVGPDGKLYHSHDGLAPHTHEPIYSPGYFSRRAPPLLTRNFHERAFTVGIGGPVGTGKTALMLALCQCLREKYSLAAVTNDIFTKEDGEFLVKHGALPEERIRAVETGGCPHAAIREDISINLGPLEELSNLFKVDILLCESGGDNLAANFSRELADYIIYIIDVSGGDKIPRKGGPGITQADLLVINKTDLAPAVGADLAVMERDSLRMRDGGPFIFAQVRHGVGIEDIVDHVLHAWEVATGEKRH

SEQ ID NO: 2942 - protein, 608 aa, Vitis vinifera
MATGQLFSRTTQALFYNYKQLPIQRMLDFDFLCGRETPSVAGIINPGSEGFQKLFFGQEEIAIPVHSSIEAASAAHPTADVFINFASFRSAAASSMAALKQPTIRVVAIIAEGVPEADTKQLIAYARSNNKVVIGPATVGGIQAGAFKIGDTAGTIDNIIQSKLYRPGSVGFVSKSGGMSNELYNTIARVTDGIYEGIAIGGDVFPGSTLSDHVLRFNNIPQVKMVVVLGELGGRDEYSLVEALKQGKINKPVVAWVSGTCARLFKSEVQFGHAGAKSGGEMESAQAKNQALSEAGAVVPTSYEAFETAIKETFEKLHEEGKITPVKEVAPPQIPEDLNTAIKSGKVRAPTHIISTISDDRGEEPCYAGVPMSSIVEQGYGVGDVISLLWFKRSLPRYCTHFIEICIMLCADHGPCVSGAHNTIVTARAGKDLVSSLVSGLLTIGPRFGGAIDDAARYFKDAYDRGLTAYEFVEDMKKKGIRVPGIGHRIKRGDNRDKRVELLQRFARTHFPSVKYMEYAVEVETYTLSKSNNLVLNVDGAIGSLFLDLLAGSGMFTKQEIDEIVQIGYLNGLFVLARSIGLIGHTFDQKRLKQPLYRHPWEDVLYTK

SEQ ID NO: 2943 - protein, 623 aa, Vitis vinifera
MPSVYGARMTTFEDSEKESEYGYVRKVSGPVVVADGMAGAAMYELVRVGHDNLIGEIIRLEGDSATIQVYEETAGLTVNDPVLRTHKPLSVELGPGILGNIFDGIQRPLKTIAKISGDVYIPRGVSVPALDKDILWEFQPKKLGEGDLLTGGDLYATVFENSLMQHHVALPPDAMGKITYVAPAGQYSLKDTVLELEFQGVKKQITMLQTWPVRTPRPVASKLAADTPLLTGQRVLDALFPSVLGGTCAIPGAFGCGKTVISQALSKYSNSDTVVYVGCGERGNEMAEVLMDFPQLTMTLPDGREESVMKRTTLVANTSNMPVAAREASIYTGITIAEYFRDMGYNVSMMADSTSRWAEALREISGRLAEMPADSGYPAYLAARLASFYERAGKVKCLGGPERNGSVTIVGAVSPPGGDFSDPVTSATLSIVQVFWGLDKKLAQRKHFPSVNWLISYSKYATALESFYEQYDPDFINIRTKAREVLQREDDLNEIVQLVGKDALAETDKITLETAKLLREDYLAQNAFTPYDKFCPFYKSVWMMRNIIHFYNLANQAVERGAGMDGQKITYTLIKHRLGDLFYRLVSQKFEDPAEGEEVLVAKFSKLHEDLTAGFRNLDDETR

SEQ ID NO: 2944 - protein, 687 aa, Vitis vinifera
MEDSLRKALSEKQAAVDAQGGAVRELKASGAPKDAIDAAVQELNALKLEKASIEKQLQAALTNGNDNALSRDAFRQALVNTLERRLFYIPSFKIYRGVAGLYDYGPPGCAVKSNVLAFWRQHFVLEENMLEVDCPCVTPEIVLKASGHVDKFTDLMVKDEKTGTCYRADHLLKDFCKEKLEKDLTISGEKAAELKHILAVLDDLSAEELGGKIKEYGITAPDTKNPLSAPYPFNLMFQTSIGPSGLSPGYMRPETAQGIFVNFKDLYYYNGNKLPFAAAQIGQAFRNEISPRQGLLRVREFTLAEIEHFVDPDDKSHPKFSEVANLEFLMFPRGEQVSGQSAKRTVLGEAVSKGIVNNETLGYFIGRVYLFLTGLGIDKERLRFRQHLANEMAHYAADCWDAEIECSYGWIECVGIADRSAYDLRAHTDKSGVPLVAHEKFAEPREVEKLIIAPVKKELGLAFKGNQKMVVEALEAMSEKEAMEMKATLESTGEVGFHVCTLGKDVTITKKMLSISKEKKKEHQRVFTPSVIEPSFGIGRIIYCLYEHSFYTRPSKAGDEQLNVFRFPPLVAPIKCTVFPLVQNQQYEEVAKSIAKSLTAAGISYKIDITGTSIGKRYARTDELGVPLAITVDSTSSVTIRERDSKDQIRVSVEEVASVVKEVTDGQSTWADVLWRYPTHSSASVDE

SEQ ID NO: 2945 - protein, 1099 aa, Vitis vinifera
MAGAVDLSFSSSANLEIFKLDFQSDDQDLSLVGESPSSERFNRLSWGKNGSGSEEFALGLIAGGLVDGNIDVWNPLKLIRSEASESALVGHLSRHKGPVRGLEFNAIAPNLLASGADEGEICIWDLAAPAEPSHFPPLKGSGSANQGEISFLSWNSKVQHILASTSYNGTTVVWDLKKQKPVISFSDSNRRRCSVLQWNPDVATQLVVASDEDNSPALRLWDMRNTITPVKEFVGHTKGVIAMSWCPIDSSYLLTCAKDNRTICWDTISGEIVCELPAGTNWNFDIHWYPKIPGVISASSFDGKIGIYNIEGCSRFGIGENEFGAAPLKAPKWYKRPAGVSFGFGGKLVSFHTKSSAAGASTGGSEVHVHDLVTEQSLVTRSSEFEAAVQHGERSSLKALCDRKSQESESSDDRETWGFLKVMFEDDGTARSKLLTHLGFDMVNEEKDTVQNDLSQEVNALGLEESTAEKVAYVEEKETTIFPSDNGEDFFNNLPSPKADTPLSTSVNNFVVEETATVEQMQQEVDGQEESADPAFDECVQRALVVGDYKGAVAQCMAVNKMADALVIAHVGGSSLWESTRDQYLKMSRSPYLKVVSAMVNNDLMSLVNTRPLKSWKETLALLCTFAPREEWTMLCDTLASKLMAFGNTLAATLCYICAGNIDKTVEIWSRSLTAEHEGKSYVDVLQDLMEKTIVLALATGQKRFSASLYKLVEKYSEILASQGLLKTAMEYLKLLGSDELSPELVILRDRIALSTEPEKEVPKTMPFDNSQGLAYGADQSSYGVVDSSQHYYQETAPTQMQSSVPGSPYGDNYQQPFGTSYGSRGYVPPAPYQPAPQPHMFLPSQAPQVPQENFAQPPVTSQPAVRPFVPATPPVLRNVEQYQQPTLGSQLYPGATNSTYQSGPPGAGSLGSVTSHVGTVPGHKLPQVVAPTPTQRGFMPVNSGVVQRPGMGPMQPPSPTQQAPVQPAITPAAPPPTIQTVDTSNVPAQQRPVVATLTRLFNETSEALGGSRANPAKKREIEDNSRKIGALLAKLNSGDISKNAADKLVQLCQALDNGDFGTALQIQVLLTTSEWDECNFWLATLKRMIKTRQNVRLS

SEQ ID NO: 2946 - protein, 1121 aa, Vitis vinifera
MEEEAQGSTEVAVLKVVENIAVDTADPIKVTNGDLHQEETALDGEFIKVEKELIDNWHQRIVEVEEKHGIELKNLQDALEAHEVKHKELIGVKEAFDNLSLELESSMKKMGELESELQVSAGDARNNAARMQELCDDLETKLKQSDENFCKTDSLLSQALANNAELEEKLKSQEALHQETGTIASTATQKSIELEGLVQASNVAAEEAKAQLRELETRLIGAEQRNVELEQQLNLVELQSSEAERELKEFSEKMSELSVALREVEEEKKELKGQMQEYEDKITQLESALSQSSLEKSELGLELKSVAAKCTEHEDRANSTHQRSLELEDLMQLSHSKKYLEQISDIEAELQISRAESKSLEKALELASETERDITERLNISIEVKKGLEEALSSSSEKLAEKENLLQVLQNELSLTQEKLQSIETDLKAAGVKESEIMEKLKSAEEQLEQQGRIIEQSTARSLELEELHETLKRDSEFKLNEAIASLSSRDSEAQSLYEKLKSHEDQVKTYELQVADTAEKSTSLKEELERCLGELAALQSTNEELKVKISEAESKAAESVSENELLVETNIELKSKVDELQEQLNSASAEKEATAHQLVSHRNTIVELTDQHSRSCELQSATEERVKEAEIQLEEAVQRFTHRDSEAKELNEKLTALESQIKVYEEQAHEASAISETRKVDLEQTLLKLKDLESVVEELQTKLGHFEKESEGLAEANLKLTQELAAYESKMNDLQEKLLTAFSEKDETVEQLQFSKKGIEDLRQQLATEGQKLQSQVSSVMEENNLLNETYQAAKNELQAVIIQLEGQLKEQKANEDAIKAEMENLKAEIADKSVLQTRLDELEKQLVLAEARLKEEVETVQAAAAGREAELNIQLEDHVRKVHDRDILSGQVVQLQEELHLAHTSIAEKTVLQTRLEELEKQLVIAEAQLKEEVESVRAAAVGREAELSTQLEEHARKVQDRDSLSEQVVQLQKELHLAQTSIVEQKETHSQKELEREAAAKHLLEELEAKKQELILKENQVKELEQKLQLAEAKSKEKADGGSPSEGMEVKSRDIGLVTSTPSRRKSKKKSEGTSPQTSSSSEIHARANEVSSAMTLKFILGVALVSVIVGIILGKRY

SEQ ID NO: 2947 - protein, 99 aa, Vitis vinifera
MESNLSPKFAQKVFEGEGGSYYSWSSTEFELLKEAKVGGGRLVLQPRGFGPPHYADCNKIGYVLQGTCGIVGMVFPKASEEVVLKLKKGDTIPVPSGVV

SEQ ID NO: 2948 - protein, 131 aa, Vitis vinifera
MSWQTYVDDHLMCEIEGNHLTAAAILGQDGSVWAQSATFPQFKPEEITAIMTDFAEPGTLAPTGLYLGGTKYMVIQGEPGAVIRGKKGSGGACIKKTIQALIIGIYDEPLTPGQCNMIVERLGDYLIDQGL

SEQ ID NO: 2949 - protein, 162 aa, Vitis vinifera
MAPIAVGDVIPDGTLAYFDEQDQLQQASVHSLAAGKKVIIFGVPGAFTPTCSVKHVPGFIEKAGELKSKGIDEILLVSVNDPFVMKAWAKTYPDNKDVKFLADGSATYTHALGLELDLSEKGLGTRSRRFALLVDDLKVKVANVEAGGEFTVSSADDILKAI

SEQ ID NO: 2950 - protein, 159 aa, Vitis vinifera
MGSEGSGVVVPRNFRLLEELERGEKGIGDGTVSYGMDDADDIYMQSWTGTIIGPPNTVHEGRIYQLKLFCGQDYPDNPPTVKFQTRINMTCVNQETGVVEPSLFPMLATWQREHTMEDILTQLKKEMMSPQNRKLAQPPEGNEEARIDQKGLVLKCCIL

SEQ ID NO: 2951 - protein, 174 aa, Vitis vinifera
MSVGMQDVLDFDLSAYDTLFAINVRGVAASVKHAARAMVEGKVKGSIICTASVSASTGSDKFIDYVMSKMAVLGLVKSASRQLGAYGIRVNSVSPGAVATPLLCDKFQMSATEVENNFEQYMSLKGLNMEKHLFLLFPKETFKTLKIAKNIKNALDNDSTPNIFSRSTFRRITY

SEQ ID NO: 2952 - protein, 205 aa, Vitis vinifera
MECVFGLVGDGFALVVADSSAVHSILVHKSNEDKIMVLDSHKLLGASGEGGDRAQFTEYIQKNVALYQFRNGIPLTTAAAANFTRGELATALRKNPYAVNILLAGYDKDIGPSLYYIDYIASLHKIEKGAFGYGSYFSLAMMDRHYHSGMTVEEAVDLVDKCIMEIRSRLVVAPPNFVIKIVDKDGAREYAWRESIKDTTGAPTS

SEQ ID NO: 2953 - protein, 215 aa, Vitis vinifera
MANHDGEISSKTSGFPHHVVLNERILSSMSRRSIAAHPWHDLEIGPGAPSVFNCVVEIGKGSKVKYELDKASGLIKVDRVLYSSVVYPHNYGFIPRTICEDSDPMDVLILMQEPVLPGSFLRARAIGLMPMIDQGEKDDKIIAVCADDPEFRHYKDIKEIPPHRLAEIRRFFEDYKKNENKEVNVNDFLPADSAIEAIKYSMDLYASYIVESLRQ

SEQ ID NO: 2954 - protein, 206 aa, Vitis vinifera; identical to SEQ ID NO: 492

SEQ ID NO: 2955 - protein, 234 aa, Vitis vinifera
MSPVPSVTAVQVENVLFPPSVKPPGSTNDLFLGGAGVRGLEIQGKFVKFTAIGVYLESSAVPTLAVKWKGKTVEELADSVDFFRDVVTGPFEKFTKVTTILPLTGRQYSDKVSENCVAFWKSVGIYTDAEAKAIEKFNEVLKDETFPPGNSILFTHSPLGALTMSFSKDGSLPEVGNAVIENKLLTEAVLESIIGKHGVSPEAKKSLAARLSELFCKEAGDEKIEAEKVAPVAC

SEQ ID NO: 2956 - protein, 223 aa, Vitis vinifera
MTKQQANWSPYDNNGGSCVAIAGADYCVIAADTRMSTGYNILTRDYSKICKLADKCVMASSGFQADVRALQKHLAARHLIYQHQHNKQMSCPAMAQLLSNTLYYKRFFPYYSFNVLGGLDNEGKGCVFTYDAVGSYEKVGYSSQGSGSTLIMPFLDNQLKSPSPLLLPALDAVTPLSEPEAVDLVKTVFASATERDIYTGDKLEIVILNASGIRREYMDLRKD

SEQ ID NO: 2957 - protein, 239 aa, Vitis vinifera
MSGPQCCEHPPSLNPNSGSGHVEQLGGLSCYIAGSPHSKLAILLVSDIYGYEAPNFRKLADKVAAAGFYVVAPDFLYGDTYVPDKAERPFPVWIKDHGMDKGFEDTKPVIEALKSKGVSAIGAAGFCWGAKVVVELAKSGYIQAAVLLHPSFVSLDDIKGVKVPTAVLGAEIDQMSPPALVKQFEEILTAKPGVDGFVKIFPGVAHGWTVRYNAEDAGAVKCAEEAHQDMLGWFSKYVK

SEQ ID NO: 2958 - protein, 239 aa, Vitis vinifera
MSGPQCCENPPTLTSSSGAGCVAEIGGLKAYVSGPSDSKLVILLVSDLFGYEAPNLRKLADKVAAAGFYVVVPDFFYGDPFVPETMTIPVWIKKHMEWFDKGFEDAKPVVAELRSKGINAIGAAGFCWGAKVVVELSKVDQIQAAVLFHPARVTVDDIKEIKAPTAILGAETDHVSPPELLKQFEEVLSTKPEVNGYVKIFPGVAHGWSVRYKVEDEEAVKRADESHQNMMDWFAQYVK

SEQ ID NO: 2959 - protein, 223 aa, Vitis vinifera
MADEIILLDFWASHFGMRVRIALAEKGLMYEYREENLWNKSPLLLEMNPVHKKVPVLIHNGKPICESLMIVQYIDEVWKDKSPLLPSDPYQRAQARFWADYVDKKVPQLYHELGKKIWYTKGEEHEAGKKEFIECLKFFEGELGEKPYFGGENFGFEDVALVPLSCWFYTYESFGNFSVEDECPNLMAWAKRCGQKESVSSSLADPHKVHGFVMEMRKRLGID

SEQ ID NO: 2960 - protein, 249 aa, Vitis vinifera
MKFNIANPTTGCQKKLEIDDDQKLRAFFDKRISQEVSGDALGEEFKGYVFKIMGGCDKQGFPMKQGVLTPGRVQLLLHRGTPCFRGYGRRNGERRRKAVRGCIVSQDLSVLNLVIVKKGEGELPGLTDVEKPRMRGPKRASKIRKLFNLSKEDDVRKYVNTYRRTFTTKSGKKCSKAPKIQRLVTPLTLQRKRARIAEKKKRIAKAKSEAAEYQKLLATRLKEQRERRSESLAKKRSRLSAASKPSIVA

SEQ ID NO: 2961 - protein, 253 aa, Vitis vinifera
MTVSSGENSADSKYSLSGLAPLEAVLFDIDGTLCDSDPLHYYAFRELLLQIDYNGGVPITEEFFIEKIAGKHNDDIARGLFPNWDLEKGLKFTDDKEVLFRKLAKDQVKPLNGLHKIRKWIEDRGLKRAAVSNAPRPNAELMISLLGLSDFFHAVVVGSECDRAKPFPDPYLKALEVLQVSKDHTFIFEDSVSGIKAGVAAEMPVVGLTTRNPESLLMEAKPVFLIRDYDDPKLWAALAELDQKGAPGATAAA

SEQ ID NO: 2962 - protein, 255 aa, Vitis vinifera; identical to SEQ ID NO: 565

SEQ ID NO: 2963 - protein, 256 aa, Vitis vinifera; identical to SEQ ID NO: 852

SEQ ID NO: 2964 - protein, 255 aa, Vitis vinifera
MLAIFHKAFAHPPEELNSPASRDGSRKPKLPEETLREFLSAHPANTFSMSFGTAAALAYVSPDRSYPTHQRLFGGFDDIYCLFMGSLNNLCTLNRQYGLSKGSNEAMLVIEAYRTLRDRGPYPADQVVKDLEGSFAFVVYDSKAGTVFTALGSDGGVKLFWGVAADGSVVISDDLGVIKAGCAKSFAPFPTGCMFHSDGGLMSFEHPMNKMKAMPRIDSEGVMCGANFKVDVYSRINSMPRVGSEVNWSNWEDYH

SEQ ID NO: 2965 - protein, 258 aa, Vitis vinifera
MKIVPVPCLEDNYSYLIIDESSKEAAVVDPVEPQKVLQAAYEYGVHLKLVLTTHHHWDHAGGNEKIKQLVPGIEVYGGSVDNVKGCTHPLQNGDKLSLGSDLAVLALHTPCHTRGHISYYVTGKEEDVPAVFTGDTLFVAGCGKFFEGTAEQMYQSLCVTLASLPKPTRVYCGHEYTVKNLQFALTVEPDNVRVGQKLSWAQHQRQAGLPTIPSTIDEEMETNPFMRVDLPELQERVGCQSAIDALQEIRRQKDNWRG

SEQ ID NO: 2966 - protein, 269 aa, Vitis vinifera
MADENQNEVKDEVAELAPFDPTKKKKKKKVVIQDPADDSVDKLAEKTESLSVSEGVENTFSGMKKKKKKPVETDILNDDGGDGKEDLDDHNGEDEEGEGIVLQPRYPWEGSDRDYKYEELLGRVFNILRENNPELAGDRRRTVMRPPQVLREGTKKTVFVNFMDLCKTMHRQPDHVMAFLLAELGTSGSLDGQQRLVVKGRFAPKNFEGILRRYINEYVICLGCKSPDTILSKENRLFFLRCEQCGSGRSVAPIKAGFVARVGRRNTGT

SEQ ID NO: 2967 - protein, 289 aa, Vitis vinifera
MADHITKGEEFEKKAEKKLSGWGLFGSKYEDAAELYEKAANSFKLAKSWDKAGSINIKLANCHLKLDSKHEAANAYADAANCYKKTSNKEAIACLEQAAAIFLEIGRLNMAARYYKEIGELYEVDQNLQQAIEKFDQAAELFQSEEVTTSANQCRQKVAQFSAQLEQYPKAIEIYEEIARQSLNNNLLKYGVRGHLLNAGLCQLCKGDVVAITNSLERYQELDPTFSRTREYKLLADLAVAVDEEDVAKFTDVVKEFDSMTPLDAWKTTLLLRVKESLKAKELEEDDLT

SEQ ID NO: 2968 - protein, 291 aa, Vitis vinifera
MEAKPTEISGSKMFGGYNKRFKHFSPTLGCSMTFHVYFPPLPSPSHKFPVLYWLSGLSCTDENFIIKSGAQRVASSEGIALVAPDTSPRGLNVEGEADSWDFGVGAGFYLNATQEKWKNWQMYDYVVKELPKVLSENFAQLDTSRASISGHSMGGHGALTIYLKNLDKYKSVSAFAPIVNPMNCPWGQKAFTNYLGGNKADWEEYDATCLISKFNDVSATILIDQGEDDKFLHDQLLPHKFEEACKNAKVPLLLRLQPGYDHSYYFIATFIDHHIQHHAQALNMCFKPLHP

SEQ ID NO: 2969 - protein, 300 aa, Vitis vinifera
MESDSEVSHEFRFFRVYKDGRVHLFMPPAEKFPPSDDPTTGVRSKDVHISPDTGVSARIFLPKTPSPTQKLPLLFYVHGGGFSMLSAFARPYIDCLNSIVSEANIIAVSVEYGLFPDRPIPACYEDSWAALQWVASHASGDGPEPWLNDYADFNRVFIAGDSAGGNISHTLAVRVGSIGLTGVRVVGVVLVHPYFGGTDDDKMWLYMCPTNGGLEDPRMKPAAEDLARLGCEKVLVFVAEKDHLREVGWNYYEELKKSGWKGTVEIVENHGEEHCFHLHDLSYEKSVDLIKQIASFINRE

SEQ ID NO: 2970 - protein, 302 aa, Vitis vinifera
MGSTRPQCSPGSGYIFIGELGFIVADAVSTQVHSRGVAAARGLKKHLKRLNAPKHWMLDKLGGAFAPKPSSGPHKSRECLPLILILRNRLKYALTYREVIAILMQRHVLVDGKVRTDKTYPSGFMDVVSIPKTNENFRLLYDTKGRFRLHSIRDEEAKFKLCKVRSVQFGQKGIPYLNTYDGRTIRYPDPLIKANDTIKLDLESNKITDFIKFDVGNVVMVTGGRNRGRVGVIKNREKRKGSFETIHVQDATGHEFATRLGNVFIIGKGTKPWVTLPKGKGIKLSIIEEAQKRLAAQAASSA

SEQ ID NO: 2971 - protein, 293 aa, Vitis vinifera
MTLSSRLYTFASPKLPKHCARPQISPSFPLKYPPILTRSLPFASHFRRASLSFSTRSTAMGDAVDAGMDAVQRRLMFEDECILVDENDRIVGHDTKYNCHLMEKIESENLLHRAFSVFLFNSKFELLLQQRSATKVTFPLVWTNTCCSHPLYRESELIDENALGVRNAAQRKLLDELGIPAEDAPVDQFTPLGRMLYKAPSDGKWGEHELDYLLFIVRDVNVNPNPDEVADVKYVSRNDLKELLRKADAGEEGLKLSPWFRLVVDNFLFKWWDHVEKGTLLEAADMKTIHKLT

SEQ ID NO: 2972 - protein, 313 aa, Vitis vinifera
MEHLHSLHEKAKLEKSNGQLSHLFFPFFKIYQDGRVERFMHTDHVPPSDDPLTGVRSKDVIISPETGVSARLFIPKLPNPNCKLPLLIYIHGGGFSIQSAFSTSYNHYVKSLVAEANVIALSVDYRLAPEHPIPACYDDSWAAVQWAASHANGDGPDTWLNNHADFSRVFFAGDSAGGNISNTLAFRVGSSGLPGVKVVGVVLVHPYFGGTGDDQMWLYMCPNHGGLEDPRLKPGAEDLARLGCERVLMFVAEKDHLRPVAWDYYEKLKKSEWKGTVEIVENHGEEHVFHLMNPKCENAAVLMKKIVSFLNQE

SEQ ID NO: 2973 - protein, 332 aa, Vitis vinifera
MGNPLLDISSVVDEEFLQKYDIKLNNAILAEDKHLPMYDEMASKYNVEYIAGGATQNSIRVCQWMLQIPGATSYMGCIGKDKFGEEMKKNSKLAGVNVHYREDETAPTGTCAVCVVGGERSLIANLSAANCYKSEHLKRPENWALVEKAKYFYIAGFFLTVSPESILLVAEHAAANNKVFMMNLSAPFICEFFKDQQEKALPYMDYVFGNETEARTFAKVHGWETDNVEEIAIKISQWPKASGTHKRITVITQGADPVVVAEDGKVKSFPVILLPKEKLVDTNGAGDAFVGGFLSQLVQEKPIEECVRAGCYASHVIIQRSGCTYPEKPDFS

SEQ ID NO: 2974 - protein, 342 aa, Vitis vinifera
MDTLLQSNGHQASPWIYHKAFTKPNISPVESSHHHNSILTLSNISTPATPYTTAMATTTAAAAAATSSFMGTRLPDVHSNTGRVQARFGFGRKKAPAKKAAKRVSDRPLWFPGAVAPEWLDGTLVGDYGFDPFGLGKPAEYLQYDYDSLDQNLAKNIAGDVIGTRFEGGEVKSTPFQPYTEVFGLQRFRECELIHGRWAMLATLGALAVESLTGVTWQDAGKVELIEGSSYLGQPLPFSMTTLIWIEVLVIGYIEFQRNAELDPEKRLYPGGKFFDPLGLAADPEKKAVLQLAEIKHARLAMIGFLGFAVQAAVTGKGPLNNWATHLSDPLHTTIIDNVFYS

SEQ ID NO: 2975 - protein, 356 aa, Vitis vinifera
MEIDLTPKSAKEAYGSNGGSYLAWSPSELPMLGEGNIGAAKIILHQHGFALPSYSDSSKVAYVLQGNGVAGIVLPESEEKVVPIKKGDALALPFGVVTWWYNKEDTDLEVLFLGDTSKAHKAGEFTDFFLTGSNGIFTGFSTEFVSRAWDLEEDVVKSLVGKQSGKGIVKLEGTFEMPEPKKEHRNGLVLNCLEAPLDVDIKNGGRVVVLNTQNLPLVGEVGLGADLVRLDGSAMCSPGFSCDSALQVTYIVRGSGRVQVVGVDGHRVLETTLKAGSLFIVPRFFVVSKIGDPEGMDWFSIITTPNPIFTHLAGRTSAWKALSSKVLEASFSVGSDMEKLFRSKRNADAIFFPPPN

SEQ ID NO: 2976 - protein, 338 aa, Vitis vinifera
MAHSRVSAFSTAPGLKRVGTHNGSFHCDEALGCFMIRLTDKFRDAQIVRTRDQKVLDGLDAVLDVGGVYDPSRDRYDHHQKGFGEVFGHGFSTKLSSAGLVYKHFGMEIIAKELQLDQGHPDVLRLFLAVYKSFMEAVDAVDNGINQYDTDQPLRYVNNTHLSSRVGKLNLDWMDPDQSSEKENEAFERAMNLSGSEFLDNVRFHAKSWLPARSIVMECLAARMDIDPSGEIMVLNRFCPWKLHLFELEEEMKIDPPIKYVLYQDDRSKHWRVQAVAVAPDKFESRKPLPSQWRGLRDDELSREAGIPGCVFVHMSGFIGGNQNYEGALAMAKDALKL

SEQ ID NO: 2977 - protein, 344 aa, Vitis vinifera
METSKLFLLSSSLLLVLLATRPCPSLSERCNPKDKKVLLQIKKALDNPYILASWNPNTDCCGWYCVECDLTTHRINSLTIFSGQLSGQIPDAVGDLPFLETLIFRKLSNLTGQIPPAIAKLKHLKMVRLSWTNLSGPVPAFFSELKNLTYLDLSFNNLSGPIPGSLSLLPNLGALHLDRNHLTGPIPDSFGKFAGSTPGLHLSHNQLSGKIPYSFRGFDPNVMDLSRNKLEGDLSIFFNANKSTQIVDFSRNLFQFDLSRVEFPKSLTSLDLSHNKIAGSLPEMMTSLDLQFLNVSYNRLCGKIPVGGKLQSFDYDSYFHNRCLCGAPLQSCKITRNIINKKEK

SEQ ID NO: 2978 - protein, 360 aa, Vitis vinifera
MAVLISLLLALSSVFFTGPAFAGTYLEGLLPNGNFEESPKPTDLKKTVIKGKYSLPKWEINGSVEYIAGGPQPGGMFFAVAHGVHAVRLGNEASISQTIPVKPGSLYALTFGASRTCAQDEVLRVSVPPQTGDLPLQTLYDSFGGDVYAWGFRATSNEAKVTFHNTGVQEDPACGPLLDAVAIKELFPPMPTRDNLVKNSGFEEGPHLLINSSNGVLLPPKQEDLTSPLPGWIIESLKAVKFIDKKHFNVPFGLAAVELLAGRESAIAQVLRTVPNKLYNLTFSIGDGKNGCHGDMMIEAFAAKDSFKAPFKSRGKGEFKTVSFKFKAIAARTRLTFFSSFYHTRIDDFGSLCGPVLDQP

SEQ ID NO: 2979 - protein, 386 aa, Vitis vinifera
MAKSVLILCGDYMEDYEVMVPFQALLAYGVSVHAVCPGKKAGDVCRTAVHQGLGHQTYSESRGHNFTVNATFDEVDASKYDGLVIPGGRAPEYLAMNESVLDLVRKFFSSGKPIASICHGQLILAASGSVRGRKCTAYPAVGPALIAAGAHWVEPETMSACVIDGNLITAATYIGHPGFIQLFVKALGGTITGSDKRILFLCGDYMEDYEVMVPFQSFQALECHVDAVCPKKKAGETCPTAIHDFEGDQTYSEKPGHDFTLTATFEDLNIPSYDALVIPGGRAPEYLALNEKVIALVKEFMEAGKPVASICHGQQILAAAGVLKGKKCTAYPAVKLNVVLSGATWLEPEPIDRCFTDGNLVTGAAWPGHPEFISQLMTLLGIQVLF

SEQ ID NO: 2980 - protein, 390 aa, Vitis vinifera
MLRGLAFNPKILHFSPSLPLFSLNSPSFSSRLPSFSGRKNSILQAQGLGFKSENQLGTTMDLGKEVPELNRNLYPPIEPYSSGFLKVSDLHSIYWEQSGNPNGHPVVFIHGGPGGGTSPSNRTFFDPDFYRIILFDQRGAGKSTPHACLVDNTTWDLVNDIEKLREHLEIPEWQVFGGSWGSTLALAYSQSHPDKVTGMVLRGIFLLRKKELDWFYEGGAAAIYPDAWEPFRDLIPENERDCLIDAYHKRLNSDDMETQYAAARAWTKWEMMTAHLLPNEENIKKGDDDKFSLAFARIENHYFVNKGFFPSDSFLLDNIEKIRHINATIVQGRYDMCCPIMTAWDLHKAWPEADFKIVPDAGHSANELGIAAELVAANEKLKNIIKNGGP

SEQ ID NO: 2981 - protein, 394 aa, Vitis vinifera
MPPKSSKSKEAPAERPILGRFSSHLKIGIVGLPNVGKSTLFNTLTKLAIPAENFPFCTIEPNEARVNIPDERFEWLCQLYKPKSEVSAFLEIHDIAGLVRGAHQGQGLGNSFLSHIRAVDGIFHVLRAFEDPDIIHVDDSVDPVRDLEVISEELRLKDIEFIEKRIEDVEKSMKRSNDKQLKIELELCLKVKAFLEDGKDIRLGDWKAADVEILNTFQLLTAKPVVYLVNMNEKDYQRKKNKFLPKIHAWVQDHGGETIIPFSCALERNLADMPEDEAAKYCEENKVQSALPKIIKTGFSAINLIYFFTAGPDEVKCWQIRRQTKAPQAAGTIHSDFERGFICAEVMKFDDLKELGSEGAVKAAGKYRQEGKTYVVQDADIIFFKFNVSGGGKK

SEQ ID NO: 2982 - protein, 394 aa, Vitis vinifera
MSSYGMLARRVVETETPVMVQIQELIRGAGDAMSLAQGVVYWQPPKQALEKVKDLVWEPSVSRYGADDGLPELREALVEKLRQENKLYKSSVMVTAGANQAFVNLVLTLCDAGDLVVMFAPYYFNAYMSFQMTGVTNILVGPSNPKTLHPDADWLEKILLETKPAPKVVTVVNPGNPSGTYIPEPLLKRFADLCRNAGSWLVVDNTYEYFMYDGLKHTCVEGDHIVNIFSFSKAYGMMGWRVGYIAYPSNVEGLGAQLLKVQDNIPICASIFSQHLALYSLEMGPEWVTKQVKSLVINRSLIMDALSPLGKDSVKGGEGAIYLFAKLPDKYHDDFEVVRWLARKHRVVVIPGSACGTPGSLRVSFGGLREDETQIAAGRLKKGIEELVRDGMLQ

SEQ ID NO: 2983 - protein, 399 aa, Vitis vinifera
MKFLWKMDTFLFTSESVNEGHPDKLCDQISDAVLDACLEQDPDSKVACETCTKTNLVMIFGEITTKANLDYEKIVRDTCRAVGFVSEDVGLDADNCKVLVNIEQQSPDIAQGVHGHLTKRPEEIGAGDQGHMFGYATDETPELMPLSHVLATKLGARLTEVRKNGTCPWLRPDGKTQVTVEYFNDHGAMVPIRVHTVLISTQHDETVTNDEIAADLKEHVIKPIVPEKFLDEKTIFHLNPSGRFVIGGPHGDAGLTGRKIIIDTYGGWGAHGGGAFSGKDPTKVDRSGAYIVRQAAKSIVASGLARRCIVQVSYAIGVPEPLSVFVDTYATGKIPDKEILKIVKESFDFRPGMIAINLDLKRGGNGRFLKTAAYGHFGRDDPDFTWEVVKPLKAEKAQE

SEQ ID NO: 2984 - protein, 417 aa, Vitis vinifera
MFGRAPKKSDNTRYYETLGVSKNASQDDLKKAYRKAAIKNHPDKGGDPEKFKELAQAYEVLSDPEKREIYDQYGEDALKEGMGGSGGGHDPFDIFQSFFGGSPFGGGGSSRGRRQRRGEDVVHPLKVSLEDLYIGTSKKLSLSRNVICSKCNGKGSKSGASIKCNGCQGSGMKVSIRQLGPSMIQQMQHPCNECKGTGETINDKDRCPQCKGEKVVQEKKVLEVIVEKGMQNGQKVTFPGEADEAPDTVTGDIVFVLQQKEHPKFKRKGDDLFVEHTLSLTEALCGFQFILTHLDGRQLLIKSNPGEVVKPDQFKAINDEGMPIYQRPFMRGKLYIQFNVEFPDTLSPEQCKALEAVLPARATTQLTDMELDECEETTLHDVNIEEEMRRKQAQAQEAYEEDEEMPGGAQRVQCAQQ

SEQ ID NO: 2985 - protein, 423 aa, Vitis vinifera
MASAMVEDSSFEDDQLASMSTDDIARASRLLDNEIRILKEELQRTNLELESFKEKIKENQEKIKLNKQLPYLVGNIVEILEMNPEDEAEEDGANVDLDSQRKGKCVVLKTSTRQTIFLPVVGLVDPDKLKPGDLVGVNKDSYLILDTLPSEYDSRVKAMEVDEKPTEDYNDIGGLEKQIQELVEAIVLPMTHKERFQKLGIRPPKGVLLYGPPGTGKTLMARACAAQTNATFLKLAGPQLVQMFIGDGAKLVRDAFQLAKEKSPCIIFIDEIDAIGTKRFDSEVSGDREVQRTMLELLNQLDGFSSDDRIKVIAATNRADILDPALMRSGRLDRKIEFPHPSEDARARILQIHSRKMNVHPDVNFEELARSTDDFNGAQLKAVCVEAGMLALRRDATEVIHEDFNEGIIQVQAKKKSSLNYYA

SEQ ID NO: 2986 - protein, 434 aa, Vitis vinifera
MAEAFSLSLTPPQMASLSGAAAASSRLLPRARLGFSTSSSTPSPSSLSLSSLKGLRSSPLLSHLLHRQKTTSVRASSGGLGFSSVAAPKCSASDPDQLKSAREDIKELLKSKFCHPLLVRLGWHDAGTYNKNIEEWPLRGGANGSLRFEIELKHGANAGLVNAVKLLQPIKDKYSGVTYADLFQLASATAVEEAGGPKIPMKYGRVDASGPEQCPEEGRLPDAGPPSPADHLRDVFYRMGLNDKEIVALSGAHTLGRSRPERSGWGKPETKYTKDGPGAPGGQSWTVQWLKFDNSYFKDIKEKIDEELLVLPTDAILFEDPSFKVYAEKYAVDQEAFFKDYAEAHAKLSNLGAKFDPPEGIVIDDGPAEAAPEKFVAAKYSSGKKELSEAMKQKIRAEYEAVGGSPDKPLQSNYFLNIMIVIAVLAFLTTLFGN

SEQ ID NO: 2987 - protein, 437 aa, Vitis vinifera
MADAHETDKNIEIWKIKKLIKALEAARGNGTSMISLVMPPRDQISRVTKMLGDEFGTASNIKSRVNRQSVLGAITSAQQRLKLYNKVPPNGLVLYTGTIVTEDGKDKKVTIDFEPFRPINASLYLCDNKFHTEDMNELLESDDKFGFIVMDGNGTLFGTLSGNTREVLHKFTVDLPKKHGRGGQSALRFARLRMEKRHNYVRKTAELATQFFINPATSQPNVAGLILAGSADFKTELSQSDMFDPRLQAKLLNVVDVSYGGENGFNQAIELSSEILSNVKFIQEKRLIGKYFEEISRDTGKYVFGVDDTLKALEMGAVEILIMWENLDINRYVLNNSNTTEIVIKHLNKEQATDQSNFRDSATSAELEVQEKMSLLEWFANEYKRFGCALEFVTNKSQEGSQFCRGFGGIGGILRYQLDMRLFDEVSDDGENYEDSD

SEQ ID NO: 2988 - protein, 433 aa, Vitis vinifera
MALVLHAGKTNKNAYKTLIAAEYSGIKVELVQNFEMGVSNKTPEFLKMNPIGKVPVLETPDGPVFESNAIARYVTRLKADNPLYGSSPIEYGHIEQWIDFASLEIDANIGHWFRPRIGRAVYLPPFEEAAIAALKRALGALNTHLASNTFLVGHSVTLADIVMTCNLYMGFSKLMTKSFTSEFPHVERYFWTMVNQPNFSKILGEVKQTASVPPVSSAKKPALPKEHAKPKHKDEPKKEVKKEPAKPKEAPVGEEEEAPKPKPKNPLDLLPPSKMILDEWKRLYSNTKTNFREVAIKGFWDMYDPEGYSLWFCDYKYNDENTVSFVTLNKVGGFLQRMDLARKYAFGKMLVIGSEAPFKVKGLWLFRGQEIPQFIIDECYDMELYEWKKVDISDEAQKERVNQMIEDQEPFEGEALLDAKCFKKWGKNVRKRK

SEQ ID NO: 2989 - protein, 463 aa, Vitis vinifera
MMQPAPGVVPPSMQPAPMDQQQPPQYQQPPPQQQWMMMPPPQQQQQTQPPPAWAQQAPVPPPQAQPQMAPPPQQQQYVAAPQASNPEEIRSLWIGDLQPWMEENYLWGCFSQTGEVVSVKVIRNKQTGQCEGYGFIELATRAAAERILQTYNGTLMPNSEQNFRLNWATLGAGERRADDTPDYTIFVGDLASDVTDYVLQETFRGHYPSVKGAKVVTDRTTGRSKGYGFVRFGDEGEQLRAMNEMNGMFCSTRPMRIGPAATKKPVGGQQFQKASFQNTQGNQGESDPNNTTIFVGGLDSNVTDDYLRQVFSQYGELVHVKIPVGKRCGFVQFANRACAEQALAGLNGTQLGAQSIRLSWGRSPSNKQAQPDQAQWNGGYYGYAQGYEAYGYAPPPQDPNMYYGAYPGYGNYQQPQQGKASMLIKLESPVLSHSAWLDENCRTLDATCLLVGPDLRKILLICC

SEQ ID NO: 2990 - protein, 500 aa, Vitis vinifera
MNLPLLGGKDPGSAVMANSNSEFDLKDFRIPDYILVPESEVEAVSYVPECPVIVFINSKSGGQLGGDLLITYRSLLNEKQVFDVNQEAPDKSLSRIYVNLEKLKHSEDDFAFKIQERLRIIVAGGDGTAGWLLGVVSDLKLSQPPPIATVPLGTGNNLPFSFGWGKKNPGTDSRSVESFLGQVKKAKEMKIDSWHFLMRMKAPKEGSCDPIAPLELPHSLHAFHRVSETDSLNMEGYHTFRGGFWNYFSMGMDAQVSYAFHTERKLHPEKFTNQLVNQGTYARLGCTQGWFAASLFHPASKNIAQVAKISVMKKVGGHWEELKISNSIRSIVCLNLPSFSGGFNPWGTPNARRRRDRDLTAPFVDDRLIEVVGFRDAWHGLVLLAPKGHGTRLAQAHRIRFEFHKGSADHTFMRIDGEPWKQPLPDDDDTVMVEISHLGQVKMLATDNCKSKSCEDPTSPPAPETEEPDSNEEEEGEEWKKFGAAETFRIPDDVDISHLS

SEQ ID NO: 2991 - protein, 502 aa, Vitis vinifera
MAQLQAISSYSSTDLLFRRPKLESSPYHDKLYWWRQLPFVPELGTRGSGINGQAIVHNNGSLFQNLTRVHSNQAIRAVVSSEKETVTSGASNGGLRGKLNKVVLAYSGGLDTSVIVPWLRQNYGCEVVCFTADVGQGIKELEGLEEKAKASGACQLVVKDLKEEFVKDYIFPCLRAGAIYERKYLLGTSMARPVIAKAMVDVAKEVGADAVSHGCTGKGNDQACIEIVRFELTFFALNPELNVVAPWREWEIRGREDAIEYAKKHNVPVPVTKKSIYSRDRNLWHLSHEGDILEDPENEPKNDMYMMSVDPEHAPDQPEYIEIGMVSGLPVSVNGKELSPASLLSKLNEIGGRHGIGRIDMVENRLVGMKSRGVYETPGGTILFTAARELESLTLDRESIQQKDSLALKYAELVYAGRWFDPIRESIDAFMKKITETTTGSVRLKLYKGSVTVAGLKSPYSLYRQDISSFESGQIYDQADAAGFIRLYGLPMKVRAMLEKGI

SEQ ID NO: 2992 - protein, 513 aa, Vitis vinifera
MAEDAPKPKQLWGDVEDDPPSSSSTPAVDLPVESLTIHDEAKEAESLDEPKDSSIQAVTSGDTPYTSASTFEDLNLSPELLRGIYSEMKFERPSKIQAISLPMILTPPYKNLIAQAHNGSGKTTCFVLGMLSRVDPKLQVPQALCICPTRELAIQNLEVLRKMGKHTGIESECAIPMDSANYTSISQRPPVKAQVVIGTPGTVKKWMSHRKLGISNMKILVFDEADHMLAEDGFKDDSLRIMKAIEKSGAQCQVLLFSATFNDTVKNFVTRIVKDYNQMFVKKEELSLQSVKQYKVKCPDELSKILVIKDKIFEIGQKLGQTIIFVRTKNSAGMLHKALVDFGYEVTTIQGALRQEDRDKIIKEFKDGLTQVLISTDLLARGFDQSRVNLVVNYDLPLKYGTQAEPDYEVYLHRIGRAGRFGRKGAVFNLLCSDKDNILISKIENHFGVQIAECRPPPFVDQSLGRDMQPAPGVPLLPFMRRYAAMLSLFCHSGASGMVTFRANVLYGHVRGV

SEQ ID NO: 2993 - protein, 542 aa, Vitis vinifera
MAQNGGIILLLCATFSVLAMVGAEDPYRFFEWNVTYGDIYPLGVRQQGILINGQFPGPDIYSVTNDNLIINVHNSLPEPFLISWNGVQQRRNSFEDGVYGTTCPIPPGKNFTYILQVKDQIGSFFYFPSLAFHKAAGGFGGIRILSRPRIPVPFPDPAGDYTILIGDWYTHNHNTLKAILDRGRRLPFPDGILINGRGANAASFTVERGKTYRLRISNVGLQNSLNFRIQGHKMTLVEVEGTHTLQTSYSSLDVHVGQSYSVLVTADQAAKDYYIAVSSRFTEKVLTSSAVLHYSNSVSPVSGPLPGGPTTQIDYSLNQARSIRTNLTASGPRPNPQGSYHYGLINITRTIKLGNTAGQVNGKQRYAVNSVSFIPADTPLKLADYFKIGGVFRIGSIPDQPSGKKMYLDTSVMGADFRAFVEIVFENRESIIQSWHLDGYSFWVVGMNGGVWTPASRNQYNLRDAVSRCTTQVYPKSWTAVYIALDNVGMWNLRTEFWARQYLGQQFYLRVYSPVGSIRDEYPIPKNALLCGRAAGRKTRSL

SEQ ID NO: 2994 - protein, 583 aa, Vitis vinifera
MAATASPVVLSLVSSLFASASSSSCSSLIFTRLRSSPSLPFSFAVKPLCFRRGKLMAHTLARATLGLTHPSNVEPPKISFTAKEIDLVEWKGDILAVGVTEKDMAKDENLKFENPILKKLDSQLGGLLAEASSEEDFTGKSGQSTILRLPGLGSKRVGLIGLGQLTPCSPPAAYRSLGETVAVAAKAAQASDVAIVLASSEGLSAESKIYTASAIASGAVLGIHEDNRFKSESKKPALKSVDIIGLGTGPDVQKKLKYAEDVCSGVIFGKELVNAPANVLTPGVLAEEASKIASAYSDVLSAKILDAEQCKELKMGSYLGVAAASANPPHFIHLCYKPLTGPVKAKLGLVGKGLTFDSGGYNIKTGPGCSIELMKFDMGGSAAVLGAAKAIGQIKPSGVEVHFIVAACENMISGTGMRPGDVVTASNGKTIEVNNTDAEGRLTLADALVYACNQGVEKIVDLATLTGACVVALGPSIAGVFTPSDDLAKEVLAASEASGEKLWRMPMEESYWESMKSGVADMVNTGGRPGGAITAALFLKQFVDEKVQWMHIDMAGPVWNDKKRAATGFGISTLVEWVLKNSS

SEQ ID NO: 2995 - protein, 642 aa, Vitis vinifera
MKDTDFFFSALLKLVEGSSLSSPKFQDGLRLPHLRSQILLFPNCPFLFSHFHCSEMAMIDEPLYPIAVLIDELKNEDIQLRLNSIRRLSTIARALGEERTRKELIPFLSENNDDDDEVLLAMAEELGVFIPYVGGVEHANVLLPPLETLCTVEETCVRDKAVESLCRIGAQMREPDLVESFIPLVKRLAAGEWFTARVSSCGLFHIAYPSAPETLKTELRAIYSQLCQDDMPMVRRSAASNLGKFAATVEAAHLKADIMSIFEDLTQDDQDSVRLLAVEGCAALGKLLEPQDCVAHILPVIVNFSQDKSWRVRYMVANQLYELCEAVGPEPTRSDLVPAYVRLLRDNEAEVRIAAAGKVTKFCRILNPELAIQHILPCVKELSSDSSQHVRSALASVIMGMAPVLGKDATIDQLLPIFLSLLKDEFPDVRLNIISKLDQVNQVIGIDLLSQSLLPAIVELAEDRHWRVRLAIIEYIPLLASQLGVGFFDDKLGALCMQWLKDKVYSIRDAAANNVKRLAEEFGPDWAMQHIIPQVLDMINNPHYLYRMTILHAISLLAPVMGPEITCSKLLPVVINAAKDRVPNIKFNVAKVLQSLTPIVDQSVVDKTIRPCLVELSEDPDVDVRFFASQALQASDQIMMSS

SEQ ID NO: 2996 - protein, 690 aa, Vitis vinifera
MAEEVQYSSGTDATNKRKYEDQTTPSQPSTRRPTGFSAPISTPSPDSSHAPPSYNSVPPPADEIQLAKQRAQEIAARLFSNASNTEAKRPRVENGAGAGGFDSGDKGFSSAPSDVGQKPMISTPSAIPVSYGYQGTSKKIDIPNGRVGVIIGKGGETIKYLQLQSGAKIQVTRDMDADPNSPTRLVELMGTPDQIAKAEQLINDVLSEAEAGGSGIVSRRLTGQAGSEQFVMKVPNNKVGLIIGKGGETIKNMQARTGARIQVIPLHLPPGDTSMERTVQIDGTSEQIESAKQLVNEVISENRIRNPAMAGGYPQQGYQARPPSGWGAPPGAPPMQQPGYSYAQPGSYPGPSPQYNMSQPAYAGYSQPNATGWDQTAAPPSQQTTPGSGYDYYGQQQTQQQQQAHGGPSGPADNSGYNYNQPPASGYNQQGQGYPQDGYGGGYHAPAPQPGYGQPQPIPGYDQQQGYNSATGYGNVANPTQEGHTTSYGAQGETGQAPPSVQPSAIGQQGYNTQQPSPSPASYPPQGSNQPAYGMPPTSQTGFGSQPPAQSGYTTNYGPPQAQKAPANPPVYGQTQQSPSAQGGYAQPAPVQPGYPHSQQPPAQSGYAQTDSSSQRAAPSSYGTAAGQPGYGGPSAYSAPTVTQAGYGQQPPYSGSYGGGYSQPPMYAADATPTSQPAQQSGVAKTSPQS

SEQ ID NO: 2997 - protein, 739 aa, Vitis vinifera
MAGRSGHDSSMIVTNTPARDLVHTNFAYCSPSDLRKFAVHGSNLALASVGDSCMFIYTAHESIPNGHIALNAIQRRHARVSTGDSVSVSRFIPPDDFNLALLTLELEFVKKGTKDEQIDAVQLSQQLRKRFINQVMTTGQRVTFEYHGNGYIFTVNQAVIEGQEKSKGIERGIIAAETYIIFEAPNSSGIKIVNQREAASSNIFRQKEFNLQSLGIGGLSAEFADIFRRAFASRVFPSHVTSRLGIKHVKGMLLYGPPGTGKTLMARQIGKMLNGREPKIVNGPEVLSKFVGETEKNVRDLFADAENDQRTRGDQSDLHVIIFDEIDAICKSRGSTRDGTGVHDSIVNQLLTKIDGVESLNNVLLIGMTNRKDLLDEALLRPGRLEVQVEISLPDENGRLQILQIHTNKMKENSFLAPDVNLQELAARTKNYSGAELEGVVKSAVSFALNRQLSMDDLTKPVDEESIKVTMEDFLNALQEIIPAFGASTDDLERCRVNGMAECGSRHEHIYQRAMLLVEQVKVSKGSPLITCLLEGPSGSGKTSLAATVGIDSDFPYVKIISAESMIGLSESSKCARIVKVFEDAYKSQLSIIVLDDIERLIEYVAIGPRFSNIISQTLLVLIKRLPPKGKNVLVIGTTSEVSFLDSVGIRDAFSVTYHVPTLKTEDAKKVLQQLNVFSDDDIDSAAEALNDMPIKKLYMLIEMAAQGEHGGEAEAIYSGKEKIAISHFFDCLQDMIRY

SEQ ID NO: 2998 - protein, 734 aa, Vitis vinifera
MALRFPRFSQGLAQDPTTRRIWFGIATAHDFESHDDITEERLYQNIFASHFGQLAIIFLWTSGNLFHVAWQGNFESWVQDPLHVRPIAHAIWDPHFGQPAVEAFTRGGAPGPVNIAYSGVYQWWYTIGLRTNEDLYTGALFLLFLSAISLIAGWLHLQPKWKPSVSWFKNAESRLNHHLSGLFGVSSLAWTGHLVHVAIPGSRGEYVRWNNFLDVLPHPQGLGPLFTGQWNLYAQNPDSSSHLFGTSQGAGTAILTLLGGFHPQTQSLWLTDIAHHHLAIAFIFLVAGHMYRTNFGIGHSMKDLLEAHIPPGGRLGRGHKGLYDTINNSIHFQLGLALASLGVITSLVAQHMYSLPAYAFIAQDFTTQAALYTHHQYIAGFIMTGAFAHGAIFFIRDYNPEQNEDNVLARMLDHKEAIISHLSWASLFLGFHTLGLYVHNDVMLAFGTPEKQILIEPIFAQWIQSAHGKTSYGFDVLLSSTTGPAFNAGRSIWLPGWLNAVNENSNSLFLTIGPGDFLVHHAIALGLHTTTLILVKGALDARGSKLMPDKKDFGYSFPCDGPGRGGTCDISAWDAFYLAVFWMLNTIGWVTFYWHWKHITLWQGNVSQFNESSTYLMGWLRDYLWLNSSQLINGYNPFGMNSLSVWAWMFLFGHLVWATGFMFLISWRGYWQELIETLAWAHERTPLANLIRWRDKPVALSIVQARLVGLAHFSVGYIFTYAAFLIASTSGKFG

SEQ ID NO: 2999 - protein, 840 aa, Vitis vinifera
MYGSVGLFSTPLLGSSSTPSSRNHYKTGSGNKYCLAKQQPIRVSNGPRLQKLLGHCTFHCPSRNSTYGKVNGSAISALITDDNSAMATMGEDTEHIGILDTDPGLEPFKDHFRYRMRRYVEQKELIEKYEGSLEEFAQGYLKFGFNREEGGIVYREWAPAAQEAQVIGDFNGWDGSNHRMERNQFGVWSIKIPDSGGNPAIPHNSRVKFRFKHGDGVWVDRIPAWIRYATVDPTAFAAPYDGVYWDPPPSERYQFKYPCPSKPNAPRIYEAHVGMSSSEPRVNSYREFADDILPRIRANNYNTVQLMAVMEHSYYASFGYHVTNFFAVSSRSGTPEDLKYLIDKAHSLGLRVLMDVVHSHASNNVTDGLNGFDVGQSSQDSYFHTGDRGYHELWDSKLFNYANWEVLRFLISNLRWWLEEFKFDGFRFDGVTSMLYHHHGVNMTFTGNYNEYFSEATDVDAVVYLMLANCLIHKIFPDATVSAEDVSGMPGLGRPVAEGGTGFDYRLAMAIPDKWIDYLKNKKDEEWSMKEISSSLTNRRYAEKCISYAESHDQALVGDKTIAFLLMDKEMYSGMSCLTDASPTIDRGISLHKMIHFITMALGGEGFLNFMGNEFGHPEWIDFPREGNDWSYEKCRRQWELVDTDHLRYKYMNAFDTAMNLLDEKFSFLASTKQIVSSTDEEHKVIVFERGDLVFVFNFHPENTYDGYKVGCDLPGKYRVALDSDACVFGGQGRVGHDADHFTSPEGIPGVPETNFNNRPNSFKVLSPARTCVVYYRVEESLEESDDDHNSTGANATLVADVVAEQESLEEPASVKDHEFKPRLIEGSEVEDVVEEATDD

SEQ ID NO: 3000 - protein, 945 aa, Vitis vinifera
MADQYSCEGSSLSPVSGDCSESTVELNVKTLDSRIHSFHVDKNLPVSLFKEKIANEIGVPVEQQRLIFRGKVLKDDQLLAEYHVENGHTLHLVARDPTQSQPSSGQSSGETNGNNGSRGNDANAGGPRARVGQISHSVVLGTFNVGEQAEGIVPDLTRVIGAVLNSFGIGSQTTNTATGGAQPNTQSNAPGQASQGIEVDGTHGNANGQRQEGNQAQPSQPFQSLPQVMQFPVPGGAGPAPQIQVPIPDSLHTLSEFMNRMGLSLSHNVYQPNSSPTNADIPRVELPSNSRGLPTPEALSIVMRQAERLLSGNAVAALSHIAGRVEQEGASTDPTIRGEIQTEAMQVGLAMQHLGVLLLELGRTILTLRMGQSPDESSVNAGPAVYISPSGPNPIMVQPFPLQTSSFFGGSTVPQSNPPAGPGNAPRHINIHIHAGTSLPPIVSAAGTRAGNGDGMQGERANGNVSAQSDASISQAPSDSGALSSVIAEVNSRIRNLVDNMRGGNQVPSGQAGSSTVQNMSTGSGPGNDVGSDQLKNMAVAGARETSLPSDTCIPGTDGHTSQPEHHQMNNNQDKRGVSQSKDVPSTCAVEGSFSCSSGSDEATSGPADASDDAPRSSQRQDIPEEAKAVPLGLGMGGLQLKKRSKQPKSQGKNNDCGTSSVPSVNQNQRTMTSAQQVLQSLASRGSTANRTDANCPPSQFLSSRSFTANRMDVNRPPSHFLASRSFTANRMDASGPPSGQPLHVLGQVREGMSSGGQGLAEQSGAGSPDVLSNMLQQLSQNPLMMNTVNQIAQQVDGQELESMFSGLGRGQGGGIDLSRMVQQMMPIVSRALSSGPNRGELFHGVGSEPQPQHSERRPSRGDKPDVQNSQTDLREVAESIERQIPPQDIFRSVAENAVQLYANGTGPEGLLDVLCSDEHLATEFMEVLQRDVCNRLHGKSGAKD

SEQ ID NO: 3001 - protein, 880 aa, Vitis vinifera
MEQFRGQPRLPKFAVPKRYDIHLEPDLVACKFAGSVQIDLDIVDATNFIVLNAADLSVAHNAVSFKSQTSSKVFEPSKVEIVEEDEILVLEFSEVLPLEMGVLAIGFEGTLNDKMKGFYRSTFEHNGEKRNMAVTQFEPADARRCFPCWDEPACKATFKITLDVPSDLIALSNMPVIEEKPNGHLKTVSYQESPIMSTYLVAVVIGLFDYVEDHTPDGIKVRVYCQVGKADQGKFALDVAVKTLGLYKEYFACPYSLPKLDMIAIPDFAAGAMENYGLVTYRETALLYDEKHSAAANKQRVATVVAHELAHQWFGNLVTMEWWTHLWLNEGFATWVSYLAADSLFPEWKVWTQFLDESTEGLRLDGLAESHPIEVEINHAGEIDEIFDAISYRKGASVIRMLQSYLGAECFQRSLASYIKKHACSNAKTEDLWAALEEGSGEPVNRLMNSWTKQKGYPVVSVKINNQKLEFEQTQFLSSGSQGDGQWIVPITLCCGSYDTPHNFLLQTKSESLDMKEFLGCCVGGGNDNSIAVCSWIKLNVDQTGFYRVKYDEKLAAGLRSAIEKNYLSATDRFGILDDSFALCMACQQSLTSLLTLMGAYREELDYTVLSNLISISYKVARIAADATPELVDYIKEFFISLFQYSAEKLGWEPRPGEGHLDAMLRGEVLTALAVFGHDLTINEASRRFHAFLDDRNTPVLPPDIRKAAYVAVMQNVTTSNRSGYESLLRVYRETDLSQEKTRILGSLASCPDPNIVLEVLNFVLSSEVRSQDAVFGLAVSREGRETAWSWLKNNWDYISKTWGSGFLITRFVSAIVSPFASFEKASEVQEFFATRTKPSIARTLKQSIERVHINAKWVESIQNEKHLADAMKELAYRKY

SEQ ID NO: 3002 - protein, 906 aa, Vitis vinifera
MPLRLEIKRKLAQRSERVKSVDLHPTEPWILASLYSGTVCIYDYLSQTMIKSFEVTDLPVRSAKFIARKQWVVAGADDMFIRVYNYNTMDKVTIFEAHADYIRCVAVHPTLPYVLSSSDDLLIKLWDWDKGWTCTQIFEGHSHYVMQVTFNPKDTNTFASASLDRTIKIWNLGSPDPNFTLDDHMKGVNCVDYFTGGDKPYLITGSDDQTAKVWDYQTKSCVQTLEGHTHNVSSVCFHPELPIIFTGSEDGTVRIWHATTYRLENTLNYGLERVWALGCMRGSRRVVIGFDEGTIMVKIGRDEPVASMDNSGKIIWAKHNEIQTVNIRSVGADYEVTDGERLPLAVKELGTCDLYPQSLKHNSNGRSVVVCGDGEYIIYTSLAWRNRSFGSALEFVWSSDAEYAVRESTSRIKIFSKTFQEKKNIRPTFSAEHIYGGALLAICSNDFICFYDWAECRLIRRIDVNVKNLYWADSGDLVAIASDSSFYILKYNRDTVVSHFNSGMPSDEQGVEDAFELLHEINERVRTGIWVGDCFIYNNSSWRLNYCVGGEVTTMFHLDRPMYLLGYLASQSRVYLIDKEFNVMGYTLLLNLIEYKTLVMRGDFQRASEILPLIPQEHYNSVARFLEARGMLEDALEVATDPDYRFDLAIQLGRLGTAKEIASEVQSETKWKQLGELAMSNGKFEMAEECLLHAMDLSGLLLLYSSFGDANGISKLVSLAKKQGKNNVAFLCLFTLGKLEECLQLLVESNRIPEAALMARSYLPSKVPEIITIWRNDLNKVSKKAAESLADPEEYPNLFEDWQVALDIESKISEKRGTYPPAEHYLNYAERSNINLMESFKSMQIDEEESILENGNSDHREIQANGASEYQEEAVNVDVNSPDRILVNGNEGEEERGANNEGTSTD

SEQ ID NO: 3003 - protein, 948 aa, Vitis vinifera
MEKSCSLLIYFDKGTPAIANEIKEALEGNDDYAKIEAMKKAIMLLLNGETLPQLFITIVRYVLPSEDHTVQKLLLLYLEIIEKTDAKGKVMPEMILICQNLRNNLQHPNEYIRGVTLRFLCRLNEAEIIEPLIPSVLQNLEHRHPFIRRNAILAVMSIYKLPQGEQLLVDAPEMIEKVLSTEQDPSAKRNAFLMLFTCAQDRAINYLLTHVDRVPEWGELLQMVVLELIRKVCRTNRGEKGKYIKIIISLLNAPSTAVIYECAGTLVSLSSAPTAIRAAANTYCQLLLSQSDNNVKLIVLDRLNELKSSHREIMVDMIMDVLRALSSPNLDIRRKTLDIVLELITPRNINEVVLTLKKEVVKTQSGELEKNGEYRQMLIQAIHSCAIKFPEVASTVVHLLMDFLGDSNVASAIDVVVFVREIIETNPKLRVSIITRLLDTFYQIRAARVCSCALWIIGEYCLSLSEVESGITTIKQCLGDLPFFSVSEEGEASDSSKKVQQVNATTVSSRRPAVLADGTYATQSAASETAFSPPTLVQGSLSSGNLRSLLLTGDFFLGAVVACTLTKLVLRLEEVQPSKAEVNKVSSQALLIMVSMLQLGQSSVLPHPIDNDSYDRIVLCIRLLCNTGDDIRKIWLQSCRQSYVKMLADKQLRETEEIKAKAQISYAQPDDLIDFYHLKSRKGMSQLELEDEVQDDLKRATGEFIKDGDDANKLNRILQLTGFSDPVYAEAYVTVHHYDIVLDVTVINRTKETLQNLCLELATMGDLKLVDRPQNYTLAPESSKQIKANIKVSSTETGVIFGNIVYETSNVHERMVVVLNDIHIDIMDYISPAVCTDVAFRTMWAEFEWENKVAVNTVLQNEKEFLEHIIKSTNMKCLTASSALDGDCGFLAANLYAKSVFGEDALVNISIEKQADGKLSGYIRIRSKTQGIALSLGDKITLKQKGGS

SEQ ID NO: 3004 - protein, 1087 aa, Vitis vinifera
MLPRKRAVAGEVVDDDSDNTGTSSIKKHRISSSAAGTETTVNNNNSGSSLGNNSGNSNHSGGSEVELQIMALGDGHPPDIDEDLHSRQLAVYGRETMRRLFASNVLVSGLQGLGAEIAKNLILAGVKSVTLHDEGTVELWDMSSNFIFSENDVGKNRALASVQKLQELNNAVVISTLTTKLTKEDLSDFQAVVFTDIYFEKAIEFNDYCHSHQPPIAFIKAEVRGLFGSVFCDFGPEFTVFDVDGEEPHTGIIASISNDNPALVSCVDDERLEFQDGDLVVFSEVHGMTELNDGKPRKIKNARPYSFTLEEDTTNFGTYEKGGIVTQVKQPKVLNFKPLREALSDPGDFLLSDFSKFDRPPLLHLAFQALDRFISELGRFPVAGSEEDAQKLIFISSNINEGLGDGKLEDINPKLLRHFAFGARAVLNPMAAMFGGIVGQEVVKACSGKFHPLFQFFYFDSVESLPTEAPDSSDFKPLNSRYDAQISVFGSKLQKKLEDAVVFMVGSGALGCEFLKNVALMGVSCGNQGKLTITDDDVIEKSNLSRQFLFRDWNIGQAKSTVAASAAQTINPCLHIEALQNRVGPETENVFNDAFWENLSVVINALDNVNARLYVDQRCLYFQKPLLESGTLGAKCNTQMVIPHLTENYGASRDPPEKQAPMCTVHSFPHNIDHCLTWARSEFEGLLEKTPAEVNAFLSNPTEYASAMRNAGDAQARDNLERVLECLERERCETFQDCITWARLRFEDYFVNRVKQLIFTFPEDAATSTGAPFWSAPKRFPHPLQFSAADAGHLYFVMAASILRAETFGIPIPDWAKHPKKLAEAVDKVIVPEFQPKTDVKIVTDEKATSLSTASVDDAAVINELLAKIEQSWKSLPPGFRMNPIQFEKDDDTNYHMDLIAGLANMRARNYSIPEVDKLKAKFIAGRIIPAIATSTAMATGLVCLELYKVLDGGHKLEDYRNTFANLALPLFSMAEPVPPKVIKHRDMSWTVWDRWILKDNPTLRELLQWLKDKGLNAYSISCGSCLLYNSMFPRHRERMDKKVVDLAREVAKVELPAYRSHLDVVVACEDDEDNDIDIPQVSIYFG

SEQ ID NO: 3005 - protein, 1115 aa, Vitis vinifera
MTLMTPPPLDQEDDEMLVPHTDFADGPQPMEVAQPDTASAVDAQTVEDPPSARFTWTIENFSRLNTKKLYSDVFYVGGYKWRVLIFPKGNNVDHLSMYLDVADSATLPYGWSRYAQFSLAVINQIHNKFTIRKDTQHQFNARESDWGFTSFMPLGELYDPARGYLVNDTCIVEADVAVRRVIDYWTHDSKKETGYVGLKNQGATCYMNSLLQTLYHIPYFRKAVYHMPTTENDMPSGSIPLALQSLFYKLQYSDTSVATKELTKSFGWDTYDSFMQHDVQELNRVLCEKLEDKMKGTVVEGTIQQLFEGHHMNYIECINVDYKSTRKESFYDLQLDVKGCRDVYASFDKYVEVERLEGDNKYHAEIHGLQDARKGVLFIDFPPVLQLQLKRFEYDFMRDTMVKINDRYEFPLQLDLDRENGKYLSPDADRSVRNLYTLHSVLVHSGGVHGGHYYAYIRPTLSDQWFKFDDERVTKEDIKRALEEQYGGEEELPQTNPGFNNSPFKFTKYSNAYMLVYIRESDKEKIICNVDEKDIAEHLRIRLKKEQEEKEQKRKEKAEAHLYTIIKVARNEDLIEQIGRDIYFDLVDHDKVRSFRIQKQTPFNLFKEEVAKEFGIPVQFQRFWLWAKRQNHTYRPNRPLTLQEEAQSVGQLREVSNKANHAELKLFLEVELGQDLRPVPPPEKTKEEILLFFKLYDPLKEELRYVGRLFVKGSGKPIEILSKLNELAGFSPNEEIELFEEIKFEPNVMCEHIDKRLTFRASQLEDGDIICYQRLLQIDSSQQCRYPDVPSFLEYVHNRQVVRFRSLEKPKEDEFCLELSKLFNYDDVVERVAAHLGLDDSSKIRLTSHNCYSQQPKPQPIKYRGVEHLSDMLLHYNQTSDILYYEVLDIPLPELQGLKTLKVAFHHATKEEVVIHTIRLPKQSTVGDVINDLKSKVELSHPNAELRLLEVFYHKIYKIFPLNEKIENINDQYWTLRAEEIPEEEKNLGPHDRLIHVYHFMKDTTQNQVQVQNFGEPFFLVIHEGETLAEVKVRIQKKLQVPDEEFSKWKFAFLSLGRPEYLQDSDIVSSRFQRRDVYGAWEQYLGLEHSDNAPKRSYAANQNRHTFEKPVKIYN

SEQ ID NO: 3006 - protein, 496 aa, Cicer arietinum
MAKLLALSLSFCFLLFGTCFALRDQPQQNECQLEHLNALKPDNRIKSEGGLIETWNPSNKQFACAGVALSRATLQPNSLLQTFLHQRSPEIFIQQGNGYFGMVFPGCVETFEEPRESEQGEGSKFSDSHQKVNRFREGDIIAVPTGVVFWMFNDQDTPVIAVSLIDTSSFQNQLDQMPRRFYLAGNHEQEFLRYQQEGSEEEENEGGNIFSGFKRDFLEDALNVNRRIVNKLQGRNEDEEKGAIVKVKGGLSITTPPEKEPRQKRGSRQEEDEDEDEKRQPHRHSRQDEDEDEKRQPHHHSRGGSKSQRDNGFEETICTARLHQNIGSSSSPDIYNPQAGRIKTVTSFDLQALRFLKLSAEFGSLHKNAMFVPHYNLNANSILYALKGRARLLYALNCKGNSVFDGELEAGRALIVPQNFAIAAKSLSDRFSYVAFKTNDRALINVCQKKLLQLLSIWKEMRPGSSSSTAPFHFLFHPAVTQTTKQQLDLVPNQYE

SEQ ID NO: 3007 - protein, 453 aa, Cicer arietinum
MIVRFSLPDNENDLKLTRSINRDGEILIPKIFIIISVSQISNGASREFDGISSLKVEVFLSLGFNTVSIALHLGLQDGSRHHCVVEERGCEVLSYFLQTVVLEVLKLLRTFVEPLEKTNVTVFVLEKSLKVVRLKEKRILLIGISHKLRPRKQFLSSTKSGNRALIAILMIEFLLSFRIDDEIERVLLEEQEQKPKQRRGHKDRQQSQSQSQQEADVIVKISREQIEELSKNAKSSSKKSVSSESEPFNLRSRNPIYSNKYGNFFEITPEKNPQLQDLDISLNSVEINEGSLLLPHFNSRATVILVVNEGKGEVELVGLRNENEQENKKEDEEEEEDRKVQVQRFQSRLSSGDVVVIPATHPFSINASSDLFLLGFGINAQNNQRNFLAGEEDNVISQIQRPVKEVAFPGSAEEVDRLLKNQRQSHFANAQPQQKDEESQKIRIPLSSILGGF

SEQ ID NO: 3008 - protein, 763 aa, Cicer arietinum
MGSHIVGYPRMGPKRELKFALESFWDGKSSAEDLKKVSADLRASIWKQMSDAGIKYIPSNTFSYYDQVLDATATLGAVPPRYGWTGGEVGFDTYFSMARGNATIPAMEMTKWFDTNYHFIVPELGPDVNFTYASHKAVEEYKEAKALGVDTVPVLIGPVSYLLLSKPAKGVDKSFSLLSLLPKVLAVYKEVIADLKAAGALFIQFDEPTLVLDLESHKLQAFTDAYAALAPSFSGLHVLVETYFADVPAEAYKTLTSLSGVAAYGFDLVRGPKTLELIKAGFPSDKWIFAGVVDGRNIWANDLAASISTLETLASIVGKERIVVSTSCSLLHTAVDLVNETKLDDEIKSWLAFAAQKIVEVNALANAFSGNKDEAFFSANAAAQASRKSSPRVNNEAVQKAASALKGSDHRRATNVSARLDAQQKKLNLPILPTTTIGSFPQTVELRRVRREFKAKKISEEEYIKAIKEEIRKVVELQEELDIDVLVHGEPERNDMVEYFGEQSSGFAFTANGWVQSYGSRCVKPPIIYGDVSRPKPMTVFWSSLAQSFTKRPTKGMLTGPVTILNWSFVRVDQPRSETCYQIALAIKDEVEDLEKGGIGVIQIDEAALREGLPLRKSEHAHYLDWAVHSFRITNVGVQDSTQIHTHMCYSNFNDIIHSIIDMDADVITIENSRSDEKLLSVFREGVKYGAGIGPGVYDIHSPRIPPTEEIADRINKMLAVLEKNILWVNPDCGLKTRKYTEVRPALENMVAAAKQIRNELAK

SEQ ID NO: 3009 - protein, 227 aa, Cicer arietinum
TKTGYINAAFRSSRNNEAYLFINDKYVLLDYAPGTSNDKVLYGPSFVRDGYKSLAKTIFGTYGIDCSFDTEYNEAFIFYENFCARIDYAPHSDKDKIISGPKKIADMFPFFKGTVFENGIDAAFRSTKGKEVYLFKGDKYARIDYLTNRLVQNIKSISDGFPCLRGTIFEAGMDSAFASHKTNEAYLFKGEYYARINFTPGSTNDIMGGVKKTLDYWPSLRGIIPLE

SEQ ID NO: 3010 - protein, 132 aa, Cicer arietinum
MAKLLALSLSFCFLLFGSCFALRDQPEQNECQLEHLNALEPDNRIKSEGGLIETWNPSNKQFRCAGVALSRATLQPNSLRRPFYTNAPQEIFIQQGNGYFGMVFPGCVETFEEPRESEQGEGSKFRDSHQKV

SEQ ID NO: 3011 - protein, 326 aa, Cicer arietinum
GFEAGISKDGQTREHALLAFTLGVKQMICCCNKMDATTPKYSKARYDEIVKEVSSYLKKVGYNPDKIPFVPISGFEGDNMIERSTNLDWYKGPTLLEALDQINEPKRPSDKPLKLPLQDVYKIGGIGTVPIGRVETGVIKPGVIVTFGPTGLTTEVKSVEMHHEALTEALPGDNVGFNVKNVAVKDLKRGFVASNSKDDPAKEAANFTSQVIIMNHPGQIGNGYAPVLDCHTSHIAVKFAELLTKIDRRSGKELEKEPKFLKNGDAGLVKMIPTKPMVVETFSEYPPLGRFAVRDMRQTVAVGVIKSVEKKDPTGAKITKAAVKKK

SEQ ID NO: 3012 - protein, 377 aa, Cicer arietinum
MADAEDIQPLVCDNGTGMVKAGFAGDDAPRAVFPSIVGRPRHTGVMVGMGQKDAYVGDEAQSKRGILTLKYPIEHGIVSNWDDMEKIWHHTFYNELRVAPEEHPVLLTEAPLNPKANREKMTQIMFETFNVPAMYVAIQAVLSLYASGRTTGIVLDSGDGVSHTVPIYEGYALPHAILRLDLAGRDLTDSLTKILTERGYMFTTSAEREIVRDIKEKLAYVALDYEQELETAKSSSSIEKNYELPDGQVITIGAERFRCPEVLFQPSMIGMEAAGIHETTYNSIMKCDVDIRKDLYGNIVLSGGSTMFPGIADRMSKEITALAPSSMKIKVVAPPERKYSVWIGGSILASLSTFQQMWISKGEYDESGPSIVHRKCF

SEQ ID NO: 3013 - protein, 167 aa, Cicer arietinum
RSDHVDLAALEIYRDRERNVARYNQFRRGLLMIPISKWEDLTDDKEVIEVLEEVYGDDVEELDVLVGLMAEKKIKGFAISETAFTIFLLMASRRLEADRFFTSNFNEETYTKEGLEWVNTTETLKDVIDRHHPEITNNWLNSSSVFSVWDSPPNKHNPIPIYLRVPS

SEQ ID NO: 3014 - protein, 359 aa, Cicer arietinum
MSNFKSKYHDELIANAAYIGTPGKGILAADESTGTIGKRLASINVENVETNRRALRELLFTAPNVLQYLSGVILFEETLYQSTAAGKPFVDVLNEAGVLPGIKVDKGTVELAGTDGETTTQGLDGLGARCAKYYEAGARFAKWRAVLKIGPNEPSLSILSIENAYGLARYAVICQENGLVPIVELEILVDGSHDIHKCAAITERVLAATYKALSDHHVLLEGTLLKPNMVTPGSDSPKVAPEVVAEHTVRALQRTVPAAVPAVVFLSGGQSEEEATVNLNAINQVKGKKPWTLSFSFGRALQQSTLKAWSGKEENVKNAQDALLTRAKANSEATLGTYKGNSQLGEGASESLHVKDYKY

SEQ ID NO: 3015 - protein, 516 aa, Cicer arietinum
MASMAAIGVLKVPPSSSSSSSSSSSKAIIARNLSFTSSQVCGDKIGTFSRRGRGSYVGNPIIVSPKAVSDSKNAQTCLDPDASRSVLGIILGGGAGTRLYPLTKKRAKPAVPLGANYRLIDIPVSNCLNSNVSKIYVLTQFNSASLNRHLSRAYASNMGGYKNEGFVEGLAAQQSPENPNWFQGTADAVRQYLWLFEEHNVLEYLVLAGDHLYRMDYERFIQAHRESDADITVAALPMDELRATAFGLMKIDEEGRIIEFAEKPKGEQLKAMKVDTTILGLDEERAKEMPYIASMGIYVVSKHVMLDLLREKFPGANDFGSEVIPGATNIGMRVQAYLYDGYWEDIGTIEAFYNANLGITKKPVPDFSFYDRSSPIYTQPRYLPPSKMLDADITDSVIGEGCVIKNCKIHHSVVGLRSCISEGAIIEDTLLMGADYYETDADRRFLAAKGSVPIGIGKNSHIRRAIIDKNARIGDNVKIINSDNVQEAARETEGYFIKSGIVTVIKDALIPSGTVI

SEQ ID NO: 3016 - protein, 194 aa, Cicer arietinum
EYKPEFDIVSNASCTTNCLAPLAKVINDRFGIVEGLMTTVHSITATQKTVDGPSAKDWRGGRAASFNIIPSSTGAAKAVGKVLPVLNGKLTGMAFRVPTVDVSVVDLTVKLEKAATYDEIKAAINEESEGKLKGILGYTEDDVVSTDFIGDTRSSIFDAKAGIALNDRFVKLVSWFDNELGYSTRVVDLIVHIA

SEQ ID NO: 3017 - protein, 444 aa, Cicer arietinum
MDEEYDVIVLGTGLKECILSGLLSVDGLKVLHMDRNDYYGGESTSLNLIQLWKRFRGDDKPPPHLGSSKDYNIDMNPKFIMANGMLVRVLIHTDVTKYLYFKAVDGSFVFNKGKVHKVPSNDMEALKSPLMGIFEKRRARKFFIYVQDYNESDPKTHDGMDLTRVTTKELIAKFGLDDNTVDFIGHALALHRDDRYLNEPALDTVKRMKLYAESLARFQGGSPYIYPLYGLGELPQAFARLSAVYGGTYMLNKPECKVEFDGEGKVLGVSSEGETAKCKKVVCDPSYLPNKVRKVGKVARAIAIMSHPIPNTNDSHSVQVILPQKQLGRKSDMYLFCCSYSHNVAPKGKFIAFVSTEAETDQPAIELKPGIDLLGPVDEIFFDMYDRFEPVNEPTLDNCFVSTSYDATTHFESTVLDVLNMYTLITGKVLDLSVDLSAAGAAEE

SEQ ID NO: 3018 - protein, 475 aa, Cicer arietinum
MSPQTETKASVGFKAGVKDYKLTYYTPDYETKDTDILAAFRVTPQPGVPPEEAGAAVAAESSTGTWTTVWTDGLTSLDRYKGRCYHIEPVPGEESQFIAYVAYPLDLFEEGSVTNMFTSIVGNVFGFKALRALRLEDLRIPNAYVKTFQGPPHGIQVERDKLNKYGRPLLGCTIKPKLGLSAKNYGRAVYECLRGGLDFTKDDENVNSQPFMRWRDRFLFCAEAIYKSQAETGEIKGHYLNATAGTCEEMIKRAVFARELGVPIVMHDYLTGGFTANTSLSHYCRDNGLLLHIHRAMHAVIDRQKNHGMHFRVLAKALRLSGGDHIHSGTVVGKLEGEREITLGFVDLLRDDFVEKDRSRGIYFTQDWVSLPGVLPVASGGIHVWHMPALTEIFGDDSVLQFGGGTLGHPWGNAPGAVANRVALEACVQARNEGRDLAREGNEIIRDAAKWSPELAAACEVWKEIKFEFEAMDTL

SEQ ID NO: 3019 - protein, 126 aa, Cicer arietinum
GRSGKPLHFKGSSFHRVIPNFMCQGGDFTAGNGTGGESIYGSKFADENFIKKHTGPGILSMANAGPGTNGSQFFVCTAKTEWLDGKHVVFGQVVEGLDVVKEIEKVGSSSGKTSKPVKIADCGQLS

SEQ ID NO: 3020 - protein, 332 aa, Cicer arietinum
MAKDPVRVLVTGAAGQIGYALVPMIARGVMLGPDQPVILHMLDIPPAAESLNGVKMELVDAAFPLLKGVVATTDVVEACTGVNIAVMVGGFPRKEGMERKDVMSKNVSIYKSQASALEQHAAANCKVLVVANPANTNALILKEFAPSIPEKNISCLTRLDHNRALGQISERLSVQVSEIKNVIIWGNHSSTQYPDVTHATVKTPAGEKPVRELVSDDAWLNGEFIPTVQQRGAAIIKARKLSSALSAASAACDHIRDWVLGTPEGTFVSMGVYSDGSYNVPAGLIYSFPVTCAGGEWKIVQGLSIDEFSRKKLDLTAEELSEEKNLAYSCLS

SEQ ID NO: 3021 - protein, 147 aa, Cicer arietinum
GKSTTTGHLIYKLGGIDKRVIERFEKEAAEMNKRSFKYAWVLDKLKAERERGITIDIALWKFETTKYYCTVIDAPGHRDFIKNMITGTSQADCAVLIIDSTTGGFEAGISKDGQTREHALLAFTLGVKQMICCCNKMDATTPKYSKA

SEQ ID NO: 3022 - protein, 261 aa, Cicer arietinum
MATAPTPREEFVYMAKLAEQAERYEEMVEFMEKVTAAVESEELTVEERNLLSVAYKNVIGARRASWRIISSIEQKEESRGNDEHVAVIRDYRSKIEAELSNICNGILKLLDSRLIPSAASGDSKVFYLKMKGDYHRYLAEFKSGAERKDAAESTLTAYKSAQDIANSELPPTHPIRLGLALNFSVFYYEILNSPDRACGLAKQAFDEAIAELDTLGEESYKDSTLIMQLLRDNLTLWTSDMQDDGADEIKEAAPKGNDEPQ

SEQ ID NO: 3023 - protein, 221 aa, Cicer arietinum
MALPNQQTVDYPSFKLVIVGDGGTGKTTFVKRHLTGEFEKKYEPTIGVEVHPLDFFTNCGKIRFYCWDTAGQEKFGGLRDGYYIHGQCAIIMFDVTARLTYKNVPTWHRDLCRVCENIPIVLCGNKVDVKNRQVKAKQVTFHRKKNLQYYEISAKSNYNFEKPFLYLARKLAGDPNLHFVESPALAPPEVQIDLVAQQQHEAEIAQAANQPLPDDDDDAFE

SEQ ID NO: 3024 - protein, 108 aa, Cicer arietinum
MQIFVKTLTGKTITLEVESSDTIDNVKAKIQDKEGIPPDQQRLIFAGKQLEDGRTLADYNIQKESTLHLVLRLRGGMQIFVKTLTGKTITLEVESSDTIDNVKAKIQD

SEQ ID NO: 3025 - protein, 152 aa, Cicer arietinum
MVLAGKLSTELGIKAPASKFYNLFATQLHEVQNHCERVHHTKLQQGEDWHHSDSVKHWKYVIDGKVHTCNESVEEVDEQNKKITYKLFGGDIDEHYKVFKLILQVFDKSDGSGAVKWTIEYEKINEDIYPPNGWMDYLSKCTRDLDGNLVKA

SEQ ID NO: 3026 - protein, 261 aa, Cicer arietinum
MASSKDRENFVYIAKLAEQAERYEEMVDSMKSVANLDVELTVEERNLLSVGYKNVIGARRASWRILSSIEQKEETKGNDVNAKRIKEYRHKVESELSNICNDVMRVIDEHLIPSAAAGESTVFYYKMKGDYYRYLAEFKTGNEKKEAADQSMKAYESATTAAEAELPPTHPIRLGLALNFSVFYYEILNSPERACHLAKQAFDEAISELDTLNEESYKDSTLIMQLLRDNLTLWTSDIPEDGEDSQKVNGTAKLGGGDDAE

SEQ ID NO: 3027 - protein, 540 aa, Cicer arietinum
LPTDILSKISPLPALKEILRTDGEQVLKFPPPHVIQVSKSAWMTDEEFGREMVAGVNPCVIRLLQEFPPKSTLDTIVYGDQSSTITKEHLEVNLGGLTVEEALNGNRLFILDYHDAFMPYLERINLTAKAYATRTILFLKDDGTLKPVAIELSLPHSNGVQYGAESKVFLPSDVGEESTIWLLAKAHVIVNDSCYHQLISHWLNTHATIEPFIIATNRHLSVLHPINKLLYPHYRDTININGLARQALINADGIIEQTFLPGPNSVEISSAVYKNWVFTDQALPADLIKRGLAIEDSSSPHGLRLVIQDYPYAVDGLEIWDAIKTWVQEYASLYYPTDEAVQKDTELQTWWKEAVEKGHGDLKDKPWWPKMQTLQDLVQSCSIIIWTASALHAAVNFGQYPYGGYILNRPTLSRRFIPEKGTPEYDEMVKSPQKAYLRTITPKYQTLVDLSVIEILSRHASDEVYLGERDSKFWTSDSRAVQAFQKFGSKLTEIEGKIIERNKDSSLKNRYGPIQLPYNLLLRSSEEGLTFRGIPNSISI

SEQ ID NO: 3028 - protein, 197 aa, Cicer arietinum
RSDPTQIEVKLFNRWSFDDVQLSDVSLIDYIGVVPSKHATYVPHTAGRYSVKRFRKAQCPIVERLTNSLMMHGRNNGKKLMAVRIIKHAMEIIHLLTDQNPIQVIVDAVVNSGPREDATRIGSAGVVRRQAVDISPLRRVNQAIYLLTTGAREAAFRNIKSIAECLADELINAAKGSSNSYAIKKKDEIERVAKANR

SEQ ID NO: 3029 - protein, 485 aa, Cicer arietinum
MSLIVEKTNTGREYKVKDLSQADFGRLEIELAEIEMPGLISSRTEFGPSQPFKGARITGSLHMTIQTAVLIETLTALGAEVRWCSCNIFSTQDHAAAAIARDSAAVFAWKGETLQEYWWCTERALDWGPGGGPDLIVDDGGDVTLLIHEGVKAEELFEKTGEVPDPSSTDNAEFQIVLSIIREGLKTDPQRYRKMKQRLVGVSEETTTGVKRLYQMQANGTLLFPAINVNDSVTKSKFDNLYGCRHSLPDGLMRATDVMIAGKVGVVCGYGDVGKGCAVALKQAGARVIVTEIDPICALQALMEGFQVLTLEDVVSIADIFVTTTGNKDIIMVDDMRKMKNNAIVCNIGHFDNEIDMAGLENYPGVKRITIKPQTDRWVFPETNTGIIVLAEGRLMNLGCATGHPSFVMSCSFTNQVIAQLELWNERNSGKYEKKVYVLPKHLDEKVAALHLNKLGAKLTKLSQSQADYISVPVEGPYKPAHYRY

SEQ ID NO: 3030 - protein, 74 aa, Cicer arietinum; identical to SEQ ID NO: 596

SEQ ID NO: 3031 - protein, 233 aa, Cicer arietinum
MAPKQRTARVSRNPDLIRGIGKYSKSAMYHKRGLWAIKAKHGGAFPKHDPKPKPEAPAEKAPKFYPAHDVQKPLRNKHKPKPTKLRANITPGTVLILLAGRFKGKRVVFLKQLPSGLLTCSGPFKINGVPLRRVNQSYVIGTSTKVDVSSVNVDKFDDKYFSKVAEKKTTKGEGEFFDSEKEDKKVLPQEKKDDQKTVDSSLLKAIETVPDLKTNLGARFSLKSGVKPHELVF

SEQ ID NO: 3032 - protein, 139 aa, Cicer arietinum; identical to SEQ ID NO: 573

SEQ ID NO: 3033 - protein, 158 aa, Cicer arietinum
MGVFTFEQETASTVPPAKLYKAMVKDADVIIPKAVDAIKTVETVEGNGGPGTIKKLTFVEGGQTLYVLHKIEAIDEANLGYNYSIVGGAGLSETVERYHFEAKLCEGPNGGSIGKVSVKYQTKGDAKPNEKEVQEGKAKGDALFKAIEGYVLANPNYN

SEQ ID NO: 3034 - protein, 300 aa, Cicer arietinum
MATTTAPSRQLTQKEADIQMMLAADVHLGTKNCNFQMERYIFKRRNDGIYIINLGKTWDKLNLAARIIVAIENSQDIIVQSARPYGQRAVLKFAQYTGAHAIAGRHTPGTFTNQLQTSFSEPRLLILTDPRTDHQPIKEAALGNIPTIAFCDTDSPMNYVDIGIPANNKGKHSIGCLFWLLARMVLQMRGTIRPGLKWDVMVDLFFYREPEEAKQPEEDEVAAPDYAIADFNVSAIPSDGQWPAAIDQPWNDAVPQPIPAVPAVNWAAPEAVAGDWGEAVPPPQQIPTAGIESVPATGWE

SEQ ID NO: 3035 - protein, 152 aa, Cicer arietinum; identical to SEQ ID NO: 547

SEQ ID NO: 3036 - protein, 178 aa, Cicer arietinum
METVMEDVEEYNYREVNLPSLIPVVGEPELERETGERRRGRDIVIAIDHGPNSKHAFDWALIHLCRLADTIHLVHAVSDVKNQIVYDMTQVLMEKLAVEAFQVAMVKTVARIVEGDTGKVICKEAERTKPAAVVMGTRGRSLFQSVLHGSVGEYCFHHCKAAPLVIVPGKDAGDASIV

SEQ ID NO: 3037 - protein, 202 aa, Cicer arietinum
MNPEYDYLFKLLLIGDSGVGKSCLLLRFADDSYLDSYISTIGVDFKIRTVEQDGKTIKLQIWDTAGQERFRTITSSYYRGAHGIIVVYDVTDQESFNNVKQWLNEIDRYASENVNKLLVGNKCDLAANKVVSSETAKAFADEIGIPFMETSAKNATNVEQAFMAMAAEIKNRMASQPANNARPPTVQIRGQPMNQKSGCCST

SEQ ID NO: 3038 - protein, 346 aa, Cicer arietinum
MAANSSNGDHQTTHKQPPLPSPLRFSKFFQSNMRILVTGGAGFIGSHLVDRLMENEKNEVIVADNYFTGSKDNLKKWIGHPRFELIRHDVTEPLMIEVDQIYHLACPASPIFYKYNPVKTIKTNVIGTLNMLGLAKRVGARILLTSTSEVYGDPLEHPQTESYWGNVNPNGVRNCYDEGKRVAETLMFDYHRQHGIEIRVARIFNTYGPRMNIDDGRVVSNFIAQALRGESLTVQSPGTQTRSFCYVSDLVDGLIRLMGGSDTGPINLGNPGEFTMLELAETVKELINPNVEIKTVENTPDDPRQRKPDITKAKELLGWEPKVKLRDGLPLMEGDFRLRLGVDKKN

SEQ ID NO: 3039 - protein, 77 aa, Cicer arietinum
SVTIEAMAKAFGVSVDFIDVELSRLFAAGKLHCKIDKVAGVLETNRPDAKNALYQATIKQGDFLLNRIQKLSRVIDL

SEQ ID NO: 3040 - protein, 109 aa, Cicer arietinum
MAGSWKCGSLFVLAIISFGCLFAISIAKEEGTKLGTVIGIDLGTTYSCVGVYKNGHVEIIANDQGNRITPSWVAFTDSERLIGEAAKNLAAVNPERTIFDVKRLIGRKF

SEQ ID NO: 3041 - protein, 139 aa, Cicer arietinum
MSSTATTKGGRGKPKASKSVSRSSKAGLQFPVGRIARFLKAGKYAERVGAGAPVYLSAVLEYLAAEVLELAGNAARDNKNNRIVPRHIQLAVRNDEELSKLLGSVTIANGGVLPNIHQTLLPKKVGKGKGEIGSASQEF

SEQ ID NO: 3042 - protein, 155 aa, Cicer arietinum; identical to SEQ ID NO: 522

SEQ ID NO: 3043 - protein, 181 aa, Cicer arietinum
MASSMISSSAVTTVKRASSVPSGAVAPFVGLKSMAGFPVRKVNNDITSIASNGGRVHCMQVWPPIGKKKFETLSYLPPLTEEQLLKEVEYLLRKGWVPCLEFELEKGFVYREHNNSPGYYDGRYWTMWKLPLFGCTEAVQVLKELQEVVKAYPNAFVRIIGFDNVRQVQCISFIAHTPKEF

SEQ ID NO: 3044 - protein, 439 aa, Cicer arietinum
TYTHNHPERIADGSNGDVAIDQYHRYKEDVQIIKDLNMDSYRFSISWSRILPKGKLSGGKNPEGIQYYNNLINESLAHGIKPYITLFHWDLPQALEDEYGGFLNSSIINDFRDYADLCFHEFGDRVKDWVTFNEPWMFSNGGYAVGSLAPGRCSDPTCLGGNSGTEPYTVTHNQILAHAHAVRVYRTKYKAKQNGKIGITLVSNWFLPLRDNVEDELATRRALDFQLGWFMEPLTTGNYSLSMQNIVKTRLPKFTTEQSRLVNGSFDFLGLNYYTSTYISNAPPQENVPPSYTTDSRTNTSSEKNGRPLGPRAASSWLYVYPRGLRDLLLHIKEKYNNPAIYIHENGMDEFNDPTLPVKEALLDTFRIDYYFRHLYYIRSAIQLGANVKAFLAWSLFDNFEWGGGYQHRFGLNYIDYKDGLKRYPKVSAQWYQNFLKRD

SEQ ID NO: 3045 - protein, 611 aa, Agaricus bisporus
  var. bisporus
  strain H97 / ATCC MYA-4626 / FGSC 10389
MSLLATVGPTGGVKNRLDIVDFVRDEKFFTLYIRALQAIQDKDQSDYSSFFQLSGIHGLPFTPWAKPKDTPTVPYESGYCTHSQVLFPTWHRVYVSIYEQILQEAAKGIAKKFTVHKKEWAQAAEDLRQPYWDTGFALVPPDEIIKLEQVKITNYDGTKITVRNPILRYSFHPIDPSFNGYPNFDTWKTTVRNPDADKKENIPALIGKLDLEADSTREKTYNMLKFNANWEAFSNHGEFDDTHANSLEAVHDDIHGFVGRGAIRGHMTHALFAAFDPIFWLHHSNVDRHLSLWQALYPGVWVTQGPEREGSMGFAPGTELNKDSALEPFYETEDKPWTSVPLTDTALLNYSYPDFDKVKGGTPDLVRDYINDHIDRRYGIKKSEGGKNPAQDLLSDFKGVTHDHNEDLKMFDWTIQASWKKFELDDSFAIIFYFAADGSTNVTKENYIGSINIFRGTTPTNCANCRTQDNLVQEGFVHLDRFIARDLDTFDPQAVHRYLKEKKLSYKVVADDHSVTLKSLRIRVQGRPLHLPPGVSFPRLDKNIPIVNFDDVLDLVTGVVNIGLTAVGATAGVAIGVVGATAGTAIGVAGAATDAVTNIAKGGLGALGRIF

SEQ ID NO: 3046 - protein, 388 aa, Agaricus bisporus
  var. bisporus
  strain H97 / ATCC MYA-4626 / FGSC 10389
MSHRKYEAPRHGSLGFLPRKRSARHRGKVKSFPKDDPKKPVHLTAYMGYKAGMTHVVRDLERPGSKMHKREIVEAVTIVETPPMMVVGVVGYVETPRGLRTLTTVWANHLSDELKRRFYKNWYRSKKKAFTRYAKKHAEDGGKSIGRELERIRKYCTVVRVLAHTQIRKTPLSQKKAHLMEIQVNGGSIADKVEFAHGLFEKPVEISTIFEQDEVVDVIAVTKGHGFEGVTHRWGTKKLPRKTHKGLRKVACIGAWHPSKVMFSVARAGQNGYHHRTELNKKIFRVGSGADDANASTEADATKKSITPMGGFPHYGIVKNDFLLLKGSIPGIKKRVITIRKSLMVHTSRRDLEKIQLKFIDTSSKFGHGSFQTFEEKAAFLGTLKARA

SEQ ID NO: 3047 - protein, 344 aa, Agaricus bisporus
  var. bisporus
  strain H97 / ATCC MYA-4626 / FGSC 10389
MPELPQQQKALFLESKQGDFVVKTRAVPKPGPGQALIQVKAAALNPVDWKIQKYGIYVTDFPAILGTDVSGVIVAIGEGITKFNVGDKVFCQGKIELDYADFQQYALVDEHHLAKIPANINFDQAATMPLGVTTAFLLMYNKPPHGHGLVNPIEAPGHYKDQPFVVLGGSANVGQNAIQFAKLSGFNPIIATASLKHTDFLKSLGATHVLDRNLSVQALKAEIEKITTKPVKHVCDAISVAETQQTGVEILAPGGHLMLVLAPTVSSDDKHILNVVAFRHLEPNVEQITAMYGKLSEWVEKGIIKPNNVEVLPGGLNGIVGGFKRMEANQVSGLKLVVHPEETA

SEQ ID NO: 3048 - protein, 262 aa, Agaricus bisporus
  var. bisporus
  strain H97 / ATCC MYA-4626 / FGSC 10389
MAPGFTISFVNKTIIVTGGNRGIGLAFTRAVAAAGANVAVIYRSAKDAVEVTEKVGKEFGVKTKAYQCDVSNTDIVTKTIQQIDADLGPISGLIANAGVSVVKPATELTHEDFKFVYDVNVFGVFNTCRAVAKLWLQKQQKGSIVVTSSMSSQIINQSSLNGSLTQVFYNSSKAACSNLVKGLAAEWASAGIRVNALSPGYVNTDQTAHMDKKIRDHQASNIPLNRFAQPEEMTGQAILLLSDHATYMTGGEYFIDGGQLIW

SEQ ID NO: 3049 - protein, 614 aa, Agaricus bisporus
  var. bisporus
  strain H97 / ATCC MYA-4626 / FGSC 10389
MSAEDVYEGAVGIDLGTTYSCVGVWQNDRVEIIANDQGNRTTPSYVAFSAEERLIGDAAKNQAAMNPKNTVFDAKRLIGRRYDDPDVKKDMTHWPFQVVEKDGSPLIKVNYLSEEKTFSPQEISAMVLTKMKEISEAKLGKTVQKAVVTVPAYFNDSQRLATKDAGTIAGLDVLRIINEPTAAAIAYGLDRQSKEEKNVLIFDLGGGTFDVSLLNINGGVFAVKATAGDTHLGGEDFDNALLEHFKNEFKKKTKFDISDDARALRRLRSACERAKRTLSSVTQTMVEVDSLYQGEDFSASITRARFEEINAVLFKSTLEPVEKVLKDAKMAREKVDDIVLVGGSTRIPKVQALVSEYFGGRQLNKSINPDEAVAYGAAVQAAVLTGQTSEQTKDLLLLDVAPLSLGVAMQGDVFGVVVPRNTPIPTNKSRVFTTVEDNQTTVTFPVYEGERTQCRDNRLLGEFELTGIPPMPRGQAELVTTFEVDANGLLKVTAQDRTSGRKASISITNSVGRLSSVEIEQMIKDAEQFKQADKDFTARHEAKSDLEAYIHQVESTITSPEIGMKLKRGAKSQVESELARALEKLEIEDSTADELKKAQLGIKRALQKATAGIR

SEQ ID NO: 3050 - protein, 842 aa, Agaricus bisporus
  var. bisporus
  strain H97 / ATCC MYA-4626 / FGSC 10389
MVNFTVDQIRGLMDRSTNIRNMSVIAHVDHGKSTLTDSLVSKAGIIASAKAGDMRFTDTREDEKERGITIKSTAISMYFEVDKEEITSIQQKTEGNEFLINLIDSPGHVDFSSEVTAALRVTDGALVVVDCVEGVCVQTETVLRQALTERIKPVVIINKVDRALLELQVDKESLYQSFQRTIESVNVIISTYHDEALGDVQVYPDKGTVAFGSGLHGWGFTLRQFSNRYAKKFGVDKDKMMVKLWGDNYFNPKTRKWTTNGTDADGKPLERAFNQFVLDPIFRIFDAVMNFKKDATTSMCEKLDIKLAVEERELEGKALLKVIMRKFLPAGDSLLEMIVINLPSPKTAQRYRVETLYEGPMDDESAIGIRDCDPKAPLVLYVSKMVPTSDKGRFYAFGRVFSGTVKAGPKVRIQGPNYLPGKKDDLFVKSIQRTVLMMGRYIEPIEDCPAGNIVGLVGIDQFLLKSGTLTTSETAHNMKVMKFSVSPVVQVAVEVKNAADLPKLVEGLKRLSKSDPCVQAYIAETGEHIVAGAGELHLEICLKDLQDDHAGVPLKISDPVVPYRETVKAESTIVALSKSQNKHNRLFAKALPLDEAVTKGIEDGKVNARDDFKARARVLADEFGWDVTEARKIWCFGPDTTGPNLLVDVTKGVQYLNEIKDSCVAAFQWATKEGVLCEENMRGIRYNILDVTLHTDAIHRGGGQIIPTMRRCCYAAALVASPTLQEPVFLVEIQCPENAIGGIYSVLNKRRGQVFSEEQRPGTPMFTVKAYLPVGESFGFNGELRSHTAGQAFPQSVFDHWEQMNGDPLEKGSKMEELVKSIRVRKGLKPDVPPLDTYYDKL

SEQ ID NO: 3051 - protein, 294 aa, Agaricus bisporus; identical to SEQ ID NO: 604
  var. bisporus
  strain H97 / ATCC MYA-4626 / FGSC 10389

SEQ ID NO: 3052 - protein, 321 aa, Agaricus bisporus
  var. bisporus
  strain H97 / ATCC MYA-4626 / FGSC 10389
MAAMTREVSSQSDIGKMKTEPNGAYKRLEASFRDVIAAGSKFEPEADRYHLYICYACPWATRTLIMRKLKGLESIISVTVVSPRMGSDGWAFANADDYPGAEVDPIHNVKHIKEIYLKISPEYSGRFTVPLLYDKKLDTIVNNESSEIIRMFNSAFNHLLPADKAALDFYPEKLRSDIDEVNSWVYPDINNGVYKAGFAATQEPYTKAVHELFKALDKAEGMLKGRDYLVGNQLTEADVRLWVTTVRFDPVYVGHFKCNISTIRGGYPNINRWMRKLYWNNDAFQSSTNFDHIKTHYYWSHAHINPTRIVPEGPVPVIEPL

SEQ ID NO: 3053 - protein, 538 aa, Agaricus bisporus
  var. bisporus
  strain H97 / ATCC MYA-4626 / FGSC 10389
MHRIALRNSTRRVLAASSKSAVNARSYATAKPAASEVSSILESRISGTAIGGNVEETGRVLSVGDGIGRVWGLKNVQAEEMVEFSSGIRGMCLNLEADNVGVSIFGNDRLIKEGDTVKRTGQIVDVPVGPGLLGRVVNALGDPIDGKGPIEAAERRRASVKAPGILPRRSVNQPMMTGLKPIDAMVPIGRGQRELIIGDRQTGKTAVAIDTILNQKRWNDGNEEVKKLYCVYVAIGQKRSTVAQLVKTLEENDAMKYTIIVAATASEAAPLQYLAPFSGCAMGEWFRDNGKHALIIYDDLSKQAVAYRQMSLLLRRPPGREAYPGDVFYLHSRLLERAAKMSDKFGGGSLTALPIIETQGGDVSAYIPTNVISITDGQIFLEAELFFRGVRPAINVGLSVSRVGSAAQTKIMKKFAGSLKLYLAQYREVAAFAQFGSDLDASTRFLLSRGARLTELLKQGQYQPLATEMQVPIIYAGVNGLLDSIPVDQITKWEAEFREHLTATQSALLSEIATGAVTPELEAKIKKAVEDHVSSFTS

SEQ ID NO: 3054 - protein, 1164 aa, Agaricus bisporus
  var. bisporus
  strain H97 / ATCC MYA-4626 / FGSC 10389
MSLPGLRSSWLRGAARHPIRSLHSSSVSARHAFVPSQSLRAIAAPAVGSYAPKEGEHVLNSPSELARRLSAKVLPKLPRPDVKKVVVVGSGGLSIGQAGEFDYSGSQALKALHEAGVDAVLINPNIATWQTSHQLASEVYFLPVTVDYVAYVLEKERPDGILLTFGGQSALNVGIELDRMGILERLGVKVLGTPIRTLEVSEDRDLFVQALKEIDIPVAQSTAVSTVEDALAAAEEIGYPVILRSAFTLGGLGSGFANNPEELRDLSAKSLSLSPQVLIERSMKGWKELEYEVVRDAADNTIICCNMENFDPLGTHTGDSIVVAPSQTLPDDEYHMLRSAALKVIRHLGVVGECNIQYALNPKSREYCVIEVNARLSRSSALASKATGYPLAYTAAKIALGHTLPELPNAVTKTTTACFEPSLDYIVTKIPKWDLAKFSSQVNREVGSSMKSVGEVMAIGRTFEESLQKAIRQVDPRWKGFEAYVAPEDLDRALSRPTDMRLFAIAYAMYKKDYTVDQVHDLTKIDKWYLYKIDNIVQLHRTLKAAGSIQNVDHELMQRAKRMGFADAQIGDLINATEDAVRAARKSMNITPFVKRIDTLAAEYPAHTNYLYTTYNASEHDVKFDENGTMVLGSGVYRIGSSVEFDWCAVTCARSLRNMGKKTIMINYNPETVSTDFDEADRLYFEELGYERVMDIYELEAAQGAIVSVGGQLPQNIALRLKKSGVNVLGTPPEQIDMAEDRHKFSSVLDSIGVDQPEWSEVTSVVAAKAFANKVSYPVLIRPSYVLSGAAMNVVYAEEELEENLSKAADVSPLHPVVMTKFIDGAQEIDVDAVAYKGKLLVHAVSEHVENAGVHSGDATLVLPPFSLIETDMSRLKTIAEKVAAAFNISGPYNMQIIKKPSENGQEAELKVIECNLRASRSFPFVSKVLGHNFIETATAAITGHEVPEPIDLMAQKRDYTSIKVPQFSWTRLGGADPFLGVEMASTGEVASFGKDIHEAYWASLLSTTGFKVPKVNSGVLIGGDVTKPEMVTIAKLLQGLGFKLYCSSSVVEDYLNNIPFVKAQRIVFPTSDKRKLREVFDEYEIQCVINIARSRGQTFTDEDYVARRNAVDFGLPLLNNAQTALLFVEALAKKIPQGGLRGYAEGRIPPEVRSWSEFVGSRA

SEQ ID NO: 3055 - protein, 1198 aa, Agaricus bisporus
  var. bisporus
  strain H97 / ATCC MYA-4626 / FGSC 10389
MAEQSSATLHPPRLSAMFATSPSAPGTPVHSIQTMRRKAAGHGGPLTKILVANRGEIAIRVFRTAHELAMHTVAIYSYEDRLSAHRQKADEAYQVGKGRTPVAAYLAQDDIIRIALEHGVDMIHPGYGFLSENAEFARKVENAGIAFVGPTPEVIDGLGDKTKARTLAMQCGVPVVPGTPGPVGSYKDGESFIKEYGFPVIIKAAMGGGGRGMRVVREESDFQSSFERAVSEAKSAFGDGTVFIERFLERPRHIEVQLLADSQGNTIHLFERDCSVQRRHQKVVEVAPATHLPEEIRQGILSDAIKLAKSVGYRNAGTAEFLVDQMGRHYFIEINPRIQVEHTITEEITGIDVVAAQIQIAAGATLPQLGLTQDAITKRGFAIQCRITTEDAATGFQPDTGKIEVYRSAGGNGVRLDASSGFAGAQITPHYDSLLVKCTVSGTTYEVARRKMLRALVEFRIRGVKTNIPFLFRLLTHDTFIGGKTWTTFIDDTPDLFKLVQSQNRAQKLLAYLGDLAVNGSSIKGQVGEPGLKTDIVIPKLTNREDPSGPTVDTTFPCTVGWRNIIVEHGPEAFAKAVREYPGVLIMDTTWRDAHQSLLATRLRTTDMVNIAKETSYALANSYSLEMWGGATFDVAMRFLYEDPWDRLRTLRKLVPNIPFQALVRGANGVGYTSYPDNAIYDFSKKAVENGLDIFRVFDSLNYFENMKLGIDAAKKAGGVVEAVVCYSGDVASPKETKYTLQYYLDFIGQLVKEGVHILGVKDMAGLLKPEAAKILIGAIRKAHPDIPIHVHSHDTAGIATASMIAAAAAGADIVDVAIDSMSGLTSQPSMGAVCMALEQTSLGTGIRYDDIQALNLYWSQVRMLYGCFEANVRASDSSVFDHEMPGGQYTNLMFQASQLGLGTQWTEIKQKYIQANELCGNIIKVTPSSKVVGDFAQWMTSNSLSKEQVLERAEQLDFPSSVVEFFQGYLGQPVGGFPEPLRSRVIRDKQRIDGRPGTTLQPLDFKKIKADLRSKFGKHITDTDVTSYVMYPKVFEEYQGFLEKYGDLSVIPTRYFLGRPDVGEEMHISIEAGKTLIIRLMAIGPVVEGRAQRDVWFEVNGEVRAVSIEDKNSAVETVSREKSTSDPGSVGAPMSGVVVEVRVKDGQEIKKGDPVCVLSAMKMESAVTAPVSGHVKRVTVHEGDSINQGDLVAEIVH

SEQ ID NO: 3056 - protein, 366 aa, Agaricus bisporus
  var. bisporus
  strain H97 / ATCC MYA-4626 / FGSC 10389
MKVLAILYDGGEAARQESRLLGTTENGLGIGPWLESLGHEFVSSSKEGANSDFQKHIADAEVLITTPFHPGYLTRDLVEKAKNLRLCITAGVGSDHIDLNAAVDHRIQVLEVSGSNVVSVAEHVVMSILLLVRNFVPAHEMIERGDWQVSDIARNAFDLEGKVVGTIGAGRIGYRVLQRLLPFNCKELIYYDYAPLPEAASKAVNTRKVDDLKEFVSQCDVVTLLKSFKKGAWLVNTARGAICDKDAVAAAVKSGQLNGYAGDVWNVQPAPKDHIWRTVKNPLNGGNGMVPHYSGTTLDAQARYANGTKSILEHYFNNTEQEAQNIIIGLGKYETKACLQWEKKVKWRRTKDVKDYTSPIGFLITS

SEQ ID NO: 3057 - protein, 402 aa, Agaricus bisporus
  var. bisporus
  strain H97 / ATCC MYA-4626 / FGSC 10389
MSLVKRVPNAREFYPMCEPEIGTKNETPILFKPLTIRGVTFRNRIWLSPMCQYSSDDGHATDHHLVHLGSYATHGVGAIVIEATAVVPEGRISPEDSGLWKDSQIAPLKRIVDFAHAHGAKIGIQIGHAGRKASTVSPFVTKPDGKHALTSEEAGWPDQVYAASAIPFVPEVYPDPQEATEEYIKTVIDAFVAAAKRAEKAGFDFIEIHAAHGYFLNTFLSPLSNTRTDKYGGSLENRMRLTIEVAQRLREAWPADKPLFIRITAVDWAEGPEKDESGKWLQWGIEQSIVLAKRLQEVGVDLVDVSSGGLWAAQKITVGPGYQSGFAAQIKKAVPNLLISAVGAITEPEQAETYLKEGRADVITMARELLRNPSWPLYASKKLGVEIQPSNQQAAGWFRYRI

SEQ ID NO: 3058 - protein, 654 aa, Agaricus bisporus
  var. bisporus
  strain H97 / ATCC MYA-4626 / FGSC 10389
MSSSKAIGIDLGTTYSCVGVWQNDRVEIIANDQGNRTTPSYVSFSDNERLIGDAAKNQVAMNPHNTVFDAKRLIGRKFDDQEVQSDMKHFPFEVFSRTGKPYIRVEYRGEKKEFSPEEISSMVLSKMKETAEAYLGTTVNNAVVTVPAYFNDSQRQATKDAGVISGMNVLRIINEPTAAAIAYGLDKKVSGERNVLIFDLGGGTFDVSLLTIEEGIFEVKATAGDTHLGGEDFDNRLVTHFIQEFKRKNKKDLSGNQRAVRRLRTACERAKRTLSSAAQTSIEIDSLFEGIDFYTSLTRARFEELCQDLFRGTLEPVEKVLRDSKIDKSNVHDIVLVGGSTRIPRIVKLVSDFFNGKEPNKSINPDEAVAYGAAVQAAILSGDTSEKTQDLLLLDVAPLSLGIETAGGVMTALIKRNTTVPTKKSEIFSTYSDNQPGVLIQVYEGERARTKDNNLLGKFELSGIPPAPRGVPQIEVTFDIDANGILNVSASDKTTGKSNRITITNDKGRLSKEEIERMVDEAEKYKAEDEAAASRIQSKNGLESYAYNLRNSITDEKLADKFDAADKSKLETAINETISWLDNSQEASKEEYDDKQKELEAIANPIMQKLYSAAGGAPGGFPGAGGAPGGAPGGAPGGFPGAGGEEGPSVEEVD

SEQ ID NO: 3059 - protein, 699 aa, Agaricus bisporus
  var. bisporus
  strain H97 / ATCC MYA-4626 / FGSC 10389
MCGIFGYCNYLKEKRREEVLEILCAGLARQEYRGYDSAGLVIDGDKPGSVEYFKEVGKVAGLRKKIAGSQLDVEKSYIAQVSIAHTRWATHGPPSERNCHPVRSDQNSEFVIVHNGIVTNSAELRQVLQKRGYQFKTDTDTEAVAILTKYIFDSQGSARRLTFTEIVKAVLKELEGSFAFVFKSSHFPNEVVTARRGSPLLIGVKTDKKLKVDFVDVEFAGQDPKETLPESIQANSLTGLAVPSANPKVFRTQSRTFITEDGFPQPIEFFIASDAAAIIEHTKRVLYLEDDDIAHIADGELQIHRLRRKEEGHQTPSQIATTRTIETLELEIAAIMKGKFDTFMQKEIYEQPESVVNTMRGRVNFDEQRITLGGLRAYLPIMRRSRRIVFIACGTSYHSCLATRAIFEELTEIPVGVELASDFLDRKTPIFRDDVCVFLSQSGETADTILAMRYCMDRGALCVGVVNTVGSTISRETHCGVHINAGPEVGVASTKAYTSQYVALMMIALQLSEDRISFTERRNQIINGLHSLSAQITKVLELDPILEELAEGIHKNKSLLIMGRGMQHATCLEGALKIKEISYMHSEGILAGELKHGPLALIDENMPVIIIMTRDSLYPKVQSAFAQITARKARPIVLCNEGDDGIPANATTIRVPQTVDSLQGLLNIIPLQLLSYHLAVKNGCDVDFPRNLAKSVTVE

SEQ ID NO: 3060 - protein, 265 aa, Agaricus bisporus
  var. bisporus
  strain H97 / ATCC MYA-4626 / FGSC 10389
MSAQISKKRKFVADGVFRAELNEFFTRELAEEGYSGCDVRVTHARTEIIIRATHTQEVLGEKGRRIRELTALVQKRFKFPENSLELYAEKVQYRGLSAIAQCESLRYKLLGGLAVRRACYGVLRFVMESGAKGCEVVVSGKLRAARAKSMKFTDGFMIHSGQPVREFVDYAVRHVLLKQGVLGIKVKIMKGHDPEGQLGPKKPLPDAVQIYEPPVDKVVLEPSSEQREPVPVPVAAPAAEEPYVPPQDEAFQQQEAYGAEQQTVF

SEQ ID NO: 3061 - protein, 444 aa, Agaricus bisporus
  var. bisporus
  strain H97 / ATCC MYA-4626 / FGSC 10389
MSITKIHARQIFDSRGNPTVEVDLHTAKGRFRAAVPSGASTGVHEAVELRDGNKNEYLGKGVSKAVENVNQIIAPKLIESGLKVTQQKDIDDWLIKLDGTPNKGKLGANAILGVSIAAAEAGAAEKSVPLYQHFAELSGVKPPYILPCPAFNVINGGSHAGNKLAFQEFMLLPTGAQSFTEAMKIGTETYHTLKKVISAKYGIDAVNVGDEGGFAPNVSGADEALELLSEAIKKAGYEGKIKIALDVASSEFYKDGKYDLDFKNANSDPAKWISGVELADLYLSYVKKYPIVSIEDPFDQDDWEAWTHFTSKSGIQIVGDDLTVTNPLRIKTAIEKKACNGLLLKINQIGTISESIQAAQLSQSDGWGVMVSHRSGETENTVIADLVVALGLGQIKTGAPARSERVAKYNALLRIEEELAGSGAYFAGDKGLATGTTPPQLLQK

SEQ ID NO: 3062 - protein, 502 aa, Agaricus bisporus
  var. bisporus
  strain H97 / ATCC MYA-4626 / FGSC 10389
MPKTYTHTFNEPTFKGTSHINTGLFINNQWVDPVEGGTLDVINPTTGKVITSVAAGSAKDVDIAVEAATKAYKTSWGLKLPGSERGRLMNKLADLMEKHSEEFVALEMLNVGKTYGPAKTFDVAQSIYTIRYYAGWADKIHGKTIETRDTKMAYTRHEPYGVVGCIVPWNFPLLMTVWKLGPALSTGNAVILKPSEMTPLSALRLADLFVEAGFPPGVFNIINGYGNKVGQAIAEHMKISKVAFTGSTLTGRKILKAASETNLKKVTLELGGKSPTIIFNDVDLEQALKWASAGIFINMGQSCVAASRIFVQEGIYDKFLQEFTKIAKTLTENTGSPFIPTTQHGPQISQIQFDRVMGFINSGKQEGAKVQIGGERHGTEGYFIKPTIFTDVTPQMSIMQDEIFGPVCSVVKFKTEEEVLSIANDVAYGLGANVFTENTATAMRMAHALEAGSIWVNCAQQTEMNVPFGGFKQSGMGRELGQYALDSYTQVKAVHINLGQKL

SEQ ID NO: 3063 - protein, 253 aa, Agaricus bisporus
  var. bisporus
  strain H97 / ATCC MYA-4626 / FGSC 10389
MGRVIRTQRRSHAIFKAHTHLNKAPARFRALDFAERNGYIRGVVKEIIHDAGRGAPLARVVFRDPYRYKLRKETFIATEGLHTGAFVYCGKKAALTVGNVLPVSQCPEGTIICNVEEKVGDRGALARTSGNYATIIGHSDDNKTRIRLPSGSKKTVSGSARATIGIVAGGGRIDKPLLKAGRAYHKYKAKRYNWPRTRGVAMNPVDHPHGGGNHQHIGHASTVARSSVPGQKVGLIAARRTGLLRGTVKVKEV

SEQ ID NO: 3064 - protein, 410 aa, Agaricus bisporus
  var. bisporus
  strain H97 / ATCC MYA-4626 / FGSC 10389
MSAETWQQVPLAPPDSIFKLTAAYKADSFEKKVNLGVGAYRDDRSKPWVLPVVKKATKILLEDETLDHEYLPILGLPEYTAAAAKLILGPGSVAIKDKRVVSAQTISGTGANHLGALFLSRFYGFNGDKRIYLSNPTWANHQAIFRNVGIEPVDYPYYDPKTIGLDFDGFIDALKTAPTRSVFLLHACAHNPTGVDPTSEQWEAIAEVMLERKHFAFFDCAYQGFASGDLDRDAFAVRYFVDRGVAMLVCQSFAKNAGLYGERVGALHVVSQDSETADRVKSQLSVLQRSEISNPPTHGARLITLILSDAGLFEEWKRDISTMANRIIAMRQELYRLLTEKLGTPGNWDHIINQIGMFSFTGISPAQSQALVEKAHVYLTGNGRISMAGLNSNNIEYFAESLDKVVRGTL

SEQ ID NO: 3065 - protein, 460 aa, Agaricus bisporus
  var. bisporus
  strain H97 / ATCC MYA-4626 / FGSC 10389
MGKEKTHVNVVVIGHVDSGKSTTTGHLIYKCGGIDKRTIEKFEKEAAELGKGSFKYAWVLDKLKAERERGITIDIALWKFETPKFMVTVIDAPGHRDFIKNMITGTSQADCAILIIAGGTGEFEAGISKDGQTREHALLAFTLGVRQLIVAVNKMDTTKWSEDRFNEIIKETSTFIKKVGYNPKTVAFVPISGWHGDNMLEESANMPWYKGWTKETKGGVTKGKTLLDAIDAIEPPVRPSDKPLRLPLQDVYKIGGIGTVPVGRVETGIIKAGMVVTFAPSNVTTEVKSVEMHHEQLEQGSPGDNVGFNVKNVSVKDIRRGNVASDSKNDPAKEAASFNAQVIVLNHPGQIGAGYAPVLDCHTAHIACKFAELKEKIDRRTGKSLEDNPKFVKSGDAAIVKLIPSKPMCVESYNEYPPLGRFAVRDMRQTVAVGIIKSVDKTDKSGGKVTKSAEKAAKKK

SEQ ID NO: 3066 - protein, 552 aa, Agaricus bisporus
  var. bisporus
  strain H97 / ATCC MYA-4626 / FGSC 10389
MTGSLASNYASWKQLQEIYDKDRAKIVLRDLFAADPQRFSKLSATYNSQSGPGVQILLDYSKHLVTEPILQKLFNLLREAKVEDARDKMFSGEHINTSEDRAVLHVALRNFNDFSIKEEGVDEVSKVLQHMKEFSESVRSGQWKGYTGKTINTIVNIGIGGSDLGPVMVTEALKPFSKRDLNAHFVSNIDGTHIAETLRLCDPERTLFIVASKTFTTQETITNAESARDWFLGFAKDKAHVAKHFVALSTNTSAVTAFGISEANMFQFWDWVGGRYSLWSAIGLSIALVIGFDNFEKLLRGAHAMDQHFKTTPLEKNLPAIMAALGIWYNDFYGAQTLALLPYDQYLHKFADYFQQGDMESNGKFITKNGDRVNYQTGPIIWGASGTNGQHSFYQLIHQGTKIIPADFMAPATSHNPIANSKHHRILLSNFFAQPEALAFGKTEEEVRKELGQNASEALVKSKVFEGNRPSSSLMFDKLDPATLGALIALYEHKIFVQGVVWGINSFDQMGVELGKVLAKQILAQLDKSDDVKGHDSSTTGLIHWYQAHRKE

SEQ ID NO: 3067 - protein, 579 aa, Agaricus bisporus
  var. bisporus
  strain H97 / ATCC MYA-4626 / FGSC 10389
MAQVIVVGGGLAGLSAAHTVLERGGNVLVLDKQPFMGGNSTKATSGINGAGTQPQQDAGIADSARIFFEDTKKSARELARDDLIQVLTGRSADAVHWLQSKFGLDLTKVARLGGHSQPRTHRGGAQFPGMVITYAQLERLEDLSVSDPERVKVIKKARVTKLVKDSSGAVVGVEYECGGKTETAYGPVILATGGYAADFTGDSLLKKYRPEYYELPTTNGEHSTGDGHKLALSIGASAIDLEKVQVHPTGLVDPKEPDAKVKFLAAEALRGVGGLLLDNTGKRFVDELQHRDYVTGKMWENGKYPIRLVLNGKASKDIEWHCKHYVGRGLMKRFDSGEALAKEFGLAPEVLRKTFEDYNVSVRTQKDPFGKKFFQGEWKFDDFFHVAVMTPVLHYTMGGLEIDAESRIIDQSGKPIPGLFAAGEVAGGVHGANRLGGSSLLGCVVFGRVSGDSASAYLLQATSAAVQKAGGRLGALAGHISGSTAASTPDSAAAAPVGKSASGEYTLADVAKHNKKDDIWVVIDGQVLDVTKFLPDHPGGEKAIILYAGRDATEEFNMLHDPKVIPRYAPDAVIGKVKA

SEQ ID NO: 3068 - protein, 895 aa, Agaricus bisporus
  var. bisporus
  strain H97 / ATCC MYA-4626 / FGSC 10389
MATLTTPGAPDEYRLPTNVKPAHYDVTIKTDLENLSFEGFVRIELDVKEPTSRIVLNTSGLDLGQATLYSDSLKKELAPSEQTLDTASERVAYSVNDTLPAGSKAFLKVSFKGELTGSMMGYYKSTYEEDGKPKYYALTQFEPTAARRAFPCWDEPLLKATFGITLISRADTTNLSNMPAISEEAVTPNTDFGGDASLFSGLKDGQWKVTKFQTTPPMSSYIVAFANGYFKYLEDSVVLPLSGKTLPLRIYTTAEYIHQAQFALDIKKAVLPIYEKIFDVGYPLPKLDTLVASDFDAGAMENWGLITGRTNAFLLDPKKADLQAKKQIAATQSHEVAHMWFGNITTMEWWNYLYLNEGFATLMGEVIIAGEVFPEWKVDSNFISEHLNRALGLDAKPSSHPIEVDCPDANHINQIFDSLSYSKAASVLRMLSNYVGEDRFLKGVSIYLKNKLYGNSVTNDLWEGISQATGIDVPKIMDTWIKKIGFPVITVTETPEGIRVRQDRFLETGKGEGADNETIWNVPLRILSIDSNGKPVLDNSALLTEREQTFKIDSSKPFKLNTGTSGVYRVLYEPKTLAKIGEEAAKDGSVFSLNDRLGLVYDSVALSKAGLAQVSSALTLMDILGKTEKEYLVWSGIADNLSALVSTWWENQDVVDQLNAVRGALFVPLVKKLGFDYSSSDSVDTTLLRTLAVSQAAAAGDPSVIKELQSRFEHFMKTGDDSRIPADLQRATFSTVVRRGGRAEYNAIVGIYDKPSTPTARVAAIVAMGATHDVKLLQETYSFIKNKSRDQDIVYFFRGLSDNIKMRRGMVAYFENEYDTLIERFGGNFTLQYLVTLSFSFLSTNEDLKKTEEFFKGRDTSKYSMALAQSLDSIRARVQFIERSTSDLEKWLKER

SEQ ID NO: 3069 - protein, 1199 aa, Agaricus bisporus
  var. bisporus
  strain H97 / ATCC MYA-4626 / FGSC 10389
MYGLSNRTSAWRALRSHVIPFTSASRLNSTKPPRSAWQQALTPSSPVLVQENFPKHFIFALDIGRRFLKYSIFGLTILAVSAGGAYEAAHMFVEKNGLAPESDEEVKRWQWESDADKWTGDSVNGGTDPNLGFKVRHLVRAAWMAYTWGIGYTTAAIGSSDQRGSGLVGPMGIKVINPRLQLTEDFLREAIRVAESSQDGRHSHTLAHLWTLHASILEKLGDDFLPEAKAELERAAASLDGDKRLNSARLALKLGDIDARLGLKEQALERWTRTLALLNDKQPEVASIAGELVPERPPSSPLAQRLLSSTLVSLSAFYARTGQYREAQLVEERALSVLRAIHPPDSLATASPPQALHALFLLQRSSVISVHLAEVAFAQRRPAVFSMQWLTSAAESSERVARVLTGLPLVKSQDFHSKSDLPHPLEERLLTSYSSSRSMKGVAEGLLRDARRTAAESWNLMGALHEKKEGARSRSALACYERAVEWAGCPSSDGDNGREAAQGIPDADWKMVWSNYQRMKLQVEGRCSYRGVVLNLSFIDTRFLADRSTPLCSLEVAKSFALLSSNEKKYTHYLNQASWAGARIIQGQWTPHAIELYDLLILIFSSSDKFKLADLEALRVASKVNTEDWENLLQYTIQVLSNLVNFKSFGFTKIIPRVNSEIFEAVVLNSANKEQAASLWNKLKDHIYSTTPEASLYIGKRSLGHVSNYYVGEVINDEEVTAIQAAAEKLNIDVLNTRVAKKGPGDYVLLIASANTGPSATHEIDVQGKTAQLRVEYAAHNTRFETGSIQDHKDASKEWVKDVGPVVESYIGFIETYVDPYGGRAEWEGFTAIVNKELSAKYEILVNKAPELIKVLPWGKNFEVDIFRKPDFTALEVVNFATGGIPAGINIPNYYDIRASTGFKNVSLANILAAKSPNEKLTFIHPDDVDLYNSWDNRSFELQVANHELLGHGSGKLFEEYADGTKNFVPEQVINPLTGKPITSWYKPGQTPGSVLGEVSSSMEECRAETVALYLVGERDILEIFGYTDSQDIENIQYITFLLMARAGLRGLEFYDPVNKKHGQAHMQARLGITQHLIRSGIARLEEVRDANGALVDLYVRVDKNLVLTKGREVAGKLLIELQVRKSTADGAGAREYYNNLTNPIAGWEGEIRDLVLAKKQPRKVFVQPNTHLVNGNVELKEYAFTPAGVIESFIERNL

SEQ ID NO: 3070 - protein, 312 aa, Agaricus bisporus
  var. bisporus
  strain H97 / ATCC MYA-4626 / FGSC 10389
MGATRADKQVYFEKLKELLYAYPSVFIVNVDNVGSNQMHQIRVALRGKGVVLMGKNTMVRRALRTLIPESPQFERLLPHVRGNVGFVFTKSDLKEIRDIIVANKVAAPARAGAFAPKDVIVPAGNTGMEPGKTSFFQALGIPTKIARGTIEIVSDVKVVTALTRVGPSEATLLNMLNISPFTYGMTVNQIYDSGNIFSPEVLDIGEDELVNRFLTGIKTIASISLALNYPTVVSVAHSLVNAYKNLVAVSLATEYTFEGAAKIKEYLENPDAFAAVAAAAAPAAAAEAPKEEEKKEEEEEASDDDMGFGLFD

SEQ ID NO: 3071 - protein, 310 aa, Agaricus bisporus
  var. bisporus
  strain H97 / ATCC MYA-4626 / FGSC 10389
MPFVKKVKSDAYFSRFQVKYRRRREGKTDYSQDYARKRLVTQAKNKYNAPKYRLVVRFTNKDIIVQIVYARLQGDFVLTSARSAELPRYGIKHGLTNWAAAYATGLLAARRALTKLSLADQYEGVAEPDGTLSITEAIEEEDAPRPFKAFLDVGLKRTSTGSRVFGALKGASDGGIYIPHNEKRFPGYDPESKELDAEVLKKYIFGGHVAEYMESLEEEDDERFKKQFSKYLADGVGSEDIEEIYTNAHAAIRENPEFKPSEKTKDWKAECLKFKAKRFTLEERRARIAEKIEKFKAGGLEEEDAGEDDD

SEQ ID NO: 3072 - protein, 338 aa, Agaricus bisporus
  var. bisporus
  strain H97 / ATCC MYA-4626 / FGSC 10389
MVKVGINGFGRIGRIVLRNALQFQDIEVVAVNDPFIDLEYMAYMFKYDSVHGRFKGTVEVKNGSLVVDGRPMKVFAERDPAAIPWGSVGADYVVESTGVFTTIDKASAHLKGGAKKVVISAPSADAPMYVCGVNLDKYNPKDTIISNASCTTNCLATLAKVIHDNFGIVEGLMTTVHATTATQKTVDGPSHKDWRGGRGVGNNIIPSSTGAAKAVGKVIPSLNGKLTGLSMRVPTQDVSVVDLVVRLEKPASYEQIKEVMRKAAEGEYKGIIAYTDEDVVSTDFISDNNSCVFDAKAGIQLSPNFVKLIAWYDNEWGYSRRVCNLLQYVAKEDAKAGI

SEQ ID NO: 3073 - protein, 375 aa, Agaricus bisporus
  var. bisporus
  strain H97 / ATCC MYA-4626 / FGSC 10389
MEEEVAALVIDNGSGMCKAGCACDDAPRAVFPSIVGRPRHQGVMVGMGQKDSYVGDEAQSKRGILTLKYPIEHGIVTNWDDMEKIWHHTFYNELRVAPEEHPVLLTEAPLNPKANREKMTQIMFETFNTPAFYVAIQAVLSLYASGRTTGIVLDSGDGVTHTVPIYEGFALPHAILRLDLAGRDLTDFLIKNLMERGYPFTTTAEREIVRDIKEKLCYVALDFEQELQTAAQSSALEKSYELPDGQVITIGNERFRAPEALFQPAFLGLEAAGIHETTYNSIFKCDLDIRRDLYGNVVLSGGTTMFPGIADRMQKELTSLSPSSMKVKIVAPPERKYSVWIGGSILASLSTFQNLWCSKQEYDESGPGIVHRKCF

SEQ ID NO: 3074 - protein, 457 aa, Agaricus bisporus
  var. bisporus
  strain H97 / ATCC MYA-4626 / FGSC 10389
MVLPHEPEFEQALHELETSLQPFLTTNPQYKKALEIIQVPERVLQFRVTWEDDQGKPQVNRGFRVQYNSALGPYKGGLRLHPTVNLSILKFLGFEQTFKNALTGLSMGGGKGGSDFDPKGKSDNEIRRFCVAFMSELFRHIGQDTDVPAGDIGTGAREIGFLFGAYRRLKNEFTGMLTGKGINWGGSFIRPEATGYGLIYYVEHMIAHACPEYSLDRPSTLVAISGSGNVSQFTALKVIELGATVLSLSDSKGSLISEKGYTKEAIEKIAELKLKGGALEAIVDDLGAGYTYHAGKRPWTLLPQVHIALPGATQNEVSQEEAEALVKAGTRIVAEGSNMGCTEEAIAIFENSRRASRAGVWYAPGKASNCGGVAVSGLEMAQNSQRLAWSTQEVDAKLKSIMAECYQICYTAGSRWSGEKVAEGVAEGEALPSLLSGANVAGFIKVADAMKEQGDWW

SEQ ID NO: 3075 - protein, 474 aa, Agaricus bisporus
  var. bisporus
  strain H97 / ATCC MYA-4626 / FGSC 10389
MSQLRVSGTKIVNEAGSETVLRGAGLGGWMNMENFISGYPGCEYQIREALTDTIGQEKADLFFDKFLEYFFQEQDAKFFQSLGLNCIRIAFNYRHFEDDMNPMVLKESGFKHLDRVIDICAQHGIYTILDLHVAPGGQNTDWHSDHGGHIANFWNHRHFQDRALWLWTELAKHYKGNKWIAGYNPLNEPTDSKHTRVIKFYDEVHAAIRAQDPDHIIFFDGNTFASDFSHFGDSHKNWDNTAYSIHDYSVFGFPAAPENYTGTPEQQRRLRRSYEKKREWMDERGLCVWNGEWGPVYARKQYDGAATDSINEGRYKVLSDQLDIYTKDRLSWSIWLYKDIGFQGMVHTSLDTPYMQLFKDFLAKKHRLATDAWGADDSAVRSAYQPLIELITKEVGDQYRQIYPAPVWKFTDRVGRLSRNILVAEFLVKEWADHFVGKSEAEIDAIAASFKFENCLKRDGLNAILTANAKLVKQ

SEQ ID NO: 3076 - protein, 1029 aa, Agaricus bisporus
  var. bisporus
  strain H97 / ATCC MYA-4626 / FGSC 10389
MSTPEPAYVARLGLNSKTPLNLVKNMPGYTTPVFKGKEEQRALVEEEVASKGFIPRELVAGEVNWFYSNLGIDDTYFQNESHEVISDHILALFGAKIMAYTKHDPSTLVIDLERIDERGNSATFIHSSAPGLTSTEGPGATCEARIDELFLDPSTPEKAYRLETFRSAGSISATASQQLRCYFVTKCDFPKTKAEIVPGQTEIRSVSDSNFLERATKNTLDIYQKVMSNVETRHGPVIEVYEVEGTRKRRLVIGYKMGATSRFFSALSNLYHFYSLYSTGKYVEQFANGITIISIYLNPLPNSSAPPIENSIYQVMKEASLLFCLPDNPFFLPKSAESHAVQEATYAYCGWVFAQHFCNRLGPAYLQLKNVLNESDPTHAEVLNNIKRRFREETFTRESIAQAIHAYPNLIRLLYVNFAMSHYPQSAEASKLGPTLSYQRLQTVQPLSDEELYDKIRRSVPNKQELQVLESFLIFNKHVLKTNFYQSTKVALSFRLTPEFLPEVEYPKTPFGVFFVIGNEFRGFHIRFRDVARGGIRLVMSRNRENYSINQRMLFDENYNLASTQSLKNKDIPEGGAKGTILPSLGAHPRRCFEKYVDAIIDLLIPGQTPGIKEPLVDLFGKPEILFFGPDEGTAEMMDWAALHARDRGAETWWKSFTTGKTAATLGGVPHDTYGMTSRSIRQYVLGIYSKLGLREKDITKVQTGGPDGDLGSNEILLSSDKTVAIIDGSGVLHDPVGINRAELIKLAKARLTVGHFDVSKLSENGYLVKVEQHDVKLPSGEIVLDGTDFRNTAHLRFKADLFVPCGGRPESVNISNMNALIDEDGKPYFKYVVEGANLFFTQQARLHLEKRKVVLFKDSSTNKGGVTSSSLEVLAGLALSTEEYTNLMIFKDGKPSTFYQNYVKDIQAIIVDNAAAEFQCLWKEHTRLGETKPRTQISDELSSTLNSLQAELEGSDLFDDEPSRRGVMRRAIPKTLVDEIGLDTLLKRLPDAYQRALFSSYVAAHFIYKYGVNASSVDFFHFAKDLAK

SEQ ID NO: 3077 - protein, 200 aa, Agaricus bisporus
  var. bisporus
  strain H97 / ATCC MYA-4626 / FGSC 10389
MATFSSTPIVIDGKGHLLGRLASIISKQILSGQKIVVVRCEEINVSGSFFRNKLRYHNFLHKRHIVNPKKSGPFHHRAPSKILYRAIRGMVPHKTPRGAAALERLKLFEGVPPPYDKKKRMVVPEALRVLRLKPGRKYCTVKRLSHEVGWGYKDVVDRLEDKRKLKAQAFHERKVAALKLRQKAVSDATPSFQQLAQLGY

SEQ ID NO: 3078 - protein, 250 aa, Agaricus bisporus
  var. bisporus
  strain H97 / ATCC MYA-4626 / FGSC 10389
MAPSTTVPSASAIEVPETLLKKRKQNEKAREERLAAAAAARKAQKAKRKVIFKRAESYVKEYLSKEKEEIRLKRAARASGDFYVPAQPKVYFVIRIRGINEIAPKPRKILQLLRLLQINNGIFVKVTRATQQMLRLIEPYVAYGEPNLKSIRELIYKRGYGKVNKQRIPLTNNGVIEESLGKFDILCVEDLVHEIATAGPNFKQASNFLWPFKLSNPTGGWRTRKFKHYVQGGDFGDRETSINKLIRQMN

SEQ ID NO: 3079 - protein, 371 aa, Agaricus bisporus
  var. bisporus
  strain H97 / ATCC MYA-4626 / FGSC 10389
MASRPTVSVHSSTGEASSSLPLPAVLTAPIRLDVVQQVHKSIAKNRRQAYAVAENAGHQTSAESWGTGRAVARIPRVGGGGTHRSGQAAFGNMCRGGRMFAPTKTWRRWHVRVNQNQRRFAVVSALAASALPSLVLARGHRIEEIQEVPLVIAADAESFTKTKEAVALLKTLKAYSDVVKVSNSRKLRAGVGKLRNRRHRQRRGPLVVYNEDKGIVKAFRNIPGVELINVRRLNLLQLAPGGHLGRFVIWTEGAFKALDDVFGTFDKASSYKKDYLLPTAKISNPDVTRLINSDEIQSVVRPANPKISKRPWTQKKNPLVNKAILFRLNPYAKTLRRQEILKQERLKKKNAKKPKQPKAAGKQFLDNLFAL

SEQ ID NO: 3080 - protein, 393 aa, Agaricus bisporus
  var. bisporus
  strain H97 / ATCC MYA-4626 / FGSC 10389
MATAATAGVIVPHLKTLADLSPAQIVGILARAHTLKKHGAAYLSPIGWPPREFISHRRPGPTLRNKSIALLFSKRSTRTRLAAETSATFLGGNAIFLGRDDIQLGVNESLRDSARVIGGMCAGIFARVDDHSEIEELAKYSPVPVLNALSSLWHPTQVLADLLTLHEKHRLFEKPLELARETPGIPPLSPLTVAYVGDSANVLHDMLVTYPRMGHKLRIASPEKYRAPSEVWDRVVQLGCDKDIVWTADPKEAVHNADVVVTDTWISMGQEAEKEERLQAFQGYQVTEALCKEGGAKENWKFLHCLPRKSHEVDDEVFYGPRSLVFDAADNRMWTIMALFDLLFARWSLSPERITAIQQAHNARTTTMQGKGQKSPLKPLIDILAVKTPNPSE

SEQ ID NO: 3081 - protein, 416 aa, Agaricus bisporus
  var. bisporus
  strain H97 / ATCC MYA-4626 / FGSC 10389
MAPIGSLYTVDAQSKGKMIRSVVALAGQEVELLPFEFGVTNKSSEFLSKFPLGKIPAYQHSNGFKLYEGNAIARYLAGLYPNTGLLGGTPEEAALVDQWMHVVETEADTYDTWISFLVRGLVPYNKPIELNFYERLERCLAVLESHISTRTFFVGERITLADLSVASVLSKAVAQTVDASRRPKYPNLMRHLDTIANQPKLKAVFGQVNYIDKAIQYTPPAKEKKEKAPAPPKAEKKPKQEEADEEEEPAVPAEPKVKNPLDDLPKSTFNLEDWKRAYSNKDTRGADGAIEWFYQNFDSTGFSVWRVDFKYNEELTLTFMSSNQITGYFNRLEASRKYLFGSVGVLGENNNSIISGTLILRGQDAEPVVNVAPDWESYEYKKLDLSKEEDKQFFEAALAWDLEVSGKKWADGKNFK

SEQ ID NO: 3082 - protein, 504 aa, Agaricus bisporus
  var. bisporus
  strain H97 / ATCC MYA-4626 / FGSC 10389
MSSSLMPRSDSYNARVRGASHIDFKTATTGVAAKAMRNELSGIVSTISDPPSRKAFDTEMQSFFYLFTRYLAERAKAVDLDWDCIKSPADDKIVPYAQLPKPKDVSNLNKLAVLKVNGGLGTSMGMTGAKSALEVKDDMTFLDLTVRQIEHLNTSSRVDVPLILMTSFNTHEDTLRIIKKYANQQLRITTFNQSRYPRIYKESLLPCPQRADDDKKHWYPPGHGDLYNALLHSGVLDQLLSEGKEYLFVSNSDNLGAVVDESILQHMIDTQAEFIMEVTDKTKADIKGGTLIDYEGSIRLLEIAQVPSEHVEDFKSVRKFKIFNTNNLWINLKALKRIMEVEGMELDIIINPKTTDDGHAVIQLETAAGAAIKHFKNAHGINVPRKRFLPVKSCSDLLLIKSDIYSLSHGQLVINENRMFETTPVIKLGDHFKKIQQFQRRFKKIPRIIELDHLTVTGDVYFGRNVTLRGTVIIVANEGQRIDIPDGCILENRLLSGNLSMIEL

SEQ ID NO: 3083 - protein, 546 aa, Agaricus bisporus
  var. bisporus
  strain H97 / ATCC MYA-4626 / FGSC 10389
MATAQLATFKIPPVSNEPMLSYAPGSPERAGLQAALAEMQSQLPFEVPCIINGQEVRTNNIQKQPMPHDHARHLCTFHEGSPELVEKAIAGALQAKDAWETMPWNDRAAIFLKAADLASGKYRYKLMAATMLGQGKNTWQAEIDAAAELADFFRFGVSYVEELYAQQPPKNAPGCWNRTEYRPLEGFVLAVSPFNFTAIGGNLPGSPALVGNVVVWKPAPAATYSNYLVFKILAEAGVPPGVIQFIPGGAEIVQAAIQSPNFASLHFTGSTNVFKSLWKDISSNLDKYKVYPRIVGETGGKNWHVIHKSAEVRNAVLQSVRGAFEYQGQKCSALSRLYVSRSVWENGFKTQYLEEIAKIKVGPCLDWNNYMGPVIGRRAYDNITGFIKKAKEEGGEVLIGGSGDDSKGFFIQPTVILTKDPRSTTMVGEIFGPVVTAYVFEDSDYEKTLELIDTTSIYGLTGAIFASERQALLTATNRLRNAAGNIYYNEKCTGAVVGQQPFGGARGSGTNDKAGSISIFYRFVSARSIKENFVGLEDFHYPSNLV

SEQ ID NO: 3084 - protein, 546 aa, Agaricus bisporus
  var. bisporus
  strain H97 / ATCC MYA-4626 / FGSC 10389
MKILHSTSLSSSTIMYPVDGIRSQIEWNTTLNVSDAPVPTETTKYHRKTAIIATIGPKINTVEKLTELRHAGVNIVRMNFSHGTHEYHQSVIDNTRQMIKNDPHGRPVAIALDTKGPEIRTGQTRDGNDYPIKAGDEFIVTTDPKYSDICDNKVLFVDYANLASVTAPGKLIYIDDGIISLLILSIDGMNLHVRALNNGTLSSRKGVNLPKTDVDLPPLSEKDKDDLRFGIRNGVDMIFASFIRRGEDVRQIREVLGPDGASIKIIVKIENEQGVANFDEILKEADGVMVARGDLGIEIPASQVFLAQKMMIAKCNIVGKPVIVATQMLESMTYNPRPTRAEVSDVANAVLDGSDCVMLSGETAKGSYPVQSVLMMAETCLLAETAICYPPLYDDLRAVQARPTETAETVAIAAVAAAAEQDAKALLVLSTSGETARLVSKYRPKIPIITVTRNEQTARQIHLHRGCYPFWYPEPRGVQNHQWQTDVDNRIRFGLRNALALNVIQPGASIIAVQGWKGGLGHTNTLRILTVPTDPADLELQPLGSL

SEQ ID NO: 3085 - protein, 576 aa, Agaricus bisporus
  var. bisporus
  strain H97 / ATCC MYA-4626 / FGSC 10389
MSDPISLIPIVGIPGEVKNRLDILDFVKDEKFFTLYVRALKILQDRDQSDYSSFFQLGAIHGVPHTEWAKARPQLNPFPGGYCTHGNVLFPTWHRAYESAWEQILWQAAGTVAEKFTTPNKEEWLQAARDLRQPYWDWGYWPNDPDFLSLPDEVVRHEEVEITDFDGTRIKVENPIRRYKFHPIDPSFEGDFAQWPTSVRYPNAQKQENTEGMIAGMKAAAPGIRERTFNTLTKNYTWEHFSNHGAIYGTNANSLEMVHNTMHLLMGRDPTLDPLITGHMGSVPHGAYEPVFWMHHCNCDRLFALWQAMNYDVYVSEGMSYEATINYLPGQVLSEDSPLEPFYTKNQDPWQSDDLENWEVLGFSYPDFDAVKGKSKEERRKYISDLVRRRYGFVTTQTENPALRLLSSFQSAQSGHETQYALYDWVIHAKFRYYEINESFSIIFYFDEGEGCTLNSIIGTVDAFRGTTSETCSNCARNQELIAEGFVHLNYYIGNDIGKHVDRKADAVPIYEPAKVTEYLKKRKISCKVLSTGAKLPSLTVEIKGSPYYLPAGETRPQVDKEKPTVVLNDIIRVIT

SEQ ID NO: 3086 - protein, 765 aa, Agaricus bisporus
  var. bisporus
  strain H97 / ATCC MYA-4626 / FGSC 10389
MVLSSVLGFPRIGANREIKKAVEAYWAGKTSAEDLQKVAAEVRKTSWTSVKNHRVDFVPSGEFSLYDHVLDHSAAFNVIPQRYVGLGLTPLDVYFAMGRGRQSEGVDVPASEMKKWFDSNYHYVVPELSEETDLKLIYNKALEEFKEAKEAGITTRPVVLGPVSFLVLGKSAKSAQPGFRPISLLPKLIPVYKQLLSELKAAGAEWVQIDEPILALDSAAALEKEYTASFTELAPVSPKIMLTTYFSRLDSNVRFIAKLPVAGLHIDLDRAPDQLTEVANAVKNTPIVLSLGLVSGRNIWKTDFGAAIKLAQTAIDILGAGRVIVATSSSLLHTPVTLASENKLTAEQKDWFSFALEKAEEVAVIAAVLSGSQDASVTAALEANRVSINKRREFEKNSDDTVRKRVAAITPDQLNRKSPFPVRKETQAKHLNLPKFPTTTIGSFPQTKEIRQARAKFNKGELTKEEYETFIKKEIEHVVRFQESIDLDILVHGEPERNDMVQYFGELLNGFVFTQNAWVQSYGSRYVRPPIIVSDVSRPGPMTVKWSSYAQSLTKKPMKGMLTGPVTILNWSFPRADISREMQSKQLALALRDEVIDLENAGIHAIQVDEPAIREGLPLRRADWDGYLEWAVDSFKLATAGVTDQLQTHSHFCYSDFDDIFPSIQRLDADVISIEASKSDMKLLNTFKHYGYSNQIGPGVYDIHSPRVPGDQEIKDRLQAMLSILPDSLVFVNPDCGLKTRGWKETEASLKNLVAGAKWARQNYA

SEQ ID NO: 3087 - protein, 151 aa, Agaricus bisporus
  var. bisporus
  strain H97 / ATCC MYA-4626 / FGSC 10389
MSNTERTYIMIKPDGVQRGLVGKIIARFEERGFKIVALKMAHPTEDHLRKHYADLANKPFFPGLVKYMASGPVIAIVFEGLDAVKTGRAMLGATNPLASPIGSIRGDFALAVGRNICHGSDSVESANKEIDLWFPEGITSWKSVYEGWLYE

SEQ ID NO: 3088 - protein, 156 aa, Agaricus bisporus
  var. bisporus
  strain H97 / ATCC MYA-4626 / FGSC 10389
MSLVVPDQHQQFQHILRLLNTNVDGKRKVMYALTEIKGVGRRYSNIVCKKADVDLNKRAGDLNSDELERIVTIIQNPTQFKIPTWFLNRQKDIVDGKNSQILSNGVDSKLRDDLERLKKIRAHRGLRHFWGLRVRGQHTKTTGRRGKTVGVSKKRG

SEQ ID NO: 3089 - protein, 190 aa, Agaricus bisporus
  var. bisporus
  strain H97 / ATCC MYA-4626 / FGSC 10389
MRDILKTEELEIPEGVEVTINSRLITVTGPRGTLKKNVRHVDMDIRLLKGKTTRVSLAVWQGGRKHVACLRTIRSLINNMVTGVTKGFQYRMRAVYAHFPINCIIQDDGKSLEIRNFLGEKTVRHVNMLNGVIVSESKTQKDELILEGNDVDNVSQSAASIQGICRVRNKDIRKFLDGIYVSDKGTIDKD

SEQ ID NO: 3090 - protein, 216 aa, Agaricus bisporus
  var. bisporus
  strain H97 / ATCC MYA-4626 / FGSC 10389
MGRRPARCYRYCKNKPYPKSRYNRGVPDPKIRIFDLGRKRASVDEFPFCCHLVSDEYEQLSSEALEAARICANKYVTKTSGKDSFHLRVRVHPFHVIRINKMLSCAGADRLQTGMRGAWGKPYGTVARVNIGQIILSIRCKETNSQVIIEALRRARYKFPGRQKIIVSKKWGFTNVDKAEYTRLKEEKKVLQDGAYVQFIRPRGNLEKNLRNQLRA

SEQ ID NO: 3091 - protein, 262 aa, Agaricus bisporus
  var. bisporus
  strain H97 / ATCC MYA-4626 / FGSC 10389
MQMTTEVREDAVYLAKLAEQAERYEEMVENMKRVASSDQELTVEERNLLSVAYKNVIGARRASWRIVSSIEQKEETKGNETQVRMIKSYREKIEGELADICEDILDVLDKHLIPSAATGESKVFYHKMMGDYHRYLAEFATGDKRKDSADKSLEAYKAASDVAVTELPPTHPIRLGLALNFSVFYYEILNSPDRACHLAKQAFDDAIAELDTLSEESYKDSTLIMQLLRDNLTLWTSDMQEAESATAENKETEATDAQPTDD

SEQ ID NO: 3092 - protein, 268 aa, Agaricus bisporus
  var. bisporus
  strain H97 / ATCC MYA-4626 / FGSC 10389
MPPKAKPGTGKKPAAAPFGASKKTQVKKNPLFEAAPKNFGIGQDIRPKTDMTRFVKWPEYVRLQRQKVILNQRLKVPPAIAQFAHTLDKNTATQLFKLFNKYRPESKQEKKERLRAAAAATAEGKTVETKKPLFVKYGLNHIVALIEAKKASLVAIAHDVEPIELVVFLPALCRKMGVPYVIVKGKARLGTVVHKKTAAVAAIQDVKSEDQRELATLVSAAKANFTDKYDEQRRQWGGGIRGYKSTQMLRKRAKAAGQNPAAASLGKL

SEQ ID NO: 3093 - protein, 351 aa, Agaricus bisporus
  var. bisporus
  strain H97 / ATCC MYA-4626 / FGSC 10389
MAGLDSRQSDIHSYRQSTQWSRLSFLVLLVASVNLSLLLKCNPLVTELGLYDIVNTPGVAADLAHISTPAKVEGNLPDNDGLSKTLKGADVVVIPAGVPRKPGMTRDDLFKINAGIVRDLATGIATYSPKAFVLVISNPVNSTVPIVAEVLKKHGVYDPKRLFGVTTLDVVRSSTFVAEKHGNLSLATEVVVPVVGGHSGVTIVPLLSQSSHPLPNLSTTEYEALVKRIQFGGDEVVQAKGGAGSATLSMAYAGAEFANKVIKAFKGEKGLIAPSYVSSEADREGAALLTKELGKEVAYFSSNIELGPGGIAKINPLGKITDAERNLVKAAIPELEKNISSGVTFVVEARL

SEQ ID NO: 3094 - protein, 430 aa, Agaricus bisporus
  var. bisporus
  strain H97 / ATCC MYA-4626 / FGSC 10389
MSYKVADISLAAFGRKEIEIAENEMPGLMHVREKYRAQQPLKGARIAGCLHMTIQTAVLIETLTALGAEVAWSSCNIYSTQNHAAAAIAVTGVPVYAWKGETEEEYTWCIDQTLAAFKGGKPLNLILDDGGDLTRHVHDKYPQYLKDIRGLSEETTTGVHHLYKAFRDGSLKVPAINVNDSVTKSKFDNHYGCRESLVDGIKRATDVMLAGKVAVVAGYGDVGKGCSEALRGFGARVVITEIDPINALQAAMAGYEVTTMDEIASRGNVFVTTTGNRDIITGKHFNVMPEDAIVCNIGHFDVEIDVAWLKENAKSVSNIKPQVDRYTMANGRHIILLADGRLVNLGCANGHPSFVMSCSFTNQVLAQIALWTTPEKFPLGVHLLPKELDEEVARAHLGQLNVKLTELTETQSKYLDIPTNGPYKPSHYRY

SEQ ID NO: 3095 - protein, 576 aa, Agaricus bisporus
  var. bisporus
  strain H97 / ATCC MYA-4626 / FGSC 10389
MSDKISLIPLVGIPGEIKNRLNILDFVKNDKFFTLYVRALQILQARDQSDYSSFFQLGGIHGLPYTEWAKAQPQLHLYKANYCTHGTVLFPTWHRAYESTWEQTLWEAAGTVAQRFTTSDQAEWIQAAKDLRQPFWDWGYWPNDPDFIGLPDQVIRDKQVEITDYNGTKIEVENPILHYKFHPIEPTFEGDFAQWQTTMRYPDVQKQENIEGMIAGIKAAAPGFREWTFNMLTKNYTWELFSNHGVVVGAHANSLEMVHNTVHFLIGRDPTLDPLVPGHMGSVPHAAFDPIFWMHHCNVDRLLALWQTMNYDVYVSEGMNREATMGLIPGQVLTEDSPLEPFYTKNQDPWQSDDLEDWETLGFSYPDFDPVRGKSKEEKSVYINDWVHKHYGFVTTQTENPALRLLSSFQRAKSDHETQYALYDWVIHATFRYYELNNSFSIIFYFDEGEGCTLESIIGTVDAFRGTTSENCANCARSQDLIAEGFVHLNYYIGCDIGQHADHEDDAVPLYEPTRVKEYLKKRKIGCKVVSAEGELTSLVVEIKGAPYYLPVGEARPKLDHEKPIVILDDIIHRVN

SEQ ID NO: 3096 - protein, 685 aa, Agaricus bisporus
  var. bisporus
  strain H97 / ATCC MYA-4626 / FGSC 10389
MAFTQTKTDDVAIATIRTLAADTVSKANSGHPGAPMGMAPVAHVLFSRFMNANPKSSRWFNRDRFVLSNGHACALQYVLLHLLGYKLSLDDLKGFRQVDSKTPGHPEVGHTDGIEVTTGPLGQGFSNAVGLAMAQAHLAAVYNKEGFDLINNYTYAFAGDGCLMEGVASEAASVAGHLKLRNLIVIYDDNHISIDGDTAVAFTENVPQRFEAYGWQVLHVDDGDSDLTGIYNAIAEARKSTDKPTIIRLRTTIGYGSKLQGSHSVHGAPLKADDIVQLKERFNFPTDKQFYVPQETYDAYAEVGRRGAALEQQWNALLASYQQKYPKEHAELVRRIDGKLPEGWEKSLPVYTTADAAQASRKLSEIALTSISSVLPELLGGSADLTGSNLTKVKGSVDFQHPSTGLGTYAGTYIRYGVREHGMGAIANGLHAYGGIIPFVGTFMNFVSYAAGAVRLAALSGHQVIWVATHDSIGLGEDGPTHQPIETYIHFRATPNIAFWRPADGNETSAAYYSAITSRGTPSILSLSRQNLPNLEGSTIQNALRGGYVLVEEQNEALTIVSTGSEVNIAVDAAKKLKAEGIKTRVVSLPCWLTFDQQDQEYRLSVLRSGAPILSLEAASPTGWQKYSHEQFGLNGWGASGPYLKVYEKFGITGSNIAAVGKKIVEFYTSNSIPTVSPLLKAVQH

SEQ ID NO: 3097 - protein, 159 aa, Agaricus bisporus
  var. bisporus
  strain H97 / ATCC MYA-4626 / FGSC 10389
MQIFVKTLTGKTITLEVESSDTIDNVKAKIQDKEGIPPDQQRLIFAGKQLEDGRTLSDYNIQKESTLHLVLRLRGGAKKRKKKTYTTPKKIKHKRKKVKMSILKYYKVDSDGKIKRLRRECPSAQCGAGIFMAFHQDRQYCGKCGLTYTFAPGSKPPAV

SEQ ID NO: 3098 - protein, 189 aa, Agaricus bisporus
  var. bisporus
  strain H97 / ATCC MYA-4626 / FGSC 10389
MADPKSKPPTNPMKEPRIDKLVINISVGESGDRLTRASKVLEQLTGQTPVTSKARYTVRTFGIRRNEKIACHVTIRGPKAEEILERGLKVKEYELRRKNFSDTGNFGFGIQEHIDLGARYDPGIGIFGMDFYIVMGRPGARVARRRAKKNRIGFTHRIKKEDTMAWFKQRFDGIILVCGHQILLSTVAH

SEQ ID NO: 3099 - protein, 191 aa, Agaricus bisporus
  var. bisporus
  strain H97 / ATCC MYA-4626 / FGSC 10389
MPRAPRNHSKTYKIPRRPYEAPRLDAELKLAGEYGLRNKCEIWRIALTLSNIRRAARELLKLDPKDPKRLFEGNALIRRLVRIGVLDESRMRLDYVLALKIEDFLERRLQTQVFKSGLAKSIHHARVLIKQRHIRVGKQIVDVPSFVVRLDSQKHIDFALTSPYGGGRPGRVKRKRAAAAAKGGEDAEEEE

SEQ ID NO: 3100 - protein, 217 aa, Agaricus bisporus
  var. bisporus
  strain H97 / ATCC MYA-4626 / FGSC 10389
MVLKLYGTNISPPSRYAGLVLLEMKVPFELVNVDLGKKEQKSPENLANQPFGQIPYIVEDDGFILYESRAIARYIATKYANQGPKLIPTGDLKKIAKFEQATFAESAHFNDPAFSLLLEIFVKKMQGLTPDEARVTELKTTLLSKMDVYEQILSKQKYIAGDEITLVDLAHLPLASVMPDIGIDITTGRPHLTKWLNELLQRESWQTLKANGLVSTA

SEQ ID NO: 3101 - protein, 238 aa, Agaricus bisporus
  var. bisporus
  strain H97 / ATCC MYA-4626 / FGSC 10389
MKFNIANPATGAQKLIDTDDEKRIRIFYDKKISQEIPGDGLGDEWKGYIFRITGGNDKQGFPMKQGVLLPYRVRLLLSDGQSCYRIRRTGERRRKSVRGCIIGPDIAVISLVIVKQGDSEIPGLTDTVLPKRLGPKRATKIRKFFNLSKEDDVTKYVVRREVKSQKKENAKPYTKAPKIQRLVTPLRLQRRRHLRSLKRRKLEHQKEQKAEFDVIVAKRLAEKKAKVAAVKASHKTTA

SEQ ID NO: 3102 - protein, 242 aa, Agaricus bisporus
  var. bisporus
  strain H97 / ATCC MYA-4626 / FGSC 10389
MARSKELVPGVGRLSRSQVFTKRGLYKGIKKSDKPAGEEPAATKEKAVGGAKNGEKRVIPTVKAPRYYPTEDVRQPKKSRKSHNPPGLRSSITPGTVLILLAGRFRGKRVVFLKQLESGLLLVTGPYKANGVPLRRVNQAYVIATSTKLELPGFTVEHQVDEKINDAYFAKTSTKGARSAEEEFFEDGKPKAKETFPATKAADQKQVDSAILDAVKKTPDLVKYLKSTWGLSKGQYPHQLMF

SEQ ID NO: 3103 - protein, 312 aa, Agaricus bisporus
  var. bisporus
  strain H97 / ATCC MYA-4626 / FGSC 10389
MAEAKRVKTPKDFAIDFMMGGVSAAVAKTSAAPIERIKLLVQNQDEMIKQGRLATPYKGVSDAFTRTYKEEGLVSLWRGNTANVIRYFPTQALNFAFKDYFKSLFGFKKSEGYWKWFAGNVASGGAAGASSLLFVYSLDYARTRLANDAKSAKGGGARQFNGLVDVYRKTLASDGIAGLYRGFIPSVVGIIVYRGLYFGVYDSLKPVVLVGALEGSFLASFGLGWGVTIGAGLASYPLDTIRRRMMMTSGSGQNYKSMFDAGSQILAKEGTKSLFKGAGANILRGVAGAGVLSLYDKLQQVMFGKVYSGGSG

SEQ ID NO: 3104 - protein, 396 aa, Agaricus bisporus
  var. bisporus
  strain H97 / ATCC MYA-4626 / FGSC 10389
MAEVETTPTSAAADKKPSVSTLETDLTKYKVAADIVRDVIKKIIESTVEGAKLIDLCVEGDKLLEQGTGAVYNKPVKGVKVTKGIAFPTSISVNNAVAHFSPLASDPQSSQTISKGDVVKIQLGAHIDGFAAITAETIVVGASVDNPVTGRQADVIKAAWTAAEVAMRLVKVGNKNWAVTEGVAKAASAWDCKPVEGMLSCQQTQNVIDGKKRVILNPSEAQRKEFETATFAEGEVYGIDILISSGEDGKARVEESRTTIYQRDSAVTYQLKMKNSRMVFTEVQKKAGSFPFNIRILEDEKRARMGLQEAVQHSLVKPYEVIYTPNNTFVAGFHFTIALLPGGPALITHPPHWYKPELVKTEKELEDEELKGLVARNLRPSKKKGKKAGETEAKAE

SEQ ID NO: 3105 - protein, 471 aa, Agaricus bisporus
  var. bisporus
  strain H97 / ATCC MYA-4626 / FGSC 10389
MPPIFDKPTTDKYDYVVIGGGSGGSATARRAALYGKKVAVVETDPYLGGTCVNVGCVPKKIMWHAADLQDRLNHHYPGYKFNGIANAQFDWATFKPQRDAYIHRLNGIYARNFEKEGVEFHHGTARLTSPTSVEVKRGDGSTYTLNGDRITICVGGRPNSPSEKQIPGASKGIDSDGFFGLNEQPKRVAVVGAGYIAVELAGVLNALGSETHLIIRGESVLRTFDPMIQETLTPWMEKTGIKIHKSSQVTSVEGEKGQTLTVKTNKGEQIDVDVVLWAIGRSANTEGLGLEELGIKLDKKGDIVVDEYQNTNVKNVYAIGDVAGKWLLTPVAIAAGRRLSNRLFGPPEYKDEKQSYENIPTVVFAHPPIGTVGLTEPQARQKHGDAVKIYTSSFKSLYFSMVEEEHKEPTVYKLIVVGPEERIVGIHMIGQGSDEAMQGFGVAVKMGACKKDLDDTVAIHPTSAEELVTLR

SEQ ID NO: 3106 - protein, 797 aa, Agaricus bisporus
  var. bisporus
  strain H97 / ATCC MYA-4626 / FGSC 10389
MAVVGVDFGTLHSKIGVARHRGIDIIANEVSNRATPSLVAFGPKQRSIGESAKTQETSNFKNTIGGLNRLIGRTFDDPQVQNVEKNFTHAALVDLNGTIGVEVNYLGERQQFSFTQLVGAYLGKLRDITANELKTGVTDIVIAVPGYYTEIQRRAILDAAAIANLNVLRIINDTTATALGYGITKSDLPDPENPRHIAFVDVGHSTFSVAIVAFAKGQLTIKSTAYNHNLGGRDIDYVLLKHFAEEFKTKYKIDVLANPKAIFRLAVGCEKLKKILSANAEGPLNIESIMNDVDASSKMSRDQLEALIPSLLDGIDGPIKQALAESGLTVDQIDSVELVGGSSRIPSVRTRISQAFNNKPLSVTLNQDEAVARGATFACAMLSPVFRVRDFHIHDINHYPVQVQWQAVPTDPDEDTEILLFPQGNAIPSTKILSFYRRQAFHVDAAYKDPSGLPGGIKPVIGGFDVTDVPPDPKGDSTIVKVKARLNLHGIVSFENTYVEEIEEREVEPAPMDVDQQQNATATSSGAAEGEAAPPVPPKKKKIVKKKEVPFFTTTSSLDKKTLEQLRERESEMHAADKLVQDTEDRKNALEEYIYDTRGKLDDRYAAFVTADEKSKLLQELSAAEDWLYTEEGEESTKSVYVSRLDALKTLGDPITFRYRETEDRQKSVAALRETLNNYMNQATSNDEKYAHIDGKDKESIVERVAVIQKWLDDMSVRQAERRKDVDPVLTSEQVTKKRDEIIFFATPILTKPKPKMPTGTGTDSGTGTPRRDGTPQPPPPQKNEQEGGKDASMDVD

SEQ ID NO: 3107 - protein, 931 aa, Agaricus bisporus
  var. bisporus
  strain H97 / ATCC MYA-4626 / FGSC 10389
MAEINEAKSASTESFVTALVFNAIVFGVEIGVFTLIRPYFKAIYEPRTYAPAPSERSEPLSRNIFLWPVALWRADFRSIKHANGMDAYCFVRFLRMMVKVFLPIWIISWIVLLPTTAVGTSNPGKDNLDKLTFGNVSPDQYKRYAAHLILAWFFTFWVLYNIVHEMRHFITARQQHIIEPNHAKSLQANTILVTGIPDRYLNRRSLLDLFDELPGGVKKIWINRNLKELPEIYSRRLSACNKLESAETALLRTAAKIRQREEKKKSKASKKTVPVSKEHTHTHSEDLETAAIVVPHGQRPTHRLGFLPFTGKKVDTIDWAREEIVTCNRLLEEGCAAIRADDEASNEVQNPGEFSSDASSAKLSTFLLSLSTSICNNFPAVGLKPVAAIKNTTTAIKARFAGYGDSKYPPFNSAFVTFHKQIAAHLAVRVLTHHEPYSMTNKYNEVSPQDVIWANLNMNPYEQKIRMAISYAITAALIIFWVIPVGRRALSNVPSLCNQFSWLAWICGLPPVIVGIISGVLPPVLLAILMALLPIVLRLLARFEGIPKYTGLELSLMTRFFIFQVVHSFLIVTVTSGIVAALEGLVESPTSTPNILANELPKASTFFLTYIILQGLAGSGSGFLQIVRLVIYYVKLIVLGSTPRSVYNIKYVLGNVAWGTLFPTITLLTVISLAYSIISPVINGLACATFFAFYQLYKYLFLWVYEQNPSGDTGGLFFPKAIQHVFVGLYIEEICLCALFFLARDPNDNASAVIEGALMIVLIVLTAGFHAIFNNSYDPLLQALPLSLKDKTYSPATGMTEGRNPRKSEAGNDNHEIVEEMRGIEGDDEDDVSSKHKGKRPENEKVGQVGEGTAARHTREDAEFGFAHPAISRPQRTLWIPRDTLGLGEGEVAACEDMGLNASMSGAVMNEKGKVDVPTADDVPGEIVVRL

SEQ ID NO: 3108 - protein, 159 aa, Agaricus bisporus; identical to SEQ ID NO: 504
  var. bisporus
  strain H97 / ATCC MYA-4626 / FGSC 10389

SEQ ID NO: 3109 - protein, 156 aa, Agaricus bisporus
  var. bisporus
  strain H97 / ATCC MYA-4626 / FGSC 10389
MPGVRDISADAFIAAYASYLKKSGKLEVPPWVDIVKTGAYKELAPYDADWYYIRSAAVARHIYLRKDVGIGALTKLHGGRKRRGNRPSHHAASSSNVQRKVCQSLEKIGVLEKSDNGGRRITESGQRDLDQIATQVFDQTKEDDDEEEEEEEEEEE

SEQ ID NO: 3110 - protein, 201 aa, Agaricus bisporus
  var. bisporus
  strain H97 / ATCC MYA-4626 / FGSC 10389
MGAYKYIGELYKKKQSDVLRFITRVRCWEYRQLHVIHRASRPSRPDKARRLGYKAKQGYVIYRIRVRRGNRKKPVPKGATYGKPVRQGVNHLKPQRSHRTVAEERVGRRCGNLRVVNSYWVNQDGVYKYYEVILVDPNHKAIRRDPRINWIVNPVHKRREARGLTSSGKQNRGLGKGHRHNHNPGYSVWKKHNTLSLRRYR

SEQ ID NO: 3111 - protein, 325 aa, Agaricus bisporus
  var. bisporus
  strain H97 / ATCC MYA-4626 / FGSC 10389
MSFGKTITLSNGAKMPRIGLGTWQSKPHEVENAVEIAVRNGYRHLDLAMIYQNQDEVGRALKKVIPSVVKREELFITSKLWNNAHQPDQVENQLDETLKQLGLDYLDLYLIHWPVAFPPGNGFFPPHSSLKDEVELDTETSLVDTWKAMLALPKSKVRAVGVSNFTVEHLKGIFDATGVHPVANQIEAHPLLQQPELVKYCQEHNIHITAYSPLGNNSEGKPMHTENPVVVEIAKRLNATPAQVLIAWGARRGQSVIPKSVHEDRIISNFKEVEITDDDFARMNKIGEGDLWHRYNIPFFYNPCWSISTFSEDREKGARVPVKIN

SEQ ID NO: 3112 - protein, 481 aa, Agaricus bisporus
  var. bisporus
  strain H97 / ATCC MYA-4626 / FGSC 10389
MSAHHGESTLRPEPDKVLQDIANYVHGYKIDSPLAFETARLCLIDTIGCGLEALRFPECTKLLGPVVEGTIVPNGTRVPGTSHQLDPIRGAFNIGTQIRWLDYNDCFLAAEWGHPSDNLGAILAVADHLARQGQPLTVHDILEAMIKAHEIQGGLALLNSYNRVGLDHVVLVKVASTAVVSKLLGLDRDQTVDAISQAWVDGQSLRTYRHAPNTGPRKSWAAGDACSRAVNLALLVKKGEKGLPSVLTAKTWGFYDVLFKGKAFEFQRPYGSYIMENVLFKISYPAEFHAQTAVEAAHTVHNKLKVIGRTSDDIKSVRIRTQEAAIRIIDKQGPLDNFADRDHAINYMVAYPLIFGELTSESYTDASAADPRIDALRAKIHCVEDSRFSVEYHDPEKRSIGNALLVELNDGTILDEVEVEYPVGHKRRRAEGTPLLINKFKRHISYHFDDARQKKILDTVSDAQNLAKMPVDKFTDLFVKA

SEQ ID NO: 3113 - protein, 478 aa, Agaricus bisporus
  var. bisporus
  strain H97 / ATCC MYA-4626 / FGSC 10389
MPQITSGATAQSAFATQPTEKDPYRYQVGFGNSFASEALPGVLPEGQNSPQKNKYGLYNEGMTGASFVAPRAENRLAWLYRIRPSVAHQGFTRLPDNPDLESNFLPTNKNVHVSPTQLAWLPFKLPADSEKVDWVDGLKTIAGNGDPTLREGLAVHMYLANKSMDKRAFCNGDGDMLILPQQGRLDIQTEFGKMMVRPGELCVIQRGMKFKVILPDGPSRGYIQEIYGTHFELPELGALGGNGLANRRDFETPVACFDIDQSSWEIVYKVSGQLHACHQEHTPFDVVAWHGNYVPYKYAMEKFIFVGSISKDHIDPSCFCVLTAKSKHNNAPLVDFLILGERWDVATNTFRPPYYHRNSSTEFMGLIHGVYGGRSDGFQPGGASFETGFCPHGVSYDVWKAASEHPLTPEIVHKGVLAFMFESSMPFTITEYAMNRCGTKHEHEPQMWDNLKAHFMNHLDEINADLKAAKLPLLGSNR

SEQ ID NO: 3114 - protein, 678 aa, Agaricus bisporus
  var. bisporus
  strain H97 / ATCC MYA-4626 / FGSC 10389
MSLTPPQSPLQWDHAAQDISRLTQQAIDADRALQDKVAALDPKNCTFESVFVELAFAETKLDAITEPLAFYQNVSPSKELRDASNEAEALVRDYGVESSMRVDVYKAKVAARDNLKKSGQRDKLSSEEQRLVDKMILDGTRAGLALDETSRVKLVELKKELSKTCLDFSKNFNEENGVVTFTLEELKGVPEDVVSGFTKRTENGKDVYDVTYKTPDIFPLFKFAENPNTRQRAQEGYESRLAINVPLLDRAIELRRQISGILGYDTWADFITEVKMIKSGNGIKDFLDDLENKLRPVGMKERETLLAMKKKEHEQKGYPFDGEFYIWDYRYYDRKYIEETLDLDDMLVKEYFPVSVVVPTILQIYQDMLSVKFIEIETSTWHPDVQKFAVWEKGAKDESGFIGYCYLDLFPRTAKYSHAAVWPILPGYDKADGKRSYPTTAMVANLAKPTPDKPALMRHDDVVTFFHEMGHVFHGLLSQTKFARFHGTSVARDFVEAPSQMLENWCWEPKVLERMSSHYEKKEPLAKDLIEKIIKSRYVNVGLFYLRQLFFAKYDYKVHTDKESSDYTRLWNDLREKISLVKYKVAAPGQGTFGHITGGYDAGYYGYTYSLVFASDMYATVFKGDPLDPKHGSHYRQEILLPGGSREELDSLKAFLGRPPNSDAFLKELFGDNPTSNL

SEQ ID NO: 3115 - protein, 701 aa, Agaricus bisporus
  var. bisporus
  strain H97 / ATCC MYA-4626 / FGSC 10389
MSAPESFGFQAEISQLLDLIINTFYSNKEIFLREIISNSSDALDKIRYASLTDPSALDSERDLYIRITPDKENKILTIRDTGIGMTKADLVNNLGTIAKSGTKGFMEALNAGADISMIGQFGVGFYSAYLVAERVQVISKHNDDEQYIWESAAGGTFTIALDTVNPPLGRGSEVRLYLKEDQYEYLEEKRIKDIVKKHSEFISYPIQLAVTKEVEKEVEDEEEVKEEDGEKSKIEEVDEEEENGEKKKKKTIKEKEVTNEELNKTKPIWTRNPQEITTEEYASFYKSLTNDWEDHLAVKHFSVEGQLEFKAILFIPKRAPFDLFESKKKRNNIKLYVRRVFIMDDCDELIPEYLNFVKGIVDSEDLPLNISRETLQQNKILKVIRKNIVKKTLDLITEISEDKDNFAKFYEAFGKNLKLGIHEDAQNRSKLAEFLRFYSTKALDDQISLKDYITRMPEVQKSIYYLTGESLAATKDSPFLEVLKRKGFEVLLLVDPIDEYAITQLKEFDGKKLVCVSKEGLELEETEEEKASREAEVKEYTELCSTVKDALGDRVEKVVVSNRITDSPCVLVTGQFGWSSNMERIMKAQALRDSSMSSYMASKKTLELNPNNAIVKELKNKVMEDKADKSVRDLTFLLFETALLTSGFSLDDPTSFAKRIYRMISLGLDVDEDEVPPALESTTAAPAAEATASASAMEEID

SEQ ID NO: 3116 - protein, 737 aa, Agaricus bisporus
  var. bisporus
  strain H97 / ATCC MYA-4626 / FGSC 10389
MAHTAHPFSSVPSAAVRRRLSSSVSAKKPLVTATFSSLTPMWAGVAGVIINNNTEFEVAVSVHDSVYSTDFASVVLPYDPNDPEKNAKTIEQYILQVLRRFSVEHLCKFLGAGVTLTLLREVPNVCTRLWLDLDIVPFVFNIKQYHTDSLTRPNIKHRISSTTGSYVPSGAETPTVYVDSAHLKAMSGLQTGVSGRLPIQRTLDEQADSAARKCLMNFGPGNNPRLNIGPRNQVLVDDGGRVHLLDDLDEYRNTVGPRTWNAVIKLADELREKKVKIGFFSSTPQGGGVALMRHALIRFLTALDVDAAWYVPNPSPAVFRTTKNNHNILQGVAAPDLRLTEEARDAFDAWILKNGLRWTAEGGPLARGGVDVAFIDDPQMPGLIPLIKKIRPELPIVYRSHIEIRSDLVHVPGSPQEEVWKYLWKNIQLADLFISHPVSKFVPQDVPLEKVALLGAATDWLDGLNKDLDPWDSQYYMGEFRALCARERMLELRWPQRDYIIQVARFDPSKGIPNVIDSYVKFRELLKLKSPELDDEDHPQLLVCGHGAVDDPDASIIYDQIMQIINSEQYEAYAKDIVVMRLPPSDQLLNSLMSNAKIALQLSTREGFEVKVSEALHTGKPVIASRTGGIPLQIEHGKSGYLCTPGDNEAVAGHLYDLYTDEILYKTMSDYAKTHVSDEVGTVGNTAAWLYLAVMYNRGIKIKPNGAWLNDLLRTETGEDYEEGEPRLPRGGLKMQG

SEQ ID NO: 3117 - protein, 767 aa, Agaricus bisporus
  var. bisporus
  strain H97 / ATCC MYA-4626 / FGSC 10389
MAAGVATAATRIGDTKVAMSAFEKDSFINYQRIEDNLAVVRNRLKRPLTLSEKVVYGHLDDPHGQDINRGVSYLKLRPDRVACHDATAQMALLQFMSVSMDTAAAPTTIHCDHLIEAQIGGVKDLQRAVQTNKEVYDFLATVTAKYGLGFWKPGSGIIHQILLEHYAFPGGMMVGTDSHSPNAGGLGMVACGVGGADAVDVMAGIPWELKCPKVIGVNLTGKIGGWTTPKDVILKVAGILTVKGGTGAIVEYKGPGVESLSCTGMATICNMGAEIGATTSLFPFNRRMADYLQATKRSDVANYAKAFAHNLQADEAAEYDEHIEINLSELEPHINGPFTPDLATPISKFASEAKKNGWPEEVKVGLIGSCTNSSYEDMTRSASIVKQAADRGIDFKSKFTVTPGSEQVRATIARDGLIDSFESAGAIVLANACGPCIGQWDRQDVKKGEVNSIVTSYNRNFTGRNDANPATHAFVASPDITTALAFAGRLSFNPLTDELIGSDGKPFKFSDPSGNELPPRGYDPGEDTFQPPPQDRASVQVAIDPKSDRLQVLTPFKPWDGKTPSDLPVLIKVKGKCTTDHISAGGPWLKYRGHLENISQNCLIGAINAENGEANKIKNQITGEYDGVPQTAAYYRERGIKWVVIGDHNYGEGSSREHAALEPRFLGGLAIVARSFARIHETNLKKQGMLALTFIDPADYDKVRPDDKVDILGLEAFSPGRNLTLVAKHTDGTQDEISLAHSFNEGQIEWFKAGSALNLIAAKAKSA

SEQ ID NO: 3118 - protein, 867 aa, Agaricus bisporus
  var. bisporus
  strain H97 / ATCC MYA-4626 / FGSC 10389
MVTTGNKFAVSRSLEDWSFTQVGGGQGTKDGEWLKVSNFPTTVHVELLKLGRIPDPFIGLHEWDVQWVGEAEWAFRINFDVTREELDFPHLDLVFGGLDTFAAVTLNGHDILKTSNQFIEHRVAVKDRLTIGLNELVIHFESAFLKGRDTEKQHGKFNLWNGDSSRLHVRKAQYNYGWDWGPILMTVGPWKPITFEAYTNRIVDVDIRARVNEDLSVNLSADVTFAEKKSGFMVFSLSGPDGAATASISPTATDSGQAKVSLAFPPGKLSLWYPIGYGKQSLYTASIKFTDEHGDVVDSKTQTIGFRRVRIVEKKLVDQEGLTFLFEINNIRIFCGGSNWIPADSFLTAVTPKRYRDWLQLAVDGNQNMIRVWGGGIYEHDSFYESCDGKSHLLAMWISFLVWQDFMFGCGQYPAYDSFVESVREEAVQNVKRLRHHPSVVIYDYQLAESLNLELDYADETSDFRDTNFPARYIYERVLPEVVQALTDTYYHRASPYSGHGKVTTDPKFGDIHQWNVWHGSQEPWHNWDILAGRFVSEFGMQGYPNVRTVDNWLGGDVSERFPQSRVCNNHNKADGFERRLELYLVENFRHAFDMESYIFYTQVMQAETLASAYRLWRRNWRGPGREYTAGALVWQLNDCWPVTSWAIVDYFLRPKPAYFAIARELRPYTVGMTRKEYQKFDDDRTAAFFKIETVLEIWGTNSTLEEKKARLELTAFDLHSDWIEGWTKEVVLAPNSSTEIYKGGAPGLPVRTKKSEAARTVIFSARLLGDNEDVLGRYSNWPEPFKFVKFPSVKDVGLGITVGRDGETVTLSALKPIKGIVLDVDGEDVKWSDQAIDLAPGDPQIIRAVGLKGREVKARFLGDGTA

SEQ ID NO: 3119 - protein, 162 aa, Agaricus bisporus
  var. bisporus
  strain H97 / ATCC MYA-4626 / FGSC 10389
MSNVFFDITVDGQAAGRIVFKLYDDVVPKTTKNFRELATGQHGFGYAGSSFHRVIPNFMLQGGDFTRGDGTGGKSIYGEKFADENFARKHTKPGLLSMANAGKNTNGSQFFITTVVTDWLDGKHVVFGEVVEGMDLVKKVETLGSQSGKVSKKVTIANSGTC

SEQ ID NO: 3120 - protein, 213 aa, Agaricus bisporus; identical to SEQ ID NO: 488
  var. bisporus
  strain H97 / ATCC MYA-4626 / FGSC 10389

SEQ ID NO: 3121 - protein, 256 aa, Agaricus bisporus
  var. bisporus
  strain H97 / ATCC MYA-4626 / FGSC 10389
MADAPRGRGGFGRGRDRGRGRRGPRRGGRKEEDKEWVPVTKLGRLVKDGKIKSMEEIYLFSLPVKEFQIVDFFLPKLKDEVMKIMPVQKQTQAGQRTRFKAFVAIGDFDGHVGLGVKCAKEVATAIRGAIILAKLSVIPVRRGYWGAALGEPHTVPTKVSGKVGSVMCRLLPAPRGTGIVAAPACKRLLQLAGVQDVYTQAQGSTATMGNFLKATFAAITKTYAFLTPDLWREIPLSRLPFDEFSAHLALSATKKY

SEQ ID NO: 3122 - protein, 293 aa, Agaricus bisporus
  var. bisporus
  strain H97 / ATCC MYA-4626 / FGSC 10389
MASKLPSVLSATEDEIQLLLAAQCHIGTKNCDKQMIPYVWKRRSDGIHIINIGKTWEKLVFAARIIAAIENPNDVCVISARPYGHRAVLKFAANTGAQAIAGRFTPGSFTNYITRSFKEPRLIIVTDPRVDHQAIREASYVNIPVIALCDTDAPLQFVDVAIPTNNKTKHSIGLIWWLLAREVLRLRGTIPRSPDGWNVMVDMFFYRDPEEVEKQQQEEAAAKAAVTAGEEAPAPTEWDVSGGHQAGAINPALVETSLDWAADAAPTNTDWAAEPAVGNWAADAPATGGGGWD

SEQ ID NO: 3123 - protein, 337 aa, Agaricus bisporus
  var. bisporus
  strain H97 / ATCC MYA-4626 / FGSC 10389
MLCRAALRSSSARLFSTSAARQTKVAVLGAGGGIGQPLSLLLKSDPLVSSLSLYDIRGAPGVAADVSHVDTASEVNGYPADKIDAALDGVQVVVIPAGVPRKPGMTRDDLFNTNASIVRDLATAVARASPSAHILVISNPVNSTVPIVAAALEKAGVFDPRRLFGITTLDVVRAQRFLAGIVESDPRQTPVTVIGGHSGATIVPLLSQSQYGKGIKGETYDKLVHRIQFGGDEVVKAKDGAGSATLSMAYAGAKFTNLLLRGLNGEKGVITPTFVRSPLYESQGIDFFSSSVELGLQGVEKIHPIGDISPEEEKLLAACLPELKKNIEKGKAFVAPN

SEQ ID NO: 3124 - protein, 425 aa, Agaricus bisporus
  var. bisporus
  strain H97 / ATCC MYA-4626 / FGSC 10389
MPENKGRVLLAYSGGLDTSCILAWLIEEGYEVYAFMADVGQEEDYAAAEKKALKVGAKKFFLADLKREFVTELIYPAVQANCIYENVYLLGTSLARPVIARGMIEVADKEGCDYVSHGCTGKGNDQVRFELAFYGLKPDIKVIAPWRIPEFYNRFAGRQALLQYAAEQNIPVQQTVAKPWSTDENLFHISYEAGILEDPNVTPPNDMWKLTTAPEDAPTSPERIILEFQNGLPTKVIVPEQQKEYTDAVEIFSALNTLARKHGIGRIDIVENRFIGVKSRGCYESPGATILRVAHMDLEGLTLDRNVRALRDQFTTIALSRILYNGHYFSPEREFVTSSIPSSQRTVNGIVRLKLYKGNTIVEGRESSEGLYDAAQSSMDELGGFEPTDTTGFISIESIRLKKWAQSKAAKGQSGVTAKDVYGSS

SEQ ID NO: 3125 - protein, 444 aa, Agaricus bisporus
  var. bisporus
  strain H97 / ATCC MYA-4626 / FGSC 10389
MVQLSKVLGVIILARNGDRYNYYQDPYTYAGSNTETTALGEVESHRLGSLLRSTYFDSSSSSYIEGIRSDLVDNNEVKVRVKAGVEGTVVFDSAIALLQGLFPPNPKNKITLANDTTVVAPLGGYQYVPVETVEPGNDRSLESWTNCPAFQKHIKEFYASEDFKAKAKDAQPFFHAAKDFVFGRPTTLENAWNIYDFVNSQLIHNKTYAHRLPPTFVEQAHHFANYHENGVFSDKDIVGIGNIAGRTLLHTILSSLERIAFNGDPLQFMVIQTTYQPFISFFHQTGIIKEHPEMKGIPDYSSAIAIELRRGSPPDVRDFLRIKFKNGTHPHFKDVHVFGHHADIPLTEFIYRAENAAITSNKQWKEVCNGNSATFDVAEMVTGNDSTMRAMLTGGSTLVTLVCLFIITKLVRRYRQRAREARLRLDGEENINVNVPVMEKTRLI

SEQ ID NO: 3126 - protein, 480 aa, Agaricus bisporus
  var. bisporus
  strain H97 / ATCC MYA-4626 / FGSC 10389
MATANTPAFNKMLYAPLAEIDPEVKNIIDKETWRQFTGLELIASENLTSQATMEANGSILTNKYSEGLPGARYYGGNEYIDELEVLCRKRALTAFNLDPAVWGVNVQPYSGSTANFAALTALIQPQDRLMGLGLPDGGHLTHGYYTAKKKMTASSIYFQSYPYAITPDTNLVDYAALAAQAKVFKPRLVICGASAYPRDWDYGKLREICDKEGAFLMADIAHTSGLIAAQELDNPFEYCDVVTTTTHKTLRGPRAGLIFFRRDRPNAPDLEKRVNDAVFPACQGGPHNNTISAIATSLLQVSRPEWKAYAKQVIANARALGESLVANGYKLQTGGTDNHLVLMDLRPLGLTGSKVEKICDLMGITINKNAVSGDASAQVPGGIRLGTSALTSRDMKEEDIKVVADFLHRAVQLSLLVQKEAGSKLLKDFVRVATTPQEGKQGYAQVKQLRDEVRDFASKWPLPGVQTAGLQKPEGYHEDF

SEQ ID NO: 3127 - protein, 500 aa, Agaricus bisporus
  var. bisporus
  strain H97 / ATCC MYA-4626 / FGSC 10389
MPSIFTHQWDTPVYKGSTSINTGLFINGEFVDGVKNTTIDVVNPANGKLITKISEATEADIDIAVEAAHKAFETTWGLNCSGSKRGDMLYKLAQLMEKNIDDLSAIEALDNGKTFLWAKSVDLSLSISTIKHYAGWADKNFGQVIETDEKKLTYSRHEPIGVVGQIIPWNFPLLMLAWKIGPALATGNCIVLKPSEFTPLSALRMCALIQEAGFPPGVVNVVTGYGSTTGQAISSHMKIDKVAFTGSTLVGRKVMEAAAKSNLKNVTLELGGKSPVVIFDDADLEQSVNWTAHGLFWNHGQACCAGTRIFVQEGIYDKFLQKFTDKIKEIKLGDPFGLGIDQGPQVSQIQYDRIMSYIESGRAEGATVHVGGERHGNEGYFIQPTIFTDTTPDMKIVKEEIFGPVGAVIKFKDGKEVIKQANDSNYGLAAAVFSQDINKAIETAHAFKAGTAWVNCANTIDAGVPFGGYKQSGIGRELGEYALHNYTNVKAVHVNLNWKM

SEQ ID NO: 3128 - protein, 503 aa, Agaricus bisporus
  var. bisporus
  strain H97 / ATCC MYA-4626 / FGSC 10389
MPQTYTHTFDTPVYKGSVTFNTGLFIDGQWVDPVDGGDRIDVVDPCTGKVITTVAAGTSKDVDIAVAAAEKAYKTSWGLKVPGVERGKLLGKLADLVEKHSDELAALEALNVGKHFHVAKMADIPLAVNALRYYAGWADKVHGKTIETTENKMAYTRHEPYGVVGAITPWNFPLGTVSFKIAPMLATGNVVILKPSEITPFTALYLASLINTAGFPPGTVNIINGYGNTVGEAISRHSSIRAIGFTGSTLTGRKILKASAESNLKKVTLELGGKSPTIVFDDANLEQAIKWASMGIFFNMGQACVAGSRIYVQEKIYDQFLKGFTKTAEVLAGATGGPFEPGVQHGPQVSNLQFERVMGYIKSGKSEGAKVLIGGERHGDTGYFIKPTVFTEAKPDMKIMQEEIFGPVCSVVKFKTEEEVTEWANNTTYGLAASILTENVARAIRMASNIEAGSISINSGPSAEPNVPFGGYKQSGIGRELGQYALDTYTQVKAVHINLGQKL

SEQ ID NO: 3129 - protein, 543 aa, Agaricus bisporus
  var. bisporus
  strain H97 / ATCC MYA-4626 / FGSC 10389
MVAFRRGASYGRKYLSTAETFDGACLQEGVLLPQIHDQLWANLTTTFGSHDYQSKAITWLSEAIQVRTITNDAMGAIGVDTDWKEFTRFHEYLEKAFPLVYSNLKVTKVNTYGIIYEWKGASPGLKPILLAAHQDVVPVDENTIHQWHYRPFDGHFDGEKIWGRGASDDKCGLIGVLIALETLISHEYRPARGIVLASGFDEEIGGLRGAATLAPVLQELYKDGFAFVIDEGTGFGKKFGTNFAMVGTAEKGATNVEVKVASAGGHSSLPPDHTSIGMLSAMLTHLESNPSELEFSRAHPFYGTLQCFATHAENMPSDYRKLIIASATSDGAMRKLIETISQDHLLKNFIGTTQAINVIKGGIKANALPEQAAAIVNHRISVTSNLTETKGRYVWLLKDFASQFDLSFTAFGEVIAEGSKGSLTVGEPFHQGLEPAPITSSDKPPYRLLSGTIKATFNSHRGLTGVNNIAVVPGTMPGNTDTRFYWNLSPYIFRYNHQNFGDVLDSVPKGMHTVNEYTEADSFMEMIEFFTMLILNADESTHL

SEQ ID NO: 3130 - protein, 551 aa, Agaricus bisporus
  var. bisporus
  strain H97 / ATCC MYA-4626 / FGSC 10389
MASERQIEELPSYKYAYILTASACLGSVFHGWDVGLIGGILSLRSFQEYLGINTKNAVKKAILDGNIISVLQAGCFFGALGTGYLSSRFGRRPCLIASGIVYITGGLLQCTVGLGPSQAAALHVFYIGRFISGIGVGMVSTLVPLYISECVPRTIRGRCTGTLQFATNSGLMLGFWVNYSVSKNVPFGEMQWRIPLIIQMIPSLLFIIAMFFQPESPRWLVEHGKHKEAATVLARTGGKDVDHPSVVQTLEEIKQEFVASKQPSFLKQIRLVGESRAVALRCFIPPLVMFFQQWTGTNAINLYSPEVFRHLGIHGTSGALFATGVYGVVKVVSVALALTFAVERFGRKRGLIFGGIGQALMMFWLGGYSATHQDGTVSPASHVSIVALYLYGAFFSMGWGPLPWVVAGEVAPNHVRSFALSIAVGTHWLFGFVISKVTPIMLDRIKYGTFLLFGFCCMIVATWAYFCLPETSGFALEDIKYLFERDVIIRSLQDAPGGKIFLGGRRVESVASLKERRVGVAGEQGEKITGLNSELEDVSSKKSTLKETSSV

SEQ ID NO: 3131 - protein, 720 aa, Agaricus bisporus; identical to SEQ ID NO: 828
  var. bisporus
  strain H97 / ATCC MYA-4626 / FGSC 10389

SEQ ID NO: 3132 - protein, 1020 aa, Agaricus bisporus
  var. bisporus
  strain H97 / ATCC MYA-4626 / FGSC 10389
MSKRLSGIFTRQPSTSTGAGNNDDFVPPQTPKSMNNLRAQLKRGTISQPSAVAAVVDAVRHKNAIDDRKLLLEHALALISNMEEGSMATAAKNKIIQLFYSDLTHPASTSLGPKFAWRAPDGARNNPDLPDMGRAGTPYSRSVQQTHPLPADQLPDPGLVFDTLLRRESFVEHPGGLSAMMFSFAALVIHSVFRTSHRDVYINETSSYVDLSPLYGHNEDVQKKVRAYNGLGYLHPDTFGEDRLRFLPPAYIAKKLYEINERGTYKDPANLTPDKRGDQDEEIFQTARLVNCGWFGMIVFSDYFSAILGLVRYGNNWSLLPFDEIRQDDHTLYERGKGNVVSVEFNCLYRWHATTSKSDEEWTMQAFRKIFGPDAKPEDFTPEDFKKIAKQAITAKPDPSTWTIGGLERQADGSFRDEDLANVLQNATEDPAARFGARGIPASMRLHEIMGLEQSRAWGVCSLNEFRRFLGLKVAKCAEKLYGNIENLELYVGLQAEEAKPLMEGAGLCPGYTISRAILSDAIALTRGDRFFTHDFTPYNLTAWGFADCQRDPGAFGFGSTMGRLLLRTLPDHYSENSVYTFFPFMTPKSMHTNLENIGVLKQYDLDRPSVRPSSVTFSDYKDVAHILESTADFDVVYKEHASRVIKGSGFYPVEDEKARNDVINALSGSPKLVDSIGRYFYETTQKLILENSFTFVGGETFGIDLIKYVVREVPVHWAATDVAGIQLKTKENPCGEYTPTELFDILSDIYSFIFIDIEPSKVRVLQYKVEKHIKDLLDLIEIHLGVGNRFTINGIIGTVSSFFHKSKRSEEHHEIVKRIDELGYSTDQLANTILAIMVSSVGLSLTLTNIINLYLGSDHDDTLKKLARHDDPQVFTGFVYEGLRLDPAFQGYYRVATKDQTIGKNELKKGDRVFADIGSANLNEKMFSEPSKVDPSRSTSACIFGDGPLRFLGETLTVKITSQVLRAIYAYNNVRRAPGASGKLKRFTEGSHPQYHFAYLDRDFKISPWPTSLTIQYDA

SEQ ID NO: 3133 - protein, 1149 aa, Agaricus bisporus
  var. bisporus
  strain H97 / ATCC MYA-4626 / FGSC 10389
MNCDHHPSSSSYAELNHGAGAKWSKGLARQRLDNFLGGHFSDVNLSSVLFTHRLDGPDFVKLKVWSAPGLSKPSFEEAMKQKFRTVKKTNHWWKVSVTIPEYFKQYERVQFEFDPGCEAMIYTVDGIPLQGITGGFGGDRRVEYIIPQEAREQCYHEFVVESSCNGMFGVPWNGDTIQPPDMNRFFTLASADLVVPNQEAWRLLWDFQTLKELIDTLPGNTPLQNKALVVANEIMNLLKRGDVSSVAACRKKAEEIFGEGWESKGAGIYEEGPKNSNIWGIGHCHIDSAWLWPYSVTQQKVARSWSTQVDLMERYPEHRFTCSSAQQYKWLELLYPPLFDRVKEKVLEGKFHTVGGSWVENDSNMPSGEALIRQFLFGQRYFESRFGKRCDTAWLPDSFGLTGSLPQLIRGSGMKYFFTQKLSWNNINVFPHSTFNWVGIDGTQVLCHMTPVETYTAQATVGDINKGLTNHKNLESNDTALLVFGNGDGGGGPLPKMLENLRRIRAVTNTHRELPPVSMGHSVEEFFEDIEESTEAGKALPNWNGELYLEFHRGTYTSHGSIKKGNRHSEILLRDLEHVSTLASLYKSEYAYPKGKIDENWEKVLLNQFHDVLPGSAIGMVYNDAEKLYAEVKASGESLLDDALSVLFPDSLPLGLPKHKYSRSSYSRLIGYNMTFLPRWDIIKIPLQSANSALKAQIMQASDDGKEGYAVMTSGNGSQVGQVRSPSSALHAKLLPTSVYTNGSDHFVLRNSSVQLTISKGRITSLLDVKLNRELIAEGQTGGFVIFEDRPNYWDAWDVEIHHLQTARQLEFSDVTVLTQGPLRASVKAEIRYGQSLVTATISLDAIPATTKANSRSLFNFETVVDWHQRHEFLKFEVPLDIHNPNATYEMQFGYVQRPTHKNTSWDIAKFEVCGHKYADLSEFGYGVAILSESKYGFSCIGNVLRISLLRAATAPDAEQDQGLHQFSFALLPHEGSFYESDVPQAAYLYNSPLRVRVLPNGGDSVMRSLLESPFTLTGARNVILETVKRGEDDDFNASLTEPESGTATVVLRLYEAFGGHGKVQLNISRHLPIAKAFATNFLEDEEQELTIDRNSNGNNGDDDLTAPGCSMSLNFRGFEVKTIKLVIGAPPHTPFSPNTKESVSSTAL

SEQ ID NO: 3134 - protein, 143 aa, Agaricus bisporus
  var. bisporus
  strain H97 / ATCC MYA-4626 / FGSC 10389
MTYTISIRVYQTTPKGFFRPVERTNWKYANGGTWDEVRGEYVLTMGGSGTSGSLRFVSSDTDESFVATFGVHNYKRWCDIVTNLTNEQTALVINQEYYGVPERDQARENQLTSYNVANAKGRRFAIEYTVTEGDNLKANLIIG

SEQ ID NO: 3135 - protein, 172 aa, Agaricus bisporus
  var. bisporus
  strain H97 / ATCC MYA-4626 / FGSC 10389
MFSKLLFALFTMIMTHTAVAQSLWPQSGNFLIVSRTNGNQALAVRDGSTTPGANIIVTDPFSTQTGASVWHYEFDNMLINRRSRLALSVHKFNATSGVSIGTKVVQEQVNTSSTAMVQQWNYFAGSGQIHPSFAGDLCVTAGRQLNGGIATIERCVAGRVEQSWTVTRLPSS

SEQ ID NO: 3136 - protein, 259 aa, Agaricus bisporus
  var. bisporus
  strain H97 / ATCC MYA-4626 / FGSC 10389
MAVGKNNCRTSVSRRVRKVSRRRSSTPSPAKWYDIKAPSIFEVRNVGKTLVNKSVGLKNANDSLRGRVIEVSLGDLNKDEEQSFRKIKLRVDEIQGKNCLTNFHGMDFTSDKLRSLVRKWQTLIEAHIDVKTTDGYLLRLFAIGFTKRRPSQVKKTTYAQTSQVREIRKKMFEIMSREATSCDLKELVQKFVPEAIGREIEKASRSIYPLQNVYIRKAKILKSPKFDVSKLLELHGESTDETGTRVVKEFKEPAPQESV

SEQ ID NO: 3137 - protein, 314 aa, Agaricus bisporus; identical to SEQ ID NO: 599
  var. bisporus
  strain H97 / ATCC MYA-4626 / FGSC 10389

SEQ ID NO: 3138 - protein, 314 aa, Agaricus bisporus
  var. bisporus
  strain H97 / ATCC MYA-4626 / FGSC 10389
MLYQPIEPYETGTIKVSDIHTLYYEISGKKDGNPVVFLHGGPGGGTNASDRTFFNPDKYKIVLLDQRGAGNSTPSACLEENTTWDLVSDIEKLRAKLDIEKWHVFGGSWGSTLSLAYAQSHPDRIKSLVLRGIFTLRKSELRFFYQDGASHIFPDAWDEYLAPIPESEREDLISAYHKRLNSDDEDTRIKAATAWSKWEMWTSKLHVDPVHIAHADDSKFANAFARIENHYFVNGGFMRDGQLLEKQSVDKIRHIPTVIVQGRYDVVCPATTAYALKKVFPEATLHIVPDAGHSAREPGISKLLVEATDKFADL

SEQ ID NO: 3139 - protein, 413 aa, Agaricus bisporus
  var. bisporus
  strain H97 / ATCC MYA-4626 / FGSC 10389
MLLTLVPVVVGLLPFVAQAKVHKLKLQKLAPVSSNPQLEGSWLAEKYGAPAQPQAPLMGAGGTGRRIAHPSQQDDETLLWTQEHQVQGGHGVPLSNFMNAQYFTEIQIGSPPQTFKVILDTGSSNLWVPSVKCTSIACFLHTKYDSGQSSTYKANGSTFEIQYGSGAMEGFVSQDQLQIGDLTIKGQDFAEATKEPGLAFAFGKFDGILGLGYDTISVNHIVPPFYKMIEQNLLDERVFSFRLGSSDEDGGEAVFGGIDESAYKGKMHYVPIRQKAYWEVQLDKISLGGEELELENTGAAIDTGTSLIALPSDMAEMLNTQIGAKKSWNGQYTIDCAKVASLPELTFHFGGRAFPLKGEDYVLNVQGSCISSFTGLDINLPWGSLWIIGDVFLRRYYTVYDLGRDAVGFAESA

SEQ ID NO: 3140 - protein, 530 aa, Agaricus bisporus
  var. bisporus
  strain H97 / ATCC MYA-4626 / FGSC 10389
MSRFVRPSKYRHVFGQLAKKEHGLENVKVTNSAWDTNLISASGKYLSVNWNASGGGAFAILPLISPFHGINGFPHKLPDQLPLARSHSAPVLDTDWSPHNDSIVASGGEDGKAMIWKVEPSQFEGWNTEGWVPEDFDPVLRIDASPRKIGQVLFHPTAAQVLATVSGEYTIKLWDLAAPEDPRITLSGHGDSVQGLAFNTTGTLLATTCRDRKIRMFDPRTGGQAVRVTDGHSGIKGARVVWMGEHDRIATTGFSKMSDRQVSIWETGSLNNLKTMTIDQSSGVTMPFWSDNNILFLAGKGDGNIRYYEYESDNLFALAEYKSSDPQRGVCFLPRRALNVAECEIARAYKVVSSGIEPIAFIVPRKADGFQSDIFPSAPSLEPSLSASEFFSGKLAPANLINLGDGSITSGSQPSASPAPAPAPISSPPVSREPTVSVPAPAPVRAPSPTFAPAQRSASPLPSSSPPHRSTTSDIQMGSGEDTSSPLKEENSRLTTELRDAREKIRNLELQVESLRANARKAAQALQMDI

SEQ ID NO: 3141 - protein, 546 aa, Agaricus bisporus
  var. bisporus
  strain H97 / ATCC MYA-4626 / FGSC 10389
MVKTIAVLDESELQDGQMKEVDFDSGKVLLSRLGDRIQATSAWCTHYGAPLSKGVLVADGRVVCPWHGACFNVCTGDIEDAPALAAIHSFKTHVADGKIHVSAHPENTLKDNMRRYPGLLNEDTSFKKGLIIVGGGAGAFFAVDSLREYGYKLPITILSKEPHAPIDRTKLSKALITDPTGIILRTPADLKIKYGTTLRLGVEVTSIDPKKKTVTIDNADTLTYEKLILAPGGIPRRLPIEGADLENVFTLRGVEDAKKIDAAAQEGKRAVVIGSSFISMELVVAFGKRKLASIDVIGMEEFPFEAVLGKEVGGGQKKYHESQGIKFHMQTKVEKIVPKEDNPKLAGGVVVNGTTIPADFVIMGVGVRPATDFLKGSGIEIEKDGSVRVDEYLRVRTGADTENIYAIGDIATYPAPAGVEKRIEHWDVAGNHGRAAGKHICGKTVPFGTVPIFWSAQGGQLRYCGSSSKIDDVIVQGDPSQNKFIAFHVENGSVVAVSSMQNDPIVTKSSQLLKVGLMPTPEELRAGKDVMSIDISTKDALKNVTS

SEQ ID NO: 3142 - protein, 565 aa, Agaricus bisporus
  var. bisporus
  strain H97 / ATCC MYA-4626 / FGSC 10389
MSYPVKEIQTKPYEGQKPGTSGLRKRVKIFQQEHYTENFVQSIFDSIDAKGSTIVLGGDGRYFSQDAVQIILRIGSANGVSKFIIGKDGIFSTPAASNIIRKYKTTGGILLTASHNPGGPNNDFGIKYNVSNGGPAPENVTNTIFEKTKTISSYRVIDAPPLDLSKIGETTFGPTKVVIIDSVTDYLILLKEIFDFSLIKSFLQQHKNDFKVLFDGLHGVTGPYARAIFVETLGLAESSIQNCVPLPDFGGGHPDPNLTYAHSLVEAVEEGNIQFGAASDGDGDRNMIYGKGAFVTPSDSVAVIAQWADAIPYFKKGGVKGLARSMPTSKAIDLVAQKKGLEYFEVPTGWKFFGNLMDAGRLSICGEESFGTGSDHIREKDGLWAVVAWLNILAAANANSPNKLIGINDLLKEFYSIYGRSFFSRYDYEEVSSEGANSLVANLDQALTSGSLNNTEHVSASTSNKFVISGLYNFEYTDPIDHSVSKNQGHVITFSDGSRVVFRLSGTGSQGATVRMYVERYLAPNAPAEELNKSAAEGLKGLIEVALEVSKLKHYLGRDEPTVIT

SEQ ID NO: 3143 - protein, 574 aa, Agaricus bisporus
  var. bisporus
  strain H97 / ATCC MYA-4626 / FGSC 10389
MRISSAFLWTSLALSWGAYAQSSSVDAYLAAESPIAKAGLLANIGPSGSKSAGAKAGIVIASPSHSDPDYLFTWTRDASLVFAVIIDQYTLGLDTSLRSHIDNFVSSQKIIQQVSNPSGTISTGGLGEPKFNIDETAFTGSWGRPQRDGPALRANALITWSNHLLKQNNASYVTGTLWPIIKLDLDYIKNTWNQSSFDLWEEVSSSSFFTTAVQHRSLRQGAALATAIRETSVVADYTKQADNLLCFMQSYWNTAGYMTANTGGGRTGKDANTVLASIHTFDAAAGCDAATFQPCSDRALANLVAYVNAFRSIYAINSGVPSNIGIATGRYAEDVYFGGNPWYLTTLAVAEQLYDALIVWKNQGSITVTNLSKPFFSLFSSGISTGTFSSSSSTFNTLITGVQNYADSFVNVVAKHTPSGGGLAEQYSRNDGNPLSAFDLTWSYASLLTADGARNGVVPASWGAKGLTVPGTCSGNSGPTAHVTFNVNAETVFGENIFVTGSVGALANWSPDNAIALNADNYPIWSVAIDIPASTNVEYKYIRKFNGGVTWESDPNRRFTSPASGSSTLNDVWR

SEQ ID NO: 3144 - protein, 609 aa, Agaricus bisporus
  var. bisporus
  strain H97 / ATCC MYA-4626 / FGSC 10389
MVESAKTYDIIFAGGGAVACIIAARLAVADPSLKILVLEAGPHSRNNQDHEQPARYYPTLVRCGETFTPHVPKANPKLNGRLASTVTGRCLGGGSTVNFTVYCRAAASDYDDWEAVYGNKGWGSKSLIPLLRKAETYQGVTTNDTHGKAGPLKVSFAKADHNLANEWLGVTAAFDQDRGQIDDLNALYACDGYGRWARFINGKTGKRSDTASAYIYPILDTHKNLDVQVRKRVVRVIFEGKRAVGVEYVDDEGDHAHALQSPSVARASRLVVLCAGAFGSPAILERSGIGSTNILSKNDVQQIVDLPGVGEHLMDHNGIFPHYLAADYGDTLDDIWWGSEAEIKPLVDRWSKTGQGLLAHNGMDAGIRLRPTVDDLKEIGPSFTKRWNEYFANAPDKPIMLMAIITGHLGAAPTVPRQKLYNVCSYTAYPMSKGYAHITSGVNPYAVLDYDPCYLHEEADLHVLRWAYKHSREIARRMPAYRGELVTSHPKFPEGSEAAAKASNRPVPIDAPKIKYTEADDRAIDEHVKNIMSSTWHSCGTCAMKPREQGGVVDDRLNVYGVEGLKVADMSIIPGNVSANTYNTAIAIGEKAAVIIAQEFGIKGVAESD

SEQ ID NO: 3145 - protein, 614 aa, Agaricus bisporus
  var. bisporus
  strain H97 / ATCC MYA-4626 / FGSC 10389
MDAKKGMHPVNTTLRLQNIRRLMREGDASVDAYVVPSEDQHSSEYLAECDSRRAYISGFNGSAGCAIVTLTEAYLFTDGRYFLQAEKQLDSNWTLMKQGLPDVPTWQEFLYKKLPKNSKIGVDATLIAAQDAESLHKHLEPNGSKLVSVTKNLVDEVWSDRPARRLNPVIHLDEKYSGQSSADKIAKVREEMKKKKAKAMVVTMLDEVAWLFNLRGSDIDFNPVFFSYAVVTENKVSLFVNANQLDQGAHKYLDGVTDLHPYEEFLPTLNELAGGLQLDKENPIWVGDRASLAVTEAIGKDCYLIARSPLNDLKAIKNATELEGFRQSHIRDGVALARYFAWLEEQLENGVVLNESQGADQLRNFRSELDLFKGLSFETISSTGPNGAVIHYSPDPEDCAVIRKDQIYLCDSGGQYLDGTTDVTRTWHFGTPTKAEKNAFTRVLQGHIAIDTAVFPTGTTGFVIDSWARRHLWQDGLDYRHGTGHGVGHFLNVHEGPHGVGVRIAYNAVPLKAGMTLSNEPGYYEDGQYGVRLENIVLVKDVKLANNFANKGFLGFESVTMCPMHKKLMDMELLNVNEKKWVDNYHAQVWEKVSPLLKHDKRALEWLRRETAPL

SEQ ID NO: 3146 - protein, 993 aa, Agaricus bisporus
  var. bisporus
  strain H97 / ATCC MYA-4626 / FGSC 10389
MSNVEKEPGPQGTTPPEPEPQQPVKRKREYKDFGEDEEKPTHANVDMSTIELKAEDLYDKEKVDLETIVIEDVFKLLQCDENGLSPEEAVRRIELFGPNKLEQDEQNAFLQFLSFMWNPLSWVMEAAAVVAIILSNGEHRAPDWEDFVGIVLLLFINSAIGFYEERNAGNAVKALMDSLAPKAKVKRSGSWSEIESSDLVPGDMVAFKIGDIVPADCRLTEAINVSIDQAALTGESLPQAKKAGDQCFSGSTCKQGEAEGVVIATGSNTFFGRAASLVGQDDDTTGHLQKILAQIGAFCLVTIGIFVIAEIFTLYAGFRFAYRRGLDNILVLLIGGIPIAMPTVLSVTLAVGAQQLAKYKAIVTRITAIEELAGVTILCSDKTGTLTTNKLTIDRNTIRTYGPFSADDVVLLSAYASRTENQDAIDASVISALGDPSRARAGIKLLDFKPFNPVDKRTEITYLEESTGKLKRVTKGMTGIIIELCSRNKTDDVENKLEADVEEYASRGLRALAVAYEELDGDNPEAEGNGFELIGLLAIFDPPRTDTKQTIDDALALGVKVKMVTGDQLAIAKETGRRLGLGDHMYPAKVLKDGPAAGGRHASLDDMILDADGFAGVFPEHKYEIVKRLQGLGHLCAMTGDGANDAPALSRANVGIAVEGATDAARGAADIVLTEPGLSTIVHAIRQSRIIFQRMRNYSIYACAVTIRIVVCFAILAFAYRMDFPPFMILIIALLNDGTIMTLSVDRVLPSMHPDSWDLIEIFSFAIAYGLYLTGSTVALVNIIMETTFFQDRFGVRFTNNAYYPANANDPQVHMIVYLQVAIISQALIFITRSHGFFFMERPSVALLAAFCIAQLVSSIIAAYADWGFSAIEPISGGWIGIVWVWNIVWFIPLDWIKFAMKATVIKSIRRRRENKLAKEAAHGVPLTLTTSRATSMHESLYSNRVNFIKRAARRVGLGGKVSVQPEELQRFSSIQAQRVGATLARNPSRTPA

SEQ ID NO: 3147 - protein, 108 aa, Agaricus bisporus
  var. bisporus
  strain H97 / ATCC MYA-4626 / FGSC 10389
MYVECEIVSNLICDARSQLSTDEQKAIVAGLSDPNQVQASGIRAGGQKFLTIRADPERIYGKKQADGIIIVKTAQTVIVVEYAAPVQAPEATAHVEKYAQDHLISKGY

SEQ ID NO: 3148 - protein, 113 aa, Agaricus bisporus
  var. bisporus
  strain H97 / ATCC MYA-4626 / FGSC 10389
QPKAAASKTPAVKHKFVIDYSKPAADGVFDGADFEKFLHDRIKVEGKAGQLGDHVKITRDGNTKITVTSNIPFSKRYLKYLTKKFLKKNTLRDWIRVVASSKDNYQLRFYNIA

SEQ ID NO: 3149 - protein, 130 aa, Agaricus bisporus; identical to SEQ ID NO: 541
  var. bisporus
  strain H97 / ATCC MYA-4626 / FGSC 10389

SEQ ID NO: 3150 - protein, 142 aa, Agaricus bisporus; identical to SEQ ID NO: 543
  var. bisporus
  strain H97 / ATCC MYA-4626 / FGSC 10389

SEQ ID NO: 3151 - protein, 161 aa, Agaricus bisporus
  var. bisporus
  strain H97 / ATCC MYA-4626 / FGSC 10389
MSQAVPSEISPLAQLPPICSKLLEAKARKGLTFDQVAKVIGKDEVWVAAAFYAQAKFTADELRKVSEALDLPSAQALSEIGDHWWPNRGIGPTPPTDPVLYRLYEAVLVYGTPIKAVIHEKFGDGIMSMIDCKINVDRKADPKGDRVVLTIDGKFLPYARW

SEQ ID NO: 3152 - protein, 170 aa, Agaricus bisporus
  var. bisporus
  strain H97 / ATCC MYA-4626 / FGSC 10389
MGIQEFQVIGRHLPTESDPNPKIYRMRIFAPNEVVAKSRFWYFLRQLSKVKKASGEIIGVNVILEKRPLRVKNFGIWLRYDSRSGTHNMYKEFRELSRADAVKSLYQDMAARHRARFRSIHILRVVEVEKADDIRRPYIKQLLTPNLKFPLPHRIRKARSTFVAKRPSTF

SEQ ID NO: 3153 - protein, 189 aa, Agaricus bisporus
  var. bisporus
  strain H97 / ATCC MYA-4626 / FGSC 10389
MVRYAAAALATNPEKTAKARGEYLRTHFKNMREVAAALTGQKLTKAYAYLSDVKDHKRVIPFRHFSGGVGRTGQAKEFKTTQGRWPEKSIKFITRLLKNAESNAEFKNIDVDDLFIKNIVVQQAPKTRRRTYRAHGRINPYQGHPAHVEIILAASETEVEKATDKVVPSGLGGLNRRQVARKRIEAGRA

SEQ ID NO: 3154 - protein, 203 aa, Agaricus bisporus
  var. bisporus
  strain H97 / ATCC MYA-4626 / FGSC 10389
MATVTTLPKDISKLGQEIKLFGKWDTQDVDVKDISLADYIQVRHAVYLPHTAGRYAKKQFKKAQMPIVERLVDSLMMKGRNNGKKLLAVRIVAHAFEIIHLLTDQNPIQVLVDAIVNTGPREDSTRIGSQGTVRRQAVDVSPLRRVNQAISLLTVGTRESAFRNVKSIAECLADELINAAKGSSNSYAIKKKDELERVAKSNR

SEQ ID NO: 3155 - protein, 228 aa, Agaricus bisporus
  var. bisporus
  strain H97 / ATCC MYA-4626 / FGSC 10389
MSQPPILLYTSTTPNGYPISMHLDELKAVYSTFGGYEYEIQICGQGLRHLDERSKEDWFIKLNPNGRIPTIVDRSRNNFSVFETSAILLYLSQHYDPDFKFWFDPIKDADNYSEMLQWIFFAHGGIGPMQGQAHHFAMRAPEDIPYAKNRYIDETKRLYNVLEIRLKERDYLAGSGRGKYSLADLKTFPWVRIHAKAITPTLDEFPNVKAWVQRIEERPATVTGVKVG

SEQ ID NO: 3156 - protein, 244 aa, Agaricus bisporus
  var. bisporus
  strain H97 / ATCC MYA-4626 / FGSC 10389
MITFYDLTKKSPQTTWSPNPFKTRFSLNYKKLPYNIVNLEYLELEPEFKKVGIPASSTWADGRPLYSSPSIFDSSTNTGVADSYQIAQYLDKTYPDTPKLFPPGTEALQAAFYARFSELLGPFFPFLLPKVPGLLNPESAEYFNRTRAVRFGKPLADLEPKGQDRVEAWKNVEAAYNTLYGWLSQSKGPFFMGDTITFADFAVGGMIYATEVCIGKDSKEFKDLMTWNNGRWAEFRKSLEQYAK

SEQ ID NO: 3157 - protein, 265 aa, Agaricus bisporus
  var. bisporus
  strain H97 / ATCC MYA-4626 / FGSC 10389
MCFPSKRQKNNFADKSTDPKSVSDTNTKGEAKATEPVQAPEPIQAPEPTSSDPVSTFTLHSSTTMPRVAIVIYSMYGHIATMAEAVKAGIVKAGGKVDIYQVPETLSNEILVKMKAPAKPSYPVIQPEGLTEYDAFLFGIPTRYGTMPAQWKAFWDATGGLWAAGKLAGKYAGIFVSTGTQNGGQETTALTTLTTLTHHGIIFVPFGYSHAFAEFSSFETVRGGSPWGAGTYAGHDGSRSPVPLELTIAEKHGKSFWEIVSKVNF

SEQ ID NO: 3158 - protein, 246 aa, Agaricus bisporus; identical to SEQ ID NO: 507
  var. bisporus
  strain H97 / ATCC MYA-4626 / FGSC 10389

SEQ ID NO: 3159 - protein, 263 aa, Agaricus bisporus
  var. bisporus
  strain H97 / ATCC MYA-4626 / FGSC 10389
MSRTSYDRFLTVFSPEGRLYQVEYAFKAISGSGHTAIAIRGKDTAVVITQRKVPDKLLDASTVTHLFSITPTIGCVMTGLIADAHAQVARARSEAADFRYKFGYEITPDALARRIANINQVYTQRAAMRPLGISMILIGVDPEFGPQCFRLDPAGYFVGYHATAAGQKQQEAMNQLEKKWKKLDSGRGADEPAKAGQTLSRSEVIEMAIEIMSTVHATDYKPGEIEVGIVSAGEEEDLKTRGQWRVMGEAEIERHLLAYAEKD

SEQ ID NO: 3160 - protein, 289 aa, Agaricus bisporus
  var. bisporus
  strain H97 / ATCC MYA-4626 / FGSC 10389
MSDNSQGVAAALSGANPARTVLSSFLLCDRVALVTGAQRGIGLEMSLALAEAGAIVYCLDLPANADADWLKVQEYVTKLPDIAPGVNNKGRLEYVSGDVTDQQKMWDIAEDIVKKEGRLDICVANAGILRGFECLEYPAEEFRKLLDVNINGVLFTAQAAGRQMEKLDLPGSIIITASMSGSIANYGQHWVAYNTSKSAVIQMARSMACELGPKKIRVNTISPGYIYTQMTKDFLDPRPELKQQWSLQNPLHRIGRPDELRGATLWLASDASTYCTGSDIIVDGGHRAW

SEQ ID NO: 3161 - protein, 301 aa, Agaricus bisporus
  var. bisporus
  strain H97 / ATCC MYA-4626 / FGSC 10389
MPIATLPIPNSVRVALMVCDELPSHSNHGSMFERYRMWLQRSLPPNSKFILKMIAYDVRKQDYPTAEELRKFFDVVVVTASRADAAGQDSWIRRLTCFVQHVHNKSPHIRIYGNGFGHEIIGRALGGVVTDNGRWEYGWKPIKLTEFGKMVFGAKPFGLQQIHRDHVALDTLSDHFSSGSILLLGSTAKTANQGFVKVYQYCEECEFQGRIHGVHQHIHVMTVQGHPELTDFVVTKVVHHLAEEGILKEEAAKKYTGSESAEEPVSDENMPRLKWPGDDDGISVVGKAFWKMFGVKYHDDM

SEQ ID NO: 3162 - protein, 308 aa, Agaricus bisporus; identical to SEQ ID NO: 601
  var. bisporus
  strain H97 / ATCC MYA-4626 / FGSC 10389

SEQ ID NO: 3163 - protein, 323 aa, Agaricus bisporus
  var. bisporus
  strain H97 / ATCC MYA-4626 / FGSC 10389
MTTSLDQLKQTGTVVVSDSGDFESIDVYKPQDATTNPSLILAAANKPGYARLIDAATKYAKDKGGDLDAQVNNAMDRLLVEFGKEILMIIPGRVSTEVDARLSFDKEATKAKAKQLIALYESVGVSRDRVLVKMASTWEGIQAARELEKEDGIHCNLTLLFGFGQAVACAEAGVTLISPFVGRILDWYKKSTGKNYEGDEDPGVQSVKKIFSYYKQHGYKTIVMGASFRNVGEIKALAGVDFLTISPALLEELKNSTAPVPKKLDSTAKQVSIPKVSFVNNEAEFRWALLQEQMAFDKLHEGIKKFAEDGETLKEVLRKKLSA

SEQ ID NO: 3164 - protein, 344 aa, Agaricus bisporus
  var. bisporus
  strain H97 / ATCC MYA-4626 / FGSC 10389
MPQGSMKALWYSAPKQFDIRDVPIPKVGDDDVLLKVSVCGICGTDAHIDEGEFMAKFPLIPGHEAVGTVVEMGKNVKGFAIGDRCVADVGITCDTCFYCRRGNSLLCENFRACGVAEDGGFAEYIVYQQKKLYKIKNLTDEEATLLEPAACAVHGLDKLNPGVGIEVLLMGAGPTGLILAQLLKQNGASRIVIAANKGIKMDIAKNLNAADEYIELDRQNPGAQWQKLKDDNPYGFDVVVEATGVEKLANESINYVRRGGTLMIYGVYENKALVHWPPSKIFGDEIRIIGSFSQTYCFPRAVAYLDSGKINVKGMVTDIFKLEDYRLALEKMSSRGALKIAIKP

SEQ ID NO: 3165 - protein, 392 aa, Agaricus bisporus
  var. bisporus
  strain H97 / ATCC MYA-4626 / FGSC 10389
MSETPGEAVPAAQRGSWSSFLKSIASFSGDLSSLTAPPFILSPTSLTEFPAYWCERPDLFSAIADAKDPQARALAILRWFISTLKDQYTSRNELMGSEKKPLNPALGELFYAHWPDRNGRGQINLLVEQVSHHPPVTAYVIENKVKGVQLVGHNAQKTSFSSGSIIVKQIGHAVLTVGKEEYVITLPKLRIDGLWYGSPYVELTDTTYIIGGGFMSTIEYKGKGYFTGKSHTFKATVAPLPGMGGSSQEHVVEGLWHEKSKFTKGPFNGDVFHDVETTSKENATVIGGEADGSQGAFETRKLWNLVAKGIREGDYELASREKSRIENDQRQRRKDEAAAGTKWELKHFKHEDSDPLYERLGRLAKITPSEEDFYGFLVNWPEALTKPAGNDK

SEQ ID NO: 3166 - protein, 418 aa, Agaricus bisporus
  var. bisporus
  strain H97 / ATCC MYA-4626 / FGSC 10389
MDNNVPVLLQLPGENPSLKLEILPRGLTIHRLLVQDNGRENDIVIGPEKPEGHITQKYTNSIVGRYANRVPVGKHILNRNGIQSEFEAKANENPQVSLHGGPTGFDSVVWTVLGTEEKPLLFSNTEIERIHALPAKTFALFRLISPDGDQGYPGELLTEVLMALVPSTSGHSSITKLGHVVIAYRSKLADGKAGVTPVNLTQHWGFNMNASLSDRLGTEIATIKDHVIRIEADDIAKRDKLSLPTGDYTPVSSAPVYDFRKSKEIGKDFPEGGYDDYFRLNSSAIYPTPKHIRLSDLETWNSLDAILAQAPLNAASAVQLASEKTRIALDFFSNQRGLMFYTNDLADPAKGARKLIHGGSGISGHGDAYGPGTAVFLEFHDPLAAFLQPENRDADDTMITSEELYNNFVRLEIGFMNA

SEQ ID NO: 3167 - protein, 492 aa, Agaricus bisporus
  var. bisporus
  strain H97 / ATCC MYA-4626 / FGSC 10389
MTRIIVSLLAVSAALASPLSTAHNDFSSRSSLSLAPLVDEFHPHGTVNNSYIVIFKNDVPFDLIANHMSFLHDAHAEDPLVDDFAGVRQVYDGHLNGYAGRFTRNVVDRLRTMPEVAYIEKDQIVHTTEHVTQTGAPWGLARVSHRPELTFSTFTKYVYDSQAGQGVDAYVIDTGINVQHEEFEGRATWGKTVPQDEDEDGNGHGTHCAGTIASRKYGIAKHANVIAVKVLGSNGSGTMSDVVSGVVWAAREAKAKAVAAAKEFAATGKTKHKGSVANMSLGGGKSPALDDAVNGAVDTGLHFAVAAGNENRDACSSSPASAEKAITVGASTLGDARAYFSNYGPCVDVFGPGLNIKSTYKGGRSATAILSGTSMASPHTAGVLAYLLSIYPSKEFNPIFEKDELVSITSPVSQTSFSGIYAITHAALPQWISSFLPAPEFVDFITPIPGHPPTLTPTQLKKALIALSTPDMLDDLPANTVNLLLFNNATHS

SEQ ID NO: 3168 - protein, 505 aa, Agaricus bisporus
  var. bisporus
  strain H97 / ATCC MYA-4626 / FGSC 10389
MAHIATITIAATNKQIPVPTGLFINNEFVPSVEDSPEKILAINPATEEVICPVVSASPRDIDVAVKAARQAFQTTWGKNVTGFERSRLINKLADLIERDQQELAELETLNNGKPVKIARDFDIGDTIQCLRYYAGWADKIIGQSLEVDNKTKLAFTRNDPIGVCGQIIPWNYPINMWAWKVAPALAVGCTIVMKPSELTPLTALKLSELVREAGFPPGVVNTVPSYGHVGGAALAAHPDVDKVAFTGSTVTGRKIMEAAAKSNLKKVSLELGGKSPHLIFESADLEQAASWAALGICYNTGQDCTAGSRVYVQEPIYDRFIDLLTAKVKATIMGDGFDEISTGGPIISKGQYDRVWAYIEAGKQEGAKPILGGVKRTGKGFFVDPTIFTDIHRDMKIVKEEIFGPVLSVGKFKTEDEAISLANETNYGLGAGVHSSDANQCMRVSSSLEAGTVWVNQYNLLSNNVPFGGKKQSGIGRELGSHALAEYTSVKAVHWNFGEKVDWPL

SEQ ID NO: 3169 - protein, 539 aa, Agaricus bisporus
  var. bisporus
  strain H97 / ATCC MYA-4626 / FGSC 10389
MLTSRGAVARLSKRAFNSARQTNALFSSAALPRVALPAQSQQTAGLSRPQASSSNIPARSYATESKAIVGSVKTVIGAVVDVQFDTDNLPPILNALEVQDFHGGRLVLEVASHLGENSVRTIAMDGTEGLVRGTKVIDTGAPIQIPVGKATLGRIMNVIGEPIDERGPIKGVKLSPIHAEPPAFVDQATTAEVLETGIKVVDLLAPYARGGKIGLFGGAGVGKTVLIQELINNVAKAHGGFSIFCGVGERTREGNDLYHEMIETGVINLEGDSKVALVFGQMNEPPGARARVALTGLTIAEYFRDEEGQDVLLFIDNIFRFTQAGSEVSALLGRIPSAVGYQPTLSTDMGGMQERITTTKKGSITSVQAVYVPADDLTDPAPATTFAHLDATTVLSRGIAELGIYPAVDPLDSKSRMLDPRIVGKEHYEVATAVQKILQDYKSLQDIIAILGMDELSEEDKLTVERARKIQRFMSQPFQVAQVFTGYEGKLVPLKDTVRSFKEILAGTHDGLPESAFYMAGTIEDVKSKAEQLAKDMGN

SEQ ID NO: 3170 - protein, 519 aa, Agaricus bisporus
  var. bisporus
  strain H97 / ATCC MYA-4626 / FGSC 10389
MSSPAKPVYTTSNGAPVNEPYSAQRAGFHGPLLLQDFHHIDLLAHFDRERIPERVVHAKAAGAHGYFQVTHDLSDITSQSLFQGVGKKVRITARFSTVGGESGSADTARDPRGFAIKLRTEEGNWDWVFNNTPIFFIRDPAKFAHFIHTQKRNPQTHLKDPDAFWDYLGQNPESIHQMMILFSDRGTPDGFYQEHGYSGHTFKWCKADGSFVYVQVTCRADGGFKTLDDATATRLSGENPDYGTQQMFEAIEAGNFPSWTVYIQTMTPAQAEQFRYNILDLTKVWPHKEFPLRPIGKMVLNENPQNYFAEIEQVAFSPSHLVPYIEPSADPVLQSRLFSYPDTHRHRLGANYQQLPVNAPIVPVANFQRDGPMAFVNQGNRPNYQCSFQPLTYAGRPGHMDASVNDRERDARHENFINGAWRYLSVISELDFEQPRELWSRVWNDQERETYVKNVSGHFKNVKSAEVKARQLSVWAAVDQGLSDRIADAVGHPHVAPLKCISAAEVLNFRHNIGAGSNQ

SEQ ID NO: 3171 - protein, 734 aa, Agaricus bisporus
  var. bisporus
  strain H97 / ATCC MYA-4626 / FGSC 10389
MADQQPQPHILLVDSYCSFAYSLAALCKKAIPHSVLHVIKNDTHTIRDLLPVIRQFSAIVVGPGPGSPDIPTDIGVVRDLWKVADENLVPTFGVCLGQQSLGIEYGATIHRLHTVKHGQVSVVQHTGTEFFAGLPDLKVVRYHSLHIRPHAGGDIEELAWSEDEENGRVVMGVRHITKPFWAVQYHPESVLTDEGGLKVLENFWTLAHAWNQTNRPSFTPPVEIILPQSHIWPRISQRYSAHEFNKSLGSVTYKTIQVPDISIIDLCEYLGVHDESKRFVFLDSAAYPGQHSILACLGDASSQFTHYVHENFVEITTGTLTVQQELSGKDIWTWLDEYRESRKVAGGDARVPFWGGFAGYLTYEAGFGALDIPVPRKSNHRENNHPDVNLVWVDRSIVVDTATSKIWVQSLLPEDEQWIRETAVHIAGLPRASTIPNMPSADQVTVKFPDHDQYIEDIKRSKEYLFSGDSYELCLTGQTQICVPKEAVMPAWERYKLLRTVNAAPHAGYLRLHPTTFLSCSPERFLSYSRTPGAVCQLRPIKGTVRKLPHITREVAEEMLAGSRKEIAENLMIVDLIRHDLHNAVGERVSTKKFCGVEEYETLWQLVSVIEGSLSEGTSIEVDDSLGWEVLRRSLPPGSMTGAPKKRSVELLQGIEGRERGPYSGVFGYWCAGGGGDWSVTIRSCFLHDSEKGDGEEWTIGAGGAITALSDPDAEWEETKVKLNGVLRGFGASC

SEQ ID NO: 3172 - protein, 759 aa, Agaricus bisporus
  var. bisporus
  strain H97 / ATCC MYA-4626 / FGSC 10389
MAPLSHPSIVDGWFREISSQWPGQAMTLKVNKILHVEKSLYQDVLVFESETFGNVLVLDGVIQCTERDEFSYQEMIAHLPLASHPNPKKVLVVGGGDGGVVREVLKHDTVEQVVLCDIDEAVIRVSKQYLPHMSSLLSDSRVTVHIGDGFKFLSNNQNTYDVIITDSSDPVGPAESLFQKPYFELLHNALTPGGHISTQGECQWIQLSLIQDLKRVTSEIFQTTEYAYTTIPTYPSGQIGFMVCAKAPGRDLRTSIREVKNTKYYNKDIHRTAFVLPEFTRSVLEEGKDIRPKFGRAAKAVEAEAAGRKKKRVLLLGSGFVARPCAEYVVRNPENELTIACRTLSSAKALAESLPATTAISLDVNSTDALEKAIAEHDLVISLIPYTYHAAVIRAAIKSKTHVVTTSYVNPLMRELDAEAKAAGIVVFNEIGLDPGIDHLYAVKTINEVHAKGGKIKQFLSFCGGLPAPECADNPLGYKFSWSSRGVLLALLNTASYISNSQAITVTGAELMGHAKPYYISPAFAFVGYPNRDSTPFREWYHIPEAETVLRGTLRYQGFPEFIGTLVKLGWLDQTEKEWLKEGITWKQITKNLVGAKAQDDLTEAAIVDRINAKVQFSSASEAERIVSGLRWIGTLSDEPAQIRAGNLLDTLCARLEGLMKYEVGERDLVMLQHKFVVEWADGTTQILTSTLEAYGSTVPGGYSAMALTVGVPCGITVQLVLDGVLKEPGVHAPYDYEVCEKIRKVLEIEGLGMVEKVM

SEQ ID NO: 3173 - protein, 3931 aa, Agaricus bisporus
  var. bisporus
  strain H97 / ATCC MYA-4626 / FGSC 10389
MAVPNGHAVPHAIASRPLIVAQGRVRISVPVSTKTDEWIAAEVLRDEFIHAQSLDAADASSVIEDESEATVDLAAKFLAHVASNIDNDSQSTEARIRLLLNVLKHFTSSYLATKDIHSLCASYSIDTRKTVLSAYYRAVAALENKDSSSIPRQPESALLDAAKSGKASIFALFGGQGTNEVYFNELQSLYDIYQPYVTPFLESVLPDLIGLAEDEVDSSYYTHGLDVVSWLSDATKRPSIAYLASAPLSLPLIGLTQLIQYLVVCRVANLTPGQVRSRIAGATGHSQGILSAVVISASETFDDFTENSRKALRWLFYCGLRGQQAFPPVAVEPSLVQDTLDGGEGTPSPMLSVAGLPLKDLEVHIKKTNSHLPANSQLGVSLYNGPRAFVVTGPARALHGLVTNLRKVRAPSGADQSKVPFSQRKPVFSVRFLVVGVPYHSPYLKGVTDAVMDEDLEELWEPSDLKIPVYNTETGEDMRNMTGSITRSLCDQIYTAPIHWTKATDFPETATHAIDFGPGGLSGVGPLSARNFDGRGIRVILVGDSGKGDAELYDSLSVKYEDWWSKKFAPSLVRTSDGTIHLDTPMSRLLGKPPIMVAGMTPTTVKAGFVSAILNAGYHVELAGGGHYNAKDLRAKVAEIQSKLPSGVGLTLNALYINPRQFTFQFPLWQELRREGAPVEGFCVAAGVPTTEKANEIIEGLRTAGIKHIAFKPGSVDGLRQVVNIAASNPDFPIICQWTGGRGGGHHSYEDFHQPILSTYRSLRSHSNIVLVAGSGFGDAEDIWPYLTGDWSERFGVQRMPFDGFLFASRVMVAKEAHTSSSVKDLIVAAAGVEDEQWEGTYTKPTGGVLTVRSELGEPIHKVANRAVRLWKEFDNTVFSLPKEKRAAWLSERRDEIIEKLNKDFAKPWFGEKKDGSVAKELGDMTYEETVLRLVRLMYVSKQKRWIDRSLRNLTGDWLRRVEERFAGVNTTGNKPSLLQSYASLDDPSAFVESFFEAYPLATEQLLAADDVAYFLAISQRPGQKPVPFIPVLDVSFEVWFKKDSLWAAEDIDAVFDQDPERVAILQGPVSAKGSLVKDEPIKELLGNINSSLISKLLESRYGGDESSIPTIDYLAAEPFVPATLSNVARYERGSDVVYQFGSSLPSTEDWLAALGGSELNWLHALVTSETIVQGTSYIDNPIRRLLAPRPKQRIVVGYENSLPVSITAYGAARSYGAHIPGFKAVEIKFNQSSQLIDITMFEERRDVAVPLKLQFHYQPEQGYMPIHEIVDGRNQRIKDFYWKLWYGDNEVLPNVDIKEKLVGPEVTITAEEVEEFCAVVGNQGESFKNVRNDSVQAPMDFAIVTGWQAIMRSIFPADIDGDLLKLVHLSNGFKMVEGASPLKVGDICKSEARIVSVVNAPEGKTVTVKGHVYRDDQPVIEVVSSFLYRGRFTDYENTFETTEEPDYLVPLETDAEVGVLQSKQWFGWENESTPLLAGTALIFRIQSSVFFKDRGVFRNVSVSGDVFVRNQLKVLVKVGNVDFQQDDCQGNPVLSYLQRHGTPQGLPTPLANEGYTLRHVEGSTIFNAPLTNEPYSKISGDFNPIHVNPYFSDYASLPTTITHGMWSSAATRRYVENVVAQGHPDRVLAYNVSFVGMVLPNDELEVKLKHTCMRDGNIVVAIETTNSRGEKVLVGTAEVKQPTTVYVFTGQGSQEPGMGMDLYNNSPAARAVWDGADAHLLATYGFSISEIVRDNPKEKTIYFGGIQGQAIRQRYMDMTYDTLDKDGNTKTLPLFADIDNRTPRYTFSHPNGLLFATQFAQIALVVTEKSAFEDMRAKGFVQKDCAFAGHSLGEYSALASIADVLHISALVDVVFYRGITMQRAVERDSENRSNYAMCAVNPSRISKTFSDAALREVVDMIAVKTGSLLEIVNFNVEGQQYVCAGELVALQTMTNVLNYLKVKKVDIAQLTKQFPIEKVKQMLGDIITECNQRALDQQKSQGYIILERGFATIPLPGIDVPFHSRYLWAGVLPFRAYLSKKINPATLNPDMLVGKYIPNLIAKPFAVSREYAQIIYDQTSSPRLDKVLQKWEEDNWDSSENRQMLAYIILVELLAYQFASPVRWIQTQDLLFTQYKFERLIELGPSPTLTGMASRTLKAKFESSDDSVSCTRVILCHAKNTKEVYYQYEDEPEAPAEAAPDAPAPATAVASAAPVAVAAVAVAAAGPAASIEDAPIKAIDILLVIVAQKLKKRVDEVPLSKSIKDLVGGKSTLQNEILGDLQQEFASAPEKGEELSLEELGSALSTGFSGALGKYTTSLVARLVGGKMPGGFNASAIRSYLNKTWGLGPSRADGVLLLATTLEPPKRIASEAEAKTWLDGVVQTYAQRSGISLTAPGAAAGAVGGGGGATINSEEFLKFTADQDKFIQQHIELYNRYLKKDSRAGEIAYDREKVNTLALQAKIDSITREHGDSYLDGIQPRFDPLKARHFDSSWNWVRQDALLMYYDIIFGRLTTVDRDITARCIALLNRADPDMLQYMEYHINKLDPSKGDTYKLAKDFGQQLIDNTRDIIGKSPLYKDVTFPTAPHTEVTAKGDIVYSEIVRENVRKLEAYVEEMATGDGVAGSVNIQKVQDDVLKLWTVVKSLPEINQDQKNRIKSLYEGVVRSLQKGPDPHPRVQSTRSRRSSSQFLRPHNAGVANVTADNIPLLHLKRRVAATWEYSSNLTGVYLDILHEIATSGTTFEGKNALCTGVGKGSIGVEIVKGLLSGGAHVVITTSSYSRKTVEYYQSIFQTVGSRGSALTVVPFNQASKQDVEALVDYIYNNLNMDLDYILPFAGIPENGREIDGLDDRSELAHRMMLVNLLRILGCVKNKKANRRIVTRPTQVILPLSPNHGLFGNDGLYSESKISLETLFQRWASESWGEYLCLAGAVIGWTRGTGLMAPTNIVAHELEGYGVRTFSAKEMAFNILGLMHPLLFSITQVEPIWADLNGGMDRLPDLADITTRIRTNLLKKADLRRAITKDNAADFKVTNGVEAERLLQTIDVLPRANFRFDFPELESAESLSDVTQLRGMIDLEKVVVVTGFAEVGPWGSSRTRWEMEARGELTIEGYIEMAWMMGYIKHFNGRLKDGSLYVGWVDSKSGESVDDKDVKGRYEKDILAHAGIRLIEPEIFRGYDPNRKSFNQEIELIHDLEPIEVSEVEAQKFKLQHGDKCDIWAGEDGQWFAKLKKGACVLVPKAFKFSRTVAGQIPSGWHAGRYGIPEDIIAQTDRCTLWALVCTAEALNSAGITDPYELYKYMHPSEVGTSLGSGMGGATSMAKMFKDRRDEREVQNDILQETFINTTAGWVNLLLMSSSGPVKIPVGACATALQSLEIACDTILSGKAKVMIAGGFDDISEEGSYEFANMKATSNAETEFAMGREPTEMSRPATTSRAGFMEAQGTGVHIVMSAKTALEIGAPIRGILAFTSTSTDKAGRSVPAPGKGALSVAREVPSKHPLQILDVKYRSRQLAFRRTQISQWLDHEHVELQEEITSRKSEGENVDESYVASRVANLEKEAARQEKDAIAMYGMLEGSDPRVAPLRRALAVWGLNADDIGVLSIHGTSTGANEKNETQIWNDIFTTISRSRGNAVPIVAQKSLLGHSKGGSAAWQMAGLLQYVLSGVIPGNRNSDNIDSNFVDRRFLMFPSKTIYTDGIQAGVMSSFGFGQVGGTALVVHPRYLFGALEPSFYEQYKERNRTRALQSYKAMSDMMVKNSLVKIKENPPFTPENEREVLMNSMARVTCDPKTGEYSFKGKLPREAPLDLSNLKLVSDVMTAPSAATNSNIIGVGVDQELITSVPSHNPTFVARNFTEAEIAYCRAQPSPASSFAARWVGKEAVFKSLGVKSAGAAAVLKDIEILNDDAGVPSVRLHGEAQVKAQERGVANVLISLSHSETIAIAFAQASST

SEQ ID NO: 3174 - protein, 124 aa, Agaricus bisporus
  var. bisporus
  strain H97 / ATCC MYA-4626 / FGSC 10389
MSYVAKGEKEYDATGAPVPGAKIHKIRITLTSSNVKNLEKFSGDLINRAKDKQLHVKGPVRLPTKVLKITTRKTPCGEGSKTWDRYELKIHKRLIDLHASSEVVKQITSISLEPGVEVEVTISA

SEQ ID NO: 3175 - protein, 136 aa, Agaricus bisporus
  var. bisporus
  strain H97 / ATCC MYA-4626 / FGSC 10389
MPESNFKRFVEVGRVVLVNDGPLAGKIAVIAEIIDHNRAIIDGPTSGIPRQSFPYKHLLLTPLKLTKLPRAAGTGIVRKLVEQEGIVEKWDKSAWAQKRVMKEKRRSLSDFGRFKVMLAKKQRRDVVRKAVKKASA

SEQ ID NO: 3176 - protein, 147 aa, Agaricus bisporus
  var. bisporus
  strain H97 / ATCC MYA-4626 / FGSC 10389
MASQVNAVQTFGKKKACFTATAVAYAKEGRGLIRINGSPIGLVQPEILRLKVYEPVLVAGEDAFGILDIRVRVKGGGHTSQVYAIRQAIAKALVAYYAKYQDAYSSLELKKKLVAYDRSLLIADPRRMEPKKFGGGGARARRQKSYR

SEQ ID NO: 3177 - protein, 151 aa, Agaricus bisporus
  var. bisporus
  strain H97 / ATCC MYA-4626 / FGSC 10389
MGRMHAPGKGISSSALPYRRTPPSWLKTTSEEVVEQIVKLARKGLTPSQIGVTLRDSHGIPQVRFVTGNKILRILKSQGLGPSIPEDLWHLIKKAVAVRKHMETNRKDKDSKFRLILIESRIHRLARYYKTKQQIPPTFKYDSATASTLIA

SEQ ID NO: 3178 - protein, 165 aa, Agaricus bisporus
  var. bisporus
  strain H97 / ATCC MYA-4626 / FGSC 10389
MAPKFDPNEVKIIYLRATGGEVGASSALAPKIGPLGLSPKKVGEDIAKATSAWKGLRVTVQLTIQNRQAAVSVVPSASSLVIRALKEPPRDRKKEKNIKHSGNVALDEIFDIARTMRDKSLAKELSGTVKEILGTAQSVGCTVDGKPPHDVIEAIDAGEIEVPAQ

SEQ ID NO: 3179 - protein, 155 aa, Agaricus bisporus
  var. bisporus
  strain H97 / ATCC MYA-4626 / FGSC 10389
MADAQIEKAFQKQHLFQNAKARGGKKVVTRQKRWYKDVGLGFKTPSDAINGTYIDKKCPFTGDVSIRGRILTGKVLSTKMTRTIIIRRDYLRYISKYSRYEKRHTNLAAHVSPAFRVELGDTVTVGQCRPLSKTVRFNVLRVSRNKATAKSFGKF

SEQ ID NO: 3180 - protein, 158 aa, Agaricus bisporus
  var. bisporus
  strain H97 / ATCC MYA-4626 / FGSC 10389
MATTKTTKGKAAAKSAASKDNKAKAAKKAALQGAHSHSSRKTRTSVSFHRPKTLRLPREPKYERKSINHAPRMDQYRTIVSPLNTESAMKKIEEHNTLVFIVDVRANKRQIKDAVKKLYDVDAAKVNTLIRPDGKKKAYVRLTADADALDVANKIGFI

SEQ ID NO: 3181 - protein, 160 aa, Agaricus bisporus
  var. bisporus
  strain H97 / ATCC MYA-4626 / FGSC 10389
MPHSFGYRARTRQMFSRSFKEHGMIGLSTYLTNFRIGDIVDIKANAAQQKGMPHKFYHGRTGVIYNVTPSAVGVIVYKVVGNRYIEKRVNIRVEHIKHSKCRQEFLDRVKANHDAHVAARAKEERVDLKRKPAQPREARTVSTANNAPQTMRPVPYETTI

SEQ ID NO: 3182 - protein, 186 aa, Agaricus bisporus
  var. bisporus
  strain H97 / ATCC MYA-4626 / FGSC 10389
MGIDIAKHHVKKGQRTAPKSEDPYLLLLVKLYRFLARRTDSSFNKVILHRLFLSKTNRPPLSLSRIARETSKATDLDSKIIVQVGTVTDDIRLTEVPKLSIAALRFSRAAKERIIKAGGEAITLDQLALRSPLGANTILLRGVKTAREAYKHFGMGPHKHKKPHTISKGRKFEQGRGRRKSRGFKV

SEQ ID NO: 3183 - protein, 218 aa, Agaricus bisporus
  var. bisporus
  strain H97 / ATCC MYA-4626 / FGSC 10389
MSSKLSVSSVRGSVKELLAEANGEKKRKFTETVELQIGLKNYDPQRDKRFSGTVKLPHVPRPRMSICILADAADIDRAKQIDLEYMSVDDLKKLNKNKKLVKKLGKKYDAFLASETLIKQIPRLLGPGLSKAGKFPTPVSHAEDLNNKITEVRSTIKFQLKKVLCLGVAVGHVDMNDDQVLANVMLSINFLVSLLKKNWQNVKSLHIKSTMGKPIRLY

SEQ ID NO: 3184 - protein, 250 aa, Agaricus bisporus; identical to SEQ ID NO: 614
  var. bisporus
  strain H97 / ATCC MYA-4626 / FGSC 10389

SEQ ID NO: 3185 - protein, 287 aa, Agaricus bisporus
  var. bisporus
  strain H97 / ATCC MYA-4626 / FGSC 10389
MPVDRLEDKVVLRHPKGATVEVLYYGATVTSWKVQGVERLFVSANASLDGSKPVRGGIPVVFPCFGAPTHRDHMKLPQHGFARSEEWSFESIVLDNDVGVSVRLTLSPTARIASKFERNFKLAYVVTLAEHQLSTDLHVYNPSESSHDLEFQALFHNYIRAPASSVRIKPLQNLGYYDKTQQTDEGKALRRIESRAEVDVNIFTDSVYENSPGDYQVSWSGGEIDIRTKSLDNVVVWNPQEGGKKIADMEENGWERFVCVEPGYVRGFVKVSPGEKWIGQQTLTIKT

SEQ ID NO: 3186 - protein, 311 aa, Agaricus bisporus
  var. bisporus
  strain H97 / ATCC MYA-4626 / FGSC 10389
MPSLQFLPQPLTAAIVGCPFSGGQRRTGVDQGPIRLVEAGLVEQLKGLGWNVVFDGHHQFEEYNNLDDAPIGIMKNPRTVSQVNRSVAGVVMNHAKNGMLPVTLGGDHSLAMGTISGSLAVHPDACVIWIDAHADINTIETTDSGNMHGMPLSFLLGIGDKIQEFDWIKPVLKPERLVYIGLRDLDAGEKRLLREHNIKAFSMHEVDKYGIGKVVEMALDYVNPKRDLPIHLSFDVDALDPSVAPSTGTPVRGGLTFREGHYICEAIHETGLLVSLDLMEVNPSLAEAADADKTVAVGCSLVRAALGETLL

SEQ ID NO: 3187 - protein, 306 aa, Agaricus bisporus
  var. bisporus
  strain H97 / ATCC MYA-4626 / FGSC 10389
MEAELERMMMGRAAAARGDQTVPDNGEVIHISSLALLKMLKHGRAGVPMEVMGLMLGEFVDEYTVQVIDVFAMPQSGTTVTVESVDHVFQTRMVDMLKQTGRPEMVVGWYHSHPGFGCWLSSVDINTQQSFESLNSRSVAVVIDPIQSVKGKVVIDAFRLINPHTVISGREPRQTTSNIGHINKPSIQALIHGLNRHYYSIAVNYRKTDLEQSMLMNLHKRNWTEGLKLRDFRQHKESNEVAIKSMLTLSEAYNKSVQEESTLSADQLKTRHVGKQDPKRHLEEAVEKAMGDQVVQNLGTMLLAEL

SEQ ID NO: 3188 - protein, 311 aa, Agaricus bisporus
  var. bisporus
  strain H97 / ATCC MYA-4626 / FGSC 10389
MNSFVDQFSTHSPTAQLKRAQKLIAAEDDDYSDASWGSQAGPGGMIKGIPAFKVPAVADPTAFLRLHTDDHADPNCRIKIQHGTTTLAFRFKGGVIVAVDSRATAGSYVASGTVKKVIEINPYLLGTMAGGAADCQFWETYLGMHCRLHELRNRERISVSAASKYLSNLVYSYKGMGLSMGTMICGWDKTGPAVFYVDSDGTRLKGDLFSVGSGSTFAYGVLDQGYRWDLTDEEAQELGRRSIFAAGHRDAMSGNTCNLYHVKEEGWDFIGNYDISKMYYEGPGDVPGAPGGGYGYAIRTEGRSAANPPPS

SEQ ID NO: 3189 - protein, 312 aa, Agaricus bisporus
  var. bisporus
  strain H97 / ATCC MYA-4626 / FGSC 10389
MAANVPKIKFNNGEEIPAVGLGTWQSSADDVKNAVEHALKEGYRHIDCAWGYGNEQHVGEGIRASGVPRSEIFITSKLWSTWHSRVEEALDQTLANLGTDYLDLYLIHWPVPLNPKGNHPAFPLLPDGKRDVDHSWHLKDTWKQMEAVLKKGKVKSIGVSNFSKMKLEEILPSAEIVPAVDQLELHVYNPQHELVKYLKSKGITPQAYSPLGSTKSTLLTDADVVEIANKHNLQPADVLLGYLLAKEMVVLPKSVTPSRITSNLSGAIRALETLTKADVERLDGLAAAGKQNRFITPPWPIELGFDNWPKLL

SEQ ID NO: 3190 - protein, 344 aa, Agaricus bisporus
  var. bisporus
  strain H97 / ATCC MYA-4626 / FGSC 10389
MSYEKALSSFSEEEIIKEQEEITKFLEEPGTVAKFSEACKNIGQTAVSIDENFRIVQKGFATIVEKYGKDFPEVGSVYVPRWNGYMARWNGETGMLWSSRKLAAETAAALTDYGINLGLIADIQSPDDLEGAKLELQQYVEKHPVHIAKTVAEDFENLKTDIQGFSKDFMAYIEEQKQELTEDAERFEAEIKQLQETITKLNVEIVVAVIAIGCSFALGIVEGFLAIGPLLKLIADRIAAQRDLNTAQANLKATIEKQKALAAMQADFENLKPNIDDICTKLGVFADIWTFATDQSAAINTELQEGMEVLTRKKFQTKLHLLMAQIEPLKEGMRQYASQIVPPS

SEQ ID NO: 3191 - protein, 351 aa, Agaricus bisporus
  var. bisporus
  strain H97 / ATCC MYA-4626 / FGSC 10389
MSAPKARASPTSSVSDSHRNVVDHLSPGGVTEDVQPVGPKRTVQGMDKPHMITVQPLKRSEMQPSYAQDLGTGEVVHGVYGSLLQGLGSVLGLCGAVPCMPCPNPFREVNQGSVGLVTRFGQFYKSVDPGLVQVNVCTESLRIVDVKIQISPIGRQMVITRDNVNVEIDSVIYFQITNPYRAAFGITDLRQALIERSQTTLRHVVGARAVQSVVTEREAIAYEIAEIVGDTADKWGVSIEGILIKDIIFSAEISASLSSAAQQKRIGESKVIAARAEVDAARLMRQAADILASPAAMQIRQLEALQHMAKTSNSKVIFVPMQLQNDLANQFTGSSSGSGIKDAVQGEAEIE

SEQ ID NO: 3192 - protein, 348 aa, Agaricus bisporus
  var. bisporus
  strain H97 / ATCC MYA-4626 / FGSC 10389
MPKKPISYVRLGKSGLKISKIILGCMSYGDTRWNKWVIEDEEEVIRHIKVAYDAGIQTFDTANYYSNGASEVLLGKAIKKLNLPHDEIVVMTKLYFVAGREPGVNVSASGLNPDDEGYVNQHGLSRKHIFESVKRSLERLQLDYIDLLQCHRFDSETPIEETMQALHDVVQAGYVRYIGMSSCYAWQFHAMQNYAIANKLTPFISMQNHYSLIYREEEREMMPTLKYFGVGSIPWSPLGRGLLTRPLAQSKETTRSQSDNILPSYGGGEGTNEIVNRVEEVAKKRGISMAQVAVAWTLSKEVVSAPIVGTTSVKNLEDIIAGASVVLTPEEITYLEEPYKPQSIIGNA

SEQ ID NO: 3193 - protein, 358 aa, Agaricus bisporus
  var. bisporus
  strain H97 / ATCC MYA-4626 / FGSC 10389
MGVLDIVPAGVLTGDNVRKLFDYAKANKFAIPAVNVTSTSVANAVLEAARDIKSPIIIQVSQGGAAYFAGKGLANDKQQASIVGAVSAAHHVRLMAKAYGIPVVMHSDHCAHKLLPWFDGMLQADEAYFNDHGEPLFSSHMLDLSEEPKEENIKICEKYFKRMAAIGIWLEMEIGITGGEEDGVDNSNVDNSSLYTQPADVFDVYKALHPISPNFSIAAAFGNVHGVYKPGNVRLRPELLAKHQEYAREQIGSKDSQPLYLVFHGGSGSLAEEIKTAVDNGVVKMNVDTDTQYAYLVGIRDFIEKKKGYLMSQVGNPEGEDKPNKKYYDPRVWVREGEKTLSERVKVACTNLGNVNRL

SEQ ID NO: 3194 - protein, 361 aa, Agaricus bisporus
  var. bisporus
  strain H97 / ATCC MYA-4626 / FGSC 10389
MRLAAGFLLASFLFSGFSNGCPVSSTLSNSVDDVDDRVFVTMPTAALRPASGCFPGFNFKMPESPPASLTGWWCDWDTEYAFVGFSYEVSACQSLHTLKTEFMDIRQRFHGRYVRIYGTCDRKGFNDDVINAAWHAGIGVHALIWFGFDGDNKWKGRRDALFSTLHSNPYAKFVVRVVQFGSEPLFDGVLSSSSLAKEVWRAKSELAKLQIPVTVSDMAYSYQKDRASSHVIDAIDIIDAHILPFFSRDASTAKKSWPLVQQDLNWFLNNGQGKKIYLSQNGWPSKSYPGVEPNSDKAVANVQNEKDYFNLLDAHCSHFKSAPGGGIGWFAHIYSDNQEPGYGIYDTKGRLKFPFSPRVTC

SEQ ID NO: 3195 - protein, 377 aa, Agaricus bisporus
  var. bisporus
  strain H97 / ATCC MYA-4626 / FGSC 10389
MLTTSRSLLGFAQNTLKQGYAVRRYASAAPTAAFAGQKGSNGKYTVTLIPGDGIGPEISQSIKDIYTAANVPIQWEEVSVTPVLKGGKTVIPDTAIQSVKRNTVALKGPLATPIGKGHVSLNLTLRRTFNLFANVRPCVSIKGFKTPYDDVNTVLIRENTEGEYSGIEHEVIDGVVQSIKLITWDASERVARYAFHYAQSSGRKRVTAVHKANIMKMSDGMFLSACREVSKEFPDVAYDEDLLDRVCLQIVTNPRPFSDRVMVMPNLYGDILSDMCAGLIGGLGLTPSGNIGRDASIFEAVHGSAPDIAGKGLANPTALLLSSLMMLRHMNLYEHADRIEKAALSTIAEGKTITGDLGGEATTKEYTSTIIAKLGKA

SEQ ID NO: 3196 - protein, 384 aa, Agaricus bisporus
  var. bisporus
  strain H97 / ATCC MYA-4626 / FGSC 10389
MSVDTSAAQSPTIGVVQDKINVGILGATGTVGQRFITLLSSHPWFKIHALGASSRSAGKPYHSAASWKQTTPIPSSVRELIVHPCDPTEPHFRECTIIFSGLDAEVAGDIEAAFRTAEFAVFSNAKNYRRDPLVPLIVPLVNNPHLAMIPQQQALHNPPLKKGFIVTNANCSTTGYIIPIAALEKSFGPIEAIMVTTLQAISGAGYPGVPSLDIFDNVIPYISGEEEKIEWETLKILGGITENDDGLKVFDMHASHPLRVSASCNRVPVIDGHTECVSVRFARRPPPSPQQVREALAAYTPDAQALGCPSVPRHAITVHEEPDRPQPRLDRYYQEGAGVSVGRVRQCQVLDIKFVVLANNVSIGAATSSIINAELAILRDIVSR

SEQ ID NO: 3197 - protein, 363 aa, Agaricus bisporus
  var. bisporus
  strain H97 / ATCC MYA-4626 / FGSC 10389
MASGADVKVEFDPKDMPFRRLGPSGLRVPVFALGGWLTLGGTVKGDPVKEIIKTAFDAGINMFDTAEAYAKGESEREMGRVIQELGIRRTDIIISTKLFWGVRSGHNASGLSRKHIIEGTKESLERMGLDYVDVIFAHRYDVTIPMEEVVRAFNWVIEKGWAYYWATSEWTARDIEEAWHVADKLGLVGPIAEQCQHHMFHRERPEKEYDPLYRQYKMSTTTFSSLAGGLLTGKYNDGIPTGSRYDTHSTFFAKTIEALQSPEGQEKIRKVKELTKLAEQELDTTPGALALAWVARNTNTGCVILGASSAEQLRENLKAVKVIPKLTPEIMQKIEDILQNKPSPPDMYGRLPIDPLGREPLYI

SEQ ID NO: 3198 - protein, 438 aa, Agaricus bisporus
  var. bisporus
  strain H97 / ATCC MYA-4626 / FGSC 10389
MCEGDHEPQQSWNDAVLWHRDDKATPAPQDPHPERLYKPEVLKTIDDTINGLSEELRALSLDIHGHPELLFKEYYAHDTYTAFMRKHGWKVTEHLHLETAWEATFEHGQGGRVIGVNSEMDALPDIGHACGHNLIGIAGVAVSLGLRAALEKHNIPGKIVLLGTPAEEGGDGKAILLKEGAYKGMDACLMCHPAPGPLGSVSLTSCYAREKLIVEYEGHPAHSALSPWEGRNALDAAVLGYVNISALRQQLKPTTRVHGIFEAVDWAVNIVPAKARFICFIRAPTRSELLPTVERVLPCFHGAAQASGCEVKITHLSQSFDIRQNKALGDEVANIMLNKYGSIDYEWGIRYASTDFGNVSYDLPALHPSFSIPTVPNGGNHTHDFAKSAAMIEAHKQCLVMSIALAGAGLRVLTDDAFFTEVKKAFEEDKEIRKFKDA

SEQ ID NO: 3199 - protein, 436 aa, Agaricus bisporus
  var. bisporus
  strain H97 / ATCC MYA-4626 / FGSC 10389
MNPFGELNSQTTAQYLRTLPAIRERCLALYDLATQDKLLYFDYHPEKEADVVDFCLDIIKRDYNSDPNNIQPHGRWRHLDAGLPRIQPLLTTWSHLQIDIKEQSRRLIDLFLISVLLDAGAGNTWKYIEPGTNKTFNRSEGLGVASAHMFQSGFFSGVEGEPSAGLEKITVERTKEAMQVTSSNPMTGLEGRTSLLSNLSKALTSNPEFFGTEGRPGNLIDFLETQALPTTSNKKTIPLAALWTALLDGLNPIWPSRISLANIPLGDVWPSPTLAQSVSTTSQNRGTQESDILIPFHKLTQWMTYSLVEVFEKVLGWDVQGLDDMTGLPEYRNGGLLVDLGVLVLKPDMLPVNSESGLPTASAEHPAIVEWRAMTVIELDRIADRVRERLGLGKEELSLAQVLEGATWKGGREIAKMKRPGTGGPPIEIESDGTVF

SEQ ID NO: 3200 - protein, 467 aa, Agaricus bisporus
  var. bisporus
  strain H97 / ATCC MYA-4626 / FGSC 10389
MVSRTLLSRALRSAVRPARSYATVRNLGPLTEVTTLSNGLTVATESHSHAQTATVGVWIDAGSRAETDKTNGTAHFLEHMAFKGTGRRTQHALELEVENLGAHLNAYTSREQTVYYAKSFRKDVPKAVDIISDILQNSKLENAAVERERDVILREQQEVDKQLEEVVFDHLHAVAFQGQPLGRTILGPKKNILSIKREDLASYIKTNYTADRMVLVGAGGVDHNELVKLAEKHFSSLPISPNPISLGRLSHSKPSFVGSEVRIRDDDIPTANIAIAVEGVGWSSPDYFPMMVMQSIVGNWDRSLGLSTLNSSRLSHIVSQHNLANSFMSFSTSYSDTGLWGIYLVSENLMNLDDLVHFTLKEWTRMSTGATDVEVERAKSQLKASLLLSLDGTTAVAEDIGRQLVTSGKRLTPQQIETAVDAVSVDDIKRVASKYLWDKDFALAAVGSVEGLLDYNRIRADMASMLY

SEQ ID NO: 3201 - protein, 489 aa, Agaricus bisporus
  var. bisporus
  strain H97 / ATCC MYA-4626 / FGSC 10389
MATGDIGLIGLAVMGQNLILNMNDKGFTVVAYNRTVSKVDHFLANEAKGTKIQGAHSIQELASKLKRPRKIVLLVKAGSAVDDFIAQLVPHLEQGDIIIDGGNSHYPDSIRRAKELEAKGLLFVGSGVSGGEEGARHGPSLMPGGSPAAWPAIKEIFQKTSAQVNGDPCCDWVGETGSGHYVKMVHNGIEYGDMQLIAEAYDILKRGMGLSEDEIADIFLRWNKGVLDSFLIEITANILKFKDDDGEPVLAKILDKAGQKGTGKWTAIAALDSGTAVTLIGEAVFARCLSAIKDERMRASKVIAGPQKEPFKGDKKQFIDDLEQALYASKIISYTQGFMLMRETAQEMGWNLNYAGIAKMWRGGCIIKSVFLGDITAAYQKNPKLESLLFDDFFKKAVSTAQPGWRRINAQATLWGIPTPAFSTALAFFDGYRSEILPANIIQAQRDYFGAHTFRVLPGKENERFKAGEDIHVNWTGRGGNVSASTYST

SEQ ID NO: 3202 - protein, 521 aa, Agaricus bisporus
  var. bisporus
  strain H97 / ATCC MYA-4626 / FGSC 10389
MATPAKDLAQFTREEVAKHSSDDDQWVIIDANVYNISRFKRFHPGGLSVLLDPDVAGQDATEAFYSLHRHEVLERPAYQRLKIGTIAGEQSVIRWRVPGAISKVPYGEPTWLTDGYFSPYFSDKHRAFQKKIRQFMDTVVLPDALEREADGKRPSQSVFDKMAEVELHAMRMGPGKHLQGRTLMGGMVKPEEFDYFHELIITQEISRAVLRGYGDGLLGGKVIGLPPVLNFGSEELKARIVPDILAGKKFICLAISEAFAGSDVMGLQTTAVKTEDGKHWIINGNKKWITNGTFADYFTVGCKTEDGFTVILVERGPGIETSQIKTSYSTTAGTAYITFDNVKVPVENTLGEEGGGIFVILSNFNHERWVMCCASARGQRMIIEECLKWTTQRKVFGKPLNSQAVIRSKLAKMISRAESVQNWLENITYQMCNMTYRQQANKLAGQIAFLKSYSTSCGQDTARDAVQIFGGRGITQSGMGQFVEHYHRTIAFDALLGGAEDVLADLGVRQALRAMPEDVRL

SEQ ID NO: 3203 - protein, 534 aa, Agaricus bisporus
  var. bisporus
  strain H97 / ATCC MYA-4626 / FGSC 10389
MAYQAQEHVRRTFEQLLALLPEQERIRPQILLVAGEVTPYRNDTDREMLFRQESNFFYLTGCNLPSSALLASYQATPASSSTKPITTLFIPAIEEADIMWSIPPPDLVQARGLFDATNIEHPTSFPQAINALLKDAPNALVHTLPKNSPLFPQLPSQYLNQFSPNASPIDKYLLAALQRARLIKDAGELALIKKANEISSRAHETVMRVLGLAVKNKISREKDAGVTRPLLPGEWLIEKEAEAEAIFVASCRREGSIHQAYLPIVASAARAATLHYTCNDKDFAWGPVQPTDHLNNNSFTQTSHPNAAGQEIDPQVLLIDAGCEVNNYASDITRTMPVGNNGRFTPISGQVYDLVLEMQKAAFNMIKPGVHWDRVHLECHKVLVNKFIELGLFKNGTKEEILNSGVSAAFFPHGLGHSLGMDVHDAAEASRPANNETIPKENIGHEKLYPALRLRLPLEAGMVVTVEPGVYFHQHLIAPTRNSKYVDVEVLKKYEHMGGVRLEDVIVITQDGYENFTTVKSERNWVEGVCSGEL

SEQ ID NO: 3204 - protein, 533 aa, Agaricus bisporus
  var. bisporus
  strain H97 / ATCC MYA-4626 / FGSC 10389
MSVRAKSKVCLIVHDGWGIAAKKGLDGNAIEAADTTNMDSIANDHSFRTLHASGTAVGLTDGLMGNSEVGHLNIGAGRIVWQDIVRIDVAIKKRQFHKNSVLLETFERAKKGNGRLHLLGLISDGGVHSHINHLFALLETAKEVGVPHTYVHFFGDGRDTAPRSAAGYLKDLLEFMKKEDYGRLATIAGRYYAMDRDKRWERIKIAVEGLVNGVGEDSKGQDGAINTVEENYKKDVTDEFLKPIIVNGDEGRIKDGDTMFFFNYRSDRMREIATVFGQLEDVVDTKIPKDLEIATMSAYKVGFPFKVAFPPQKMDNVLAEWLSKQGLKQSHIAETEKYAHVTFFFNGGVEKQFEGEERHMIPSPKVATYDKEPKMSVLQVAEKVADVLRKGDHDFVMCNFAPPDMVGHTGVYDAAVEAVSATDKAVGEVYKAAEAAGYILLITADHGNAEQMKDLENGSPFTAHTTNVVPFIMSGDPKQLKFKEDDKNDEEEGALCDVAPTILDLMGVPQPEEMTGRSLLASGGKDAKKEDKK

SEQ ID NO: 3205 - protein, 617 aa, Agaricus bisporus
  var. bisporus
  strain H97 / ATCC MYA-4626 / FGSC 10389
MAGALQNAKRDLNKIRDEDRESRFGQVFGVSGPVVVAENMIGAAMYELVRVGHDELVGEVIRIENDQATIQVYEETSGVTVGDPVLRTGKPLSVELGPGLMGNIVDGIQRPLRSIQELSKSIYIPRGINTDALSRTIKWDFKPASFKVGDHISGGDIFGGIYENSLVDNHKVILQPKALGTITHIAEAGSYTVDDVILETEFEGKTTKHSMMQLWPVRAPRPVTEKLTADYPLLTGQRILDALFPCVQGGTTAIPGAFGCGKTVISQAISKFSNSDIIVYVGCGERGNEMAEVLMEFPQLTMEVGDRQEPIMKRTTLVANTSNMPVAAREASIYTGITLSEYFRDQGSNVAMMADSTSRWAEALREISGRLAEMPADSGYPAYLSTKLASFYERTGKVVCLGNPLRQGTVSIVGAVSPPGGDFSDPVTAATLGIVQVFWGLDKKLAQRKHFPSVNWSFSYSKYTKVLEPYYEREEPGFVELRTKTKEILQKEEDLAEIVQLVGKSALGENDKITLEVARMLKDDFLQQNGMSEYDRYCPFYKTSAMLKNFVAYHDAALKAVAQHDLTFAKIKDTTADIMFKLSQMKFESPSQGKEPIKQTLDSLYNEIQDKFRQIVE

SEQ ID NO: 3206 - protein, 635 aa, Agaricus bisporus
  var. bisporus
  strain H97 / ATCC MYA-4626 / FGSC 10389
MDPTTQSNYDKVATEHVEFDWRLDFENRIIQGSAVHQLTIKAENVHEAIFDTNDLTIDGVSIEGKATSFDLKPKHEVMGSALHVSLPSGLSKGAKLRVQIQYQTSPNSMALQWLEKEQTQGKQFPYLFSQCQPIYSRALAPLQDSPSAKITYSAKVKSVLPVLLSAIRVSPPADGPPHGGKIIGKDEIIYSYNQPVPIATYLIAIAAGNIHFRSFPQHEGKTWTSGIWTEPELLDAAYWEFSEDTTKFLAKEESLVIPYGFGVYDLLVLPPSFPYGGMENACLTFLTPTLVTGDRTLVDVVVHELTHSWFGNGVTHAEASHFWLNEGWTTYMERVLQQFLHSPAHRGFSYLIGNRALRDALEEYKDRPKYQRLIIGFEKGEDPDDAYSSIPYEKGANFLFYIEQTLGGLDVFLPYVKDYVSTFIGKSIRTEDWKSHLYGYFKDQPDKIKALNNIDWDAWFYGEGTELPVQLKFDTTLATQAYALAKRWDEARSTTDIPRLDFKETDLQKFDANQIVVFLEKLQSYSPLPSDLILHLGRLYGVSSTSNAEIRLRFYGVALQDASSPAAQHFAVEAAKWVIGDDGTGIIKGRMKFCRPTFRSISKVNHDVAVETFMKAKNYFHPIARKLIEKDLKLA

SEQ ID NO: 3207 - protein, 726 aa, Agaricus bisporus
  var. bisporus
  strain H97 / ATCC MYA-4626 / FGSC 10389
MSSLDALQPQDLAGLARPSAAVPNVAGDFAFTTISKYDFEEKKFNKTLVVFPVASTFTSAEIPLPKGEVFWLSGTTLAHVVEGDKDNLEIYAFEVCGGYDAATASDRPLDLSCNRVLIGTIPTKTATNFKYNARSRHLVFSDNVYDDYDLNTVNERDKLLASRGTTAMIYDSTYVRHWDTWVGPKKSALFCVALFLHPDYNWRMGPEFFSPMKGSSHHTPVEPFGGTDDFDVSPTHIVYTAKDPILPEAWHTKQNVYIVDIRGASKPRELTSGKQGATHNPVFNHQGDKVAWVELDEDGYESDRAKIVIYDLKVNVRYTLTQHWDRSVESLMFNMEGTFIYLTAGDQAKVKLFYLPVPPTPSESTTDPILDEIYTKPTELTSTGAVTGMYTMFTGRVLFSRSSLTSPNDAYLIQHLPRHLSDLTQPSERVAKGLKGDISKISGFTEAALREKWLHPGEEFYFAGANDKKIHGWAFKPRGWKEGDKKKWPVVLFIHGGPQGAWEDQWSTRWNPNAFTGQGYFVIALNPTGSTTFGRELTDAIKEDWGGKPFVDLINGWKYALDKYPEIDADRAVAAGASWGGYAINWIQSNPEFGFGFKALVCHDGVFDTQYNGFSTDEIFFFNHEWGGRPWEEKGKKLSTKFSPSNFVHKWSTPQLVIHSSKDYRLPETEGISAFQVLQQLGVPSRLLIFPDENHWVLKPENSVVWHEEIFRWFDQFVGEKKDESE

SEQ ID NO: 3208 - protein, 753 aa, Agaricus bisporus
  var. bisporus
  strain H97 / ATCC MYA-4626 / FGSC 10389
MPIRWTPGSYPKARRSDHVDTYQSATRGTVRVPDPYNWLEEHNTETDDWTSEQERYTRAFLDQIPDRDRLEQAFRASVDYAKFGAPTLHDDGRWYWSYNSGLQHQHGLFCPRCSVSSHSHCHLVVVYRSQDDTLPVFKDGSEPGEIFFDPNVLSDDGTVALTHFEFSKSGKLLAYGLSQSGSDESTLYIRPTDAPLNKRDDNQKLPDEIKHVKFSSVSWTPDSQGFFYQRFPAAQDQPSTNGINTGADENAMVYYHKIGTDQSDDILVHKDKDHPTWMFGITVTEDEKYLVLYTSRDTSRKNLIWIADLKKAKFGESILWQKLFDSFDAEYTYVTNDGPIFYFQTNEDASQRKLISVDVSADAVSPSIVIPERKDALLCDVTRVNKDHFVVQYKRNVKDEIYICDNNGRELERLYSDFVGTMSAHCRDTHSWLFVTMSGFNTPGTIAYYDFKRPEGQRLTPFRQTKVKGLNPDDFETRQVWYPSKDGTQIPMFIVRHKSTPFDGTAPCLQYGYGGFNISIDPFFSPMFLTFIQIYRGVIAVPNIRGGNEFGEDWHLGGSLKNKKNCFDDFIGATEYLVKNKYAGAGKVAINGGSNGGLLVAACVNRAPEGTFGAAVAEVGVLDLLKFHKFTIGKAWTSDYGNPDDPNDFDFIYPISPLHNIPDRVLPPFILLTADHFSPSNLSDDDRVVPLHSFKHAAQLQHMHSNNPYPLLLRVDKKSGHGAGKSVEKRIQEAADKWGFVAQSMELVWKHEK

SEQ ID NO: 3209 - protein, 783 aa, Agaricus bisporus
  var. bisporus
  strain H97 / ATCC MYA-4626 / FGSC 10389
MRCLLTASLVFATLAGSVYGHGRDSNSPLPRRKTLGFGPEHPHAVFNSNLHPLQTAGFVSEEPLDVARLFVTDLLGPSVSGGPSWKIRKDSYTDDNTGVTHVYIRQIVNGLEVADGDMNINIKDGRVLSYGNSFYNGPTPAPFSSTTAPEDLRHPQAEFCDQIPRHMPYAVPMPDGQVLLDAPSQSPVISHIAESNCAHPQLPASLTSDSSDFRPALLQFMLAATPNRELAQDITENYQKHIDDMLISDESHFAPGDEATVQFKVDNVPDAVNPAKARLAYIQLPSKLDGAMELQLVWKFEVEMQDNWYESAVTVSTPHRIISVVDWASDAPVPTPSPERKPATYKVFGWGVNDPECGERSVEKESFDGHASPAGWHAIPHEHDPSYISVRGQEKPGFWRNSTTTWGNNVLAQENWEGLNRFMDNYRPDGGEDRVFDYKYEPNETDKEDALAEAKAYINATVTQLFYTANLVHDIYYRYGFTEVAGNFQQYNFGRGGQQNDAVITNAQDGSGFNNANFMTPPDGQNGRMRMYLWNTAIPYRDGDLEAGIVIHEFSHGLSTRLTGGPANSGCLGWGESGGMGEGWGDFLATTIRSNRNYSDYSMGAWAANSITGIRHYKYSMDEDVNPSTYKTLDKPGYWGVHAIGEVWAEMLWVVSQGLIKKHGFSDTLFPPAPGPDGVVPRDHHFWRQDKDLLVPKHGNTLMVQLVLNGMKLQPCRPSFFDARDAIIEADRILTGGENVCLLWKGFAKRGLGFDAQVQGRTPWGGGIRTDGYAVHPDCRDEE

SEQ ID NO: 3210 - protein, 844 aa, Agaricus bisporus
  var. bisporus
  strain H97 / ATCC MYA-4626 / FGSC 10389
MGVKRPGVGSVGRSIDIQVNCYKAEAIDIPVYQYDVAIDPDSMPSRVNMEIFRQVQQDYANIFHKVLAYDGKKIAYATYQVPMGSTSRTFEVTLAPKNGGVTQKPGGRPPRVYKLKLSEAAIINTEVLRRYIAGSQSMNDAVSTSLAAFNTVLRMVPNLECVHNVRSFFNRKFGFEGIGGGIELWRGFFQSMRPGPGYLLLNVDIATCMMYRPGNLLEVCVDFFDNNVPARNLANYLANSDRERIRLGKFLSNLAVTVPATTKNKRRVIKGVAPRGADQITFDQDGKKTTVAKYFQQLGIRLQHPNLHCVEFRPGGALVPLELCQVQPGQIMRKQLPSDKTSKMVSFSTLKPPQRFQLIENGARDLQYGQSEYIRSFGLNINPTLMSLKGRILPTPKLQYGPGSKEPVVVPRFGAWNMAEKKLVRPMTVDRWLLVNLSRIFERDLQNIVRNLIQGFESTGITINHSPLIKPGDPQGNIPQILKSAGMEVFKQRGQPPQLIVIIMPDDGNAAVYSAIKHFGDIVMGVATQCLRPQKCRGANIQYWANVALKVNVKIGGINCTPERRAVPILSDPANATIIMGADVQHPAPGAEGRPSFTAVVGSVDQMASKYVAANALQVGRQELIDDLKTMVKDVLKLHMEYRTHQEKAKNPAPRKLIFFRDGVSEGQFEQVLRHELPLIRDACKEMKISPQITLCVVIKRHHIRFNPITEADRSQNCPAGTVVDTGITSPVEFDFYLQSHGGLLGTSRPSHYAVLYDENKFNADTMQSLSFALCHVYARATRSVSIPAPVYYADIVCARGKHHFPPEFAGRLSDDVSEAGSVESFRSQFMPLHDGQKKMMYFS

SEQ ID NO: 3211 - protein, 860 aa, Agaricus bisporus
  var. bisporus
  strain H97 / ATCC MYA-4626 / FGSC 10389
MPPSDFANADIDKIVDALTTDEAILLSAGVGFWHTHAIERLQIPAVKVSDGPNGIRGNHFFMGTPAKCLPSSTAMGATFDRDLLEEVGLKLLAREAKLRSASVILAPTCNIQRNPLGGRSFESFSEDPFLSGMLCSAYINGIQKGGIGATIKHFVGNDKEDDRTGYDSIIAERPLREIYLLPFMLAQKYASPWAIMTAYNRVNGIHVCENPELLQKILRDEWKSDVMIMSDWFGTYSVDVGLNAGLDLEMPGLNKWRTLESVNRSIQSRKVTAKKVKERARKVLELVKKCAQGAPEILDGDGLERTLDSDEDNALMRKFAAESIVLLKNDKKVLPLDRKSLKKVAIVGGNAKAAVLSGGGSAALKPSYFVSPYDGIVKALKEVNPNIEVTYSEGARAVKTLPTLDFDLFTESGQRGWTGSWHAHENDDSLVALPTPIKTQYVDETRMFISSSSPAGITKKWTLRMKGYLKPRERDCKFEFGLTAAGRAKLFVDGKLVIDNWTRQRRGVEFFGCGSEEETGVVELKAGVKHEIYVDFCNVRGPADGDETETIMDSNPGIRLGGAEVEDPDELLNSAVSIAKDADAVIIVVGLNGDWETEGNDRTTLALPGRTDELVQKVVAANPRAVVVTQAGSAITMPWVDQVSSLLHTWYLGNATGDAIADVIFGNHNPSGKLSLTFPKRLEDVPAHGYFHSEKGKVTYAEGLYVGYKHYQHRNIEPLFAFGHGLSYTSFNISDLRLSQPIVSGDQFDLKATVKLTNTGNITGSQVVQLYIGLPKTSELTHPRWQLRGFEKMRDVKPGESREVELVMDRLSVSYWDKEWVVENGAYDVRVAFTSEEGVGEGQELLGRFNVEKGFGWRGL

SEQ ID NO: 3212 - protein, 900 aa, Agaricus bisporus
  var. bisporus
  strain H97 / ATCC MYA-4626 / FGSC 10389
MLPLQVSRFTSLGARRCVVVAGQRRAAVQAVRSTTQTRNVQSVAQTDRDTIMRLLYSIGTKREVERHLRIFSSSSHPSQPAKFAVIKIGGAVLDDLDELALSLSFLYRVGLYPVVLHGAGPQLNVILEREGVVPDYIDGIRVTDAKTLSIARRVFLEENLKLVAALEALGTRARPITSGVFTADYLDKSKYGLVGKITKVDKRPLEASIRAGALPILTSLAESLDGQIMNVNADIAAGELAKELEPTKIVFLNDKGGMFHGVTGEKLDVINLDEEYEELMKQPWVKYGTKLKLREFKEMLDHLPRSSSIAVISASSLQKELFTDSGAGTLIRRGYRLFKYSSIERVGADRFRQVVHDRDPEVLSGHQSVTEVLNNLKKTPYTLYGDDPMDVVAVVSHPEGEVPVMTKLLSSRAGILNNVVDNVFNAIKKDHRKLFWTAPADDENRAWHFERADGSFTRAGKSLFWYGVQDVKEVEKIVEEFDKKGRIERNYLPVGPAAPPHKNVAAAAASGTRAYSTIARRLVGTQGKRGYATMAPEPVVQHTTQPKKVALIGARGYTGQALTTLLNAHPYLELSHVSSRQLVGRKLEGYDKSEITYSNLSMEDVERMEKDGEVDAWVMALPNGVVKPYVDAIDRGKKEGEKEGRKGSVVIDIGADYRFEEGWTYGLPELYGRSQIRTAKRISNPGCYATNAQMLLAPLVNLLNPASIPTVFGLSGYSGAGTVATTDSDGKPISLPKITPEALGGAVKPYALTDHIHEREAGFHLTDLISASASGTTNTAGKKVKVAFVPSVASWFSGIISTASVPLNRRVTAKEVVELFEEKYAKEKLVRVKKEVPVLGDVEGRHGVVLGGFQVHSEGERVVVVGGLDNLLKGAATQCLQNLNLSLGYEEYTGIPVDIE

SEQ ID NO: 3213 - protein, 1076 aa, Agaricus bisporus
  var. bisporus
  strain H97 / ATCC MYA-4626 / FGSC 10389
MSAQFHPKEDLVVSASMDQTVRVWDISGLRKGSPHQGGPGGMAGTSGPGSNHFETFDNFSTVKYVLEGHDRGVNFAMFHPTLPLIISAGDDRVIKIWRMSETKAWEVDSCRGHFNNVSSALFHPKHELIVSCGEDKTIRVWDLAKRTAIQTFRRDHDRFWYLAAHPNLNLFAAGHDSGLIVFKLERERPAFTVHQDTLYYVRDKYIRSYDFSSGSDIGLLSVRKFGSPYLPPRTISFNPAERSVILTISSDNGLYELSALPQSAQGEVKDSSADGKKGSGNSAIFVARNRFAALNKTTQLIEVRDLSNSTVKTIKPPVQTNEIFYGGTACLILSSTSSVVLYDIQQQKTIAELNSPPVKYVVWSNDGSLVALMSKHTITIANKTFSQHTLIHETIRIKSGAWDDSGVFLYSTLNHVKYCLAQGDHGVICTLDNPVYLTRVKGKTVHCLDRSARPRTITFDPTEYRFKLALLRNNYEEMLYIIRTSNLLGQSIIAYLQKKGFPEIALHFVQDTNTRFELAIECGNLDVAMETAREIDRPDCWERLAQQALKQGNHKVVEKAYQQTKNFDKLSFLYLATGSTEKLSKMQKIADARGDPMSRFHNALYAGDVAGRIAVLREVGLHPLAYLTAKGNGLDELAAEILEAAGLTEADIDDVPTFGASTLRPPPVVTSTENYNWPILSQGENYFDRALANGSLEGGVEPAYVNGDANAAASSALDAWARDEEIQDEIDPEEGGWELDADADEFKEDEAAEEVVEEEQELGAGAAPGVDETELWVRNSPLAADHVAAGSFESAMQLLNRQFGISNFAPLKPLFLSIYRSSHVYLSPVASLPPLKLHVRRNIGESAPSKVLPVAARSIQSVRSELAEGYRSVSSNKLTEAQATFRSVLQALLLVVIASDDEAKQWRDTVTSAREYLLGVSIELERRRVVEQEPDNLRRNLELAAYFTHCQLQPPQLQIALRSAIGAFAKANNQAHAARFAKRLLELNPDPKIAAQARQRIAAGDRNPRNTVEISYDEFTSFDICAATYTPIYKGSPSVHCPYTDAAYLPECQGKLDPLMELTEIGAPAAGLPAAW

SEQ ID NO: 3214 - protein, 103 aa, Agaricus bisporus
  var. bisporus
  strain H97 / ATCC MYA-4626 / FGSC 10389
MSGRGKGGKGLGKGGAKRHRKILRDNIQGITKPAIRRLARRGGVKRISGLIYEETRGVLKIFLENVIRDSVTYTEHAKRKTVTALDVVYALKRSGRTLYGFGA

SEQ ID NO: 3215 - protein, 101 aa, Agaricus bisporus
  var. bisporus
  strain H97 / ATCC MYA-4626 / FGSC 10389
MAKAKAAAPSGGKAAKKKKWSKGKVKDKAVHAVTLDKPTYDRILKEVPTFKFISQSILIERLKINGSLARVAIRHLKKENLIKPIVHHSAQLIYTRVTSSD

SEQ ID NO: 3216 - protein, 106 aa, Agaricus bisporus; identical to SEQ ID NO: 588
  var. bisporus
  strain H97 / ATCC MYA-4626 / FGSC 10389

SEQ ID NO: 3217 - protein, 137 aa, Agaricus bisporus
  var. bisporus
  strain H97 / ATCC MYA-4626 / FGSC 10389
MARTKQTARKSTGGKAPRKQLAAKSAARKTAAAAGGVKKPHRFRPGTVALREIRRYQKSTELLIRKLPFQRLVREIAQDFKTDLRFQSSAVMALQEAAEAYLVSLFEDTNLAAIHAKRVTIQPKDLALARRLRGERS

SEQ ID NO: 3218 - protein, 144 aa, Agaricus bisporus
  var. bisporus
  strain H97 / ATCC MYA-4626 / FGSC 10389
MGRVRTKTTKRASRVLIEKYYPRLTLDFHTNKRIIDEVSLVPSKRLRNKIAGFTTHLMKRIQKGPVRGISFKLQEEERERKDNYVPEISALDTTASGLEIDPDTKALLDALNFDSIQVNVVQPVTAQPERPRRERRNVPGAGRA

SEQ ID NO: 3219 - protein, 147 aa, Agaricus bisporus
  var. bisporus
  strain H97 / ATCC MYA-4626 / FGSC 10389
MPTRFSKTRKHRGNVSAGYGRVGKHRKHPGGRGLAGGAHHHRTNFDKYHPGYFGKVGMRHFHLTRNQYWRPIINVDKLWSLVPEEEKKGLTENSEVVPVIDTLQHGYGKILGNGKLPKLPFIVKARFVSEIAERKIKEAGGVVKLIA

SEQ ID NO: 3220 - protein, 178 aa, Agaricus bisporus
  var. bisporus
  strain H97 / ATCC MYA-4626 / FGSC 10389
MPPPKSKGGKMLALINWRLKVTINDGRALTGQMLAFDRHMNLVLADCEEFRRVRPKKKAGEETAPEQEMKRTLGLVILRGETVVSISVEGPPPVVDEDKKANNLPGGPGRGMPAGRGMGMMPPMGAPPLARPPMPFAPPGMPGPPPGFRPPGFPQGMPFPPPPPGFGGPPPGFQPPPQ

SEQ ID NO: 3221 - protein, 182 aa, Agaricus bisporus
  var. bisporus
  strain H97 / ATCC MYA-4626 / FGSC 10389
MFVLCDLDRSTSFVVELIVHQVILKLPSPSRQNAPKKVKVQKEEAVSLGPQVAEGELVFGVAHIYASFNDTFVHITDLSGRETISRVTGGMKVKADRDESSPYAAMLAAQDVAVRCREVGVTALHIKLRATGGTATKTPGPGAQSALRALARAGMRIGRIEDVTPIPTDTTRRKGGRRGRRL

SEQ ID NO: 3222 - protein, 196 aa, Agaricus bisporus
  var. bisporus
  strain H97 / ATCC MYA-4626 / FGSC 10389
MSVNNKILRTANAPTSPPDEIEIAVAQALIDLENNVPELKNELRALQISAAREVDVRGGKKAIVVFVPVPQLNAFHKIQARLTRELEKKFSDRHVVFIAQRRMLRKPTRNSRVKQKRPRSRTLTNVHEKILEDLVHPTEIVGKRTRVGVDGSKLLKVFLDSKDQTSLEYKLDSFSSVYRRLTGKEVVFEFPVVSQE

SEQ ID NO: 3223 - protein, 202 aa, Agaricus bisporus
  var. bisporus
  strain H97 / ATCC MYA-4626 / FGSC 10389
MSNPPPDDVEAELKPTATPGYNPGGSKSPEELAALDQEDESLARWKASLGIVPGTSATPAGPKLHVLTLELASSTLPSGKTISMDINNPQEMAAIKKNPIVIKEGVEYNVRMNFRVSGSIIPGVRYIQLVKRGGIKVDKFEKMLGSYGPRDEQYTVDFEPDDSPSGIIARTGTYNVVSRVVDDDGEIHANWEWQFKIGKEWA

SEQ ID NO: 3224 - protein, 194 aa, Agaricus bisporus
  var. bisporus
  strain H97 / ATCC MYA-4626 / FGSC 10389
METSFALIGKGYVIVAADTTSARSIVKMKNDEDKIKTVSPHLLMTYSGEPGDTVQFAEYIERNLRLYQIRNIYPLRPAAASSWIRRSLAESLRSRHPYSVNLLLGGYDTSLSEPKLYWIDYLGTVTEVPFAAHGYGSYFVLSLMDRYHDPEAPLEEGLETLKKCIQEVSKRLIVSPERYKVKIVDKDGVRDIDL

SEQ ID NO: 3225 - protein, 194 aa, Agaricus bisporus
  var. bisporus
  strain H97 / ATCC MYA-4626 / FGSC 10389
MVNLRSQKRLAASVAGVGKRKIWLDPAEQAEIGNANSRTHVKKLIKDGRVIVKPTTVHSRARTQMLLAAKRKGRHTGPGKRKGTSEARMPTKVQWMRRQRVLRRLLRKYRDAGKIDKHLYHSLYQKSKGNVFKNKRVLMEFIHKAKAEKNRTKILSDQMEARRVKNKAVRERRAARIAEKRQALIAIEHEDARE

SEQ ID NO: 3226 - protein, 216 aa, Agaricus bisporus
  var. bisporus
  strain H97 / ATCC MYA-4626 / FGSC 10389
MGISRTSRHKRSASGAQRAHYRKKRKFELGRQPANTRLGPKRIHEVRVRGGNIKYRALRLDGGNFAWGSESVTRKTRILTVVYNASNNELVRTNTLVKSAIIQIDATPFRQWYEAHYAQPVSKKSAKAQAAQAATDGATEEPKKLSNHAQRNLTERKKDAKIDPLLETQFGAGRLYARISSRPGQSGRADGYVLEGKELEFYLRKIRTGKQKHAHA

SEQ ID NO: 3227 - protein, 221 aa, Agaricus bisporus
  var. bisporus
  strain H97 / ATCC MYA-4626 / FGSC 10389
MSRSYDRALTVFSPDGHLFQVEYALEAVRKGTCAVGVRGKDVVVLGVEKKSVLQLQDPRTVRKVVMLDDHICLAFAGLTADGRVLIDKARVECQSHRLTVEDPVTVEYITRHIAGIQQRYTQSGGVRPFGISTLIIGFDPHDNKPKLYQTEPSGIYSAWKANAIGRSSKTVREFLEKNHKDDMTREESIKLAVKSLLEVVQTGAKNIEISVMEGYSKVTGQ

SEQ ID NO: 3228 - protein, 246 aa, Agaricus bisporus
  var. bisporus
  strain H97 / ATCC MYA-4626 / FGSC 10389
MTSIGTGYDLSASTYSPDGRIFQVEYATKAVENSGTAIGLKVKDGVVLAVEKLIHSKLSVPEANRRIQTIDRHIGLATAGLLADGRHIANRARDEATSYRDTYDAPSPLKNLAERLGLYTQAYTLYSSVRPFGISTILGAFDKEGPSLYVIEPSGVYFGYNGAAVGKGRQLAKTELEKLKLSELTTKEAVYEAARIIYLVHEDAKEKEFELEISWIGQETDNVHLPVPRELQQDAEAKAKAALETF

SEQ ID NO: 3229 - protein, 258 aa, Agaricus bisporus
  var. bisporus
  strain H97 / ATCC MYA-4626 / FGSC 10389
MLDSGSAVALSPIETSKRLAAYTAVDHHVKPEHTTIGIGSGSTVPYVVERIVQQGVEANKNRVFIPTGFQSKLLIIEAGLNLGDVDEFPSIDVTIDGADEVDKDLNCIKGGGACHLREKVLAEAAKTFIVVADYRKNSEYLGTTWAPGVPIEVVPVAYVRVLRHLKEVLGSPNATLRMALKKAGPVVTDNGNFVIDAPFDREKMMNSSKVLTQIKLLTGVVEVGLFCGMAKAAYFGNQDGTVAIRRADGTMEQVVAMQ

SEQ ID NO: 3230 - protein, 272 aa, Agaricus bisporus
  var. bisporus
  strain H97 / ATCC MYA-4626 / FGSC 10389
MSVFNATRLIGKTVIVTGASSGIGAATAVLFAKAGSNVILVARRQEILKQVADQCLAAHKESGLTQGGKFATVQLDVSDKTQVAGFLDKVPQELRDIDILVNNAGFVLGLDRIGDIKDSDIEGMFATNVFGLISMTQLLVREFKKKQAGHVINLGSIAGREPYVGGSVYNATKSAVRAFTGALLRELVNTPIRVTEIDPGLVETEFSIVRFRGDTSAAKKVYEGLEPLTGYDIAEEIVWAASRPPHVNIADVLVYPVNQASAVSTYRKPANM

SEQ ID NO: 3231 - protein, 277 aa, Agaricus bisporus
  var. bisporus
  strain H97 / ATCC MYA-4626 / FGSC 10389
MFRNTYDSDNTVFSPQGRLHQVEYALEAVKQGSAAVGLKSKTHAVLLALKRSTGELASYQQKMFRIDDHAGIAIAGLTSDARVLSNFMRQQAMSSKMLFNRAIPVNRLVSAIADKAQVNTQEYGRRPYGVGFLVIGYDESGSHLYEFSPSGNSYEYFAMSIGARSQSAKTYLEKHYEEFADASLEDLIRHGLHALRETLQQDKELNVNNTSIGLIGPRSEHEKKGVQPEGAFRILENEAIEPFLKTMVAKEDPPAPAPAASSSGPAASGSGDVQMSG

SEQ ID NO: 3232 - protein, 288 aa, Agaricus bisporus; identical to SEQ ID NO: 605
  var. bisporus
  strain H97 / ATCC MYA-4626 / FGSC 10389

SEQ ID NO: 3233 - protein, 304 aa, Agaricus bisporus
  var. bisporus
  strain H97 / ATCC MYA-4626 / FGSC 10389
MILLEPHNTIIQTTLLDKIAKPSTLDVQFVDFDGVRFHLTSGDKKTMILLSMNIRCWDELARYGAVDILKREYGALVLDQPENEYNVSLMIDLEQVPQDPESRDAFVMSIAMLKRNALSATFERAFQEQKELETSGGKAELMEIHYRDEEAIYVQASPDRVTVIFSTIFREETDRIFGKVFLQEFVDARRQPSIQNAPQVLYTNRDPPLEIRHIAGLRSTEDTGYVTFVLFPRHFSKPDVAAATISHIQLFRDYLHYHIKCSKAYMHSRMRARVTEFQKVLNRAKAEVATGEKKTVSGRTMVHR

SEQ ID NO: 3234 - protein, 312 aa, Agaricus bisporus
  var. bisporus
  strain H97 / ATCC MYA-4626 / FGSC 10389
MSVVPTPVNLALLICDELPAEFNYGTTTEIYDRWLSGSYPQGVLPRLNMMPYDVRERQEYPTAEELETIDAVMLTGSRDDAFGEDAWITRLLEYTKFIHTKHPRIRMFGICFGLQIISRALGGTVERNAKWEYGLTAINVTHMGKEIFGVERLYELQQIHQDHVPLPSLSNHFSTGSIYLLGSSIRTPNQSFVQLYERCNECELRGKCHEIHQHIRVLTFQGHPEFTDSIVTGLVRKWVKSGRIAEHDARVYFGEGNTPAHLLGKSDPEPMWPYEYDGINVVGRTFWKVFGVKYDDVTETDKSDGSADAGAV

SEQ ID NO: 3235 - protein, 315 aa, Agaricus bisporus
  var. bisporus
  strain H97 / ATCC MYA-4626 / FGSC 10389
MATAEEIRAQSYVGFDSITQQIEHKLLKRGFQFNVIVVGQTGLGKSTLINTIFASHLIDSKGRLQSDEPVRQTTEIQAVSHVIVENGVKLRLNIVDTPGYGDQINNEGCWDPIIKYIKDQHSAYLRKELTAQRERYIQDTRIHCCLYFVNPTGHNLRPVDVIVMKKLSDVVNVVPVIAKSDSLTLEERDRFKAKIREEVLYHNIRLYPFDTDEDDEEEVHLNESIREIIPFAVVGSENNVVIDGKSVRGRRNRWGVVNVEDPTHCEFVNLRNFLTRTHLQDLIETTAQIHYEAFRSKQLLALKDGVQQRPPQQAQ

SEQ ID NO: 3236 - protein, 356 aa, Agaricus bisporus
  var. bisporus
  strain H97 / ATCC MYA-4626 / FGSC 10389
MFSLSLSAVFLAASLARAQVTGTFPPTPLYSKHFPHPTDLPEKVDTDQGLIRGTQFGYNICNSTTEGPTSLCQTSYVNGIEDFCLWSTPTEGKPISDTEGETVAYCSKKGYGTRVMPAGTIKGLQVIKTPSYISYVGFIDQTLLGLPADDFGGELDPHGADLRGNPMGGVVYSKNFTSDGLPTQVPDWNLFIGGGGFCMKICDPADPNAARYCENRLDRIGCAYNLPSNAQTGTFEVCEGDNMEFPGVYTSNGATLTYAQPAESLGPITTVPYTPVVPSSSNCVTYTSAQIYTDLVAPSGATSSGASGAAPTAAGQSTSTATGRGAGSTDSPNDASALAVSGISLLGVVFASLFFS

SEQ ID NO: 3237 - protein, 357 aa, Agaricus bisporus
  var. bisporus
  strain H97 / ATCC MYA-4626 / FGSC 10389
MSQQQSASAAANDIQERIAAARREAESLKEKIRAKKETSADTSLRAMAAEVDPLPRIVMRPRRALRGHLAKIYAMHWAADRRHLVSASQDGKLIVWDAYTTNKVHAIPLRSSWVMTCAYSPSGNYVACGGLDNICSIYSLNNKDGGTNARGARELSAHSGYLSCCRFINDRQIVTSSGDMTCMLWDIEAGVRVIEFSDHTGDVMSLSLAPSNNNVFISGACDATAKLWDIRTGRATQTFTGHESDINAVSFFPNGDAFATGSDDASCRLFDIRADRELNTFTHDNILCGITSVAFSISGRILFGGYDDWTCNVWDTLKGERVGVLTGHENRVSCLGVSADGMALCTGSWDSTLRVWA

SEQ ID NO: 3238 - protein, 359 aa, Agaricus bisporus
  var. bisporus
  strain H97 / ATCC MYA-4626 / FGSC 10389
MAADAPPTVYKEAPILIEWDSLPEEDQFKQQEAMTKFLEEPGTIEKFLADCKKIGQKAAAIEVDFRTVLTGFSSFAANYGAYCPDVVTSYLPRWVAMMNRWTGGLLWSSRALAIETADSLTEYGRVLALIADIKTQSELEGAQNALRAYVDKHPISVVTQIVDGFKNLGIDLQNFSDDFAKYVGTFSVSSSATLTLEASIKSIIQCQATFADLNEKVQKSAMALGCSSVFGILPDIPVSSIGQYVVQRNEVQANLIKTKSGIINSTTDSIIEIIIRYYALLAMQAEFEQYKPNIVNICQDLSTFASVWAFATEQAIEINVALNEGMEVLTRKKFQLKLALLIVQIQPLREGLRTYAAQI

SEQ ID NO: 3239 - protein, 355 aa, Agaricus bisporus
  var. bisporus
  strain H97 / ATCC MYA-4626 / FGSC 10389
MSAYENAPSLTAWESLTEDEQIEHQEEMTKILEDPDTLKQFSEACKNIGQTAVAIDENFRTVQKGFNDLVEKYGADFPDVGRVYVPKWAGFMARWNGDTGMLWSSRKLAAETAASLTDYGINLALIADIQSQDDLEGAQMELKQYVEKHPVEIATRVSDQFKDLRNDIGDFSKDFTAYIEEQKQKLTEDAAAFEADILKYQAEIAELNEKIKIAGITLGFSFIFGVFSAIPAGFLIDFLVKRGKAQENLNQAQANLARTIAKQAALAAMQADFEKLKPNIDQICNDLGVFASVWAFATEQTTEINIALDEGMEVLTRKKFIVKLNLLIAQIEPLKEGMRQYATQITPPSSFADAE

SEQ ID NO: 3240 - protein, 370 aa, Agaricus bisporus
  var. bisporus
  strain H97 / ATCC MYA-4626 / FGSC 10389
MVSRLVLARLAPALRRPSASLLARRLPPSLRTYATADSEHSMTVREALNMAMEEEMMRDEKVFILGEEVARYNGAYKVTKGLMDKFGEKRVVDTPITEMGFAGLAVGAALQGLRPICEFMTFNFAMQGIDHIVNSAGKTYYMSGGNVPCPVVFRGPNGAASGVAAQHSQDYAAWYGSIPGLKVISPWSAEDCKGLLKSAIRDPNPVVFLENEMMYGVPFPMSQEAMRDDFLLPIGKAKVEREGGDVTIVAHSKMVTHSLEAADILAKEGVKAEVVNLRSIRPLDIDTIIKSVKKTNRLLIVEGGFPAFGVGSEICAQIVESEAFDYLDAPVERVTGADVPTPYATNLESMAFPDTPLIVKVAKRALYRTN

SEQ ID NO: 3241 - protein, 353 aa, Agaricus bisporus
  var. bisporus
  strain H97 / ATCC MYA-4626 / FGSC 10389
MTDSTSTKPMRQRMEEYVNNLQEHIVTTFEKLDPDAPPFKRDSWIRTQGGSGRSCVFACPTGDEAGTKSHQSILEKAGVNISVVHGVLPPAAIRQMRADHTSMPLPDRPEGLPFFAAGISLVIHPRNPHAPTCHANYRYFEITEPVNDNTTSPKILAWWFGGGADLTPSYLYESDAKHFHTSIKNACDKHGTELYSSFKKWCDEYFLIQHRNETRGIGGLFFDDLNSGPHQRLSSDSGIKRPVTPDEVFAFVKEVGDSFTSSYIPILEARHATPYTEHHRRWQLIRRGRYVEFNLIYDRGTKFGLMTPGARTESILMSLPETARWEYMSELGTEEGTEEAKLVQVLKEPRSWV

SEQ ID NO: 3242 - protein, 389 aa, Agaricus bisporus
  var. bisporus
  strain H97 / ATCC MYA-4626 / FGSC 10389
MTTRDEFKQAPHNVPGPIEVADEVLFANAHPSMSHVSPDFVPVFGDCIRMTREVLLTKSGQPFLISGSGTLGWDQVAANLVESGENALVLNSGYFGDSFKECLETYGANVAQLKAPIGRAVALSDLEKELRSGKNYKIVTVTHVDTSTGVLSNAKEIASLVRKISPETLVVVDAVCSVASEEIHFDNWDLDIVLTASQKGLGTPPGLSILVASERAMNVFKNRKSPPSSYYASWKKWLPIMKAYEAGSPAYFATPPVNLIYAYRASLNSIVLGDLSLEKRLKLHRAASRRVKDAAKKLGLRQLPESEGEAANGMTALYYPEGLAASDILPRLAKRNIVVAGGLHTEIKDKYFRIGHMGITAVNEERGDIETIVRALEEAVKEARAAKST

SEQ ID NO: 3243 - protein, 412 aa, Agaricus bisporus
  var. bisporus
  strain H97 / ATCC MYA-4626 / FGSC 10389
MSPLIINKAVPGAREFYPLNEPEIGTLWRPDCQDREVPKLFQPLTIRGITFKNRIWVSPMCQYSADNGHLTEWHLVHLGGFATRGVGAVTVEATAVVPEGRISPEDSGLWTDTQIDPLRRIVSFVHAQATKIGIQLAHAGRKASTHAPWIEEAAGRGTLSIATKEENGWPDEVYGPSTLSYKDGKYPNPKEMTESDINKVVDAFIASTKRAEQAGFDFIEVHGAHGYLIHSFLSPLSNTRNDAYGGQSLENRLRFICTLVQRLREIWSKPLFVRISATDWAEGPEKDSDGKWLQWGIEQSTILATRLQTLGVDLIDCSTGGNWASQKIPVAPGYQVPFAAQLKKALPDLLVGTVGLITEAEQAESFLKEGKADVILLARALLRDPHWPLHAARKLGVKIKPAGQYERAWAAL

SEQ ID NO: 3244 - protein, 419 aa, Agaricus bisporus; identical to SEQ ID NO: 842
  var. bisporus
  strain H97 / ATCC MYA-4626 / FGSC 10389

SEQ ID NO: 3245 - protein, 431 aa, Agaricus bisporus
  var. bisporus
  strain H97 / ATCC MYA-4626 / FGSC 10389
MSGQPQKTWTNDPWRPEDKWTPAPKDPHPERIYKPEVLKTIEGTIQGFSDELRALSLDIHAHPELSFKEYYAHDAYTKFMKEHGWNVKEHHHLETAWEATFEYGQGGRVIGINSEMDALDGIGHACGHNLIGIAGVAVSLGLRAALQKHDIPGKIVLLGTPAEESGNGKVDLLEEGAYEGMDVCLMCHPAPGPLGSISLSGSLAIQPILTEYEGHTAHASLSPWEGRNALDAAILAYNNISALRQQIKPTHRIHGIFEGQDWAPNIIPDKAKFTCLVRAPTRAEMKETATRVYPCFEAGGLATGCKVTITPVGEIWELRQNKALSDEVANIILNHHGSIDYGWGISGASTDFGNVSYALPSLHPGFAIPTVPNGGNHTREFAKAAATVEAHKQCLIISIALAGTAIRVLTDDTYFEEVTRIFHAHNWRILM

SEQ ID NO: 3246 - protein, 427 aa, Agaricus bisporus
  var. bisporus
  strain H97 / ATCC MYA-4626 / FGSC 10389
MASSGLDVTKARSHFPALRSGYIFADNAGGSQASQEVIDRISDYLSNTNVQLGADYSVSVESTRRVLVQGPTEVAKLFNARSPDEIVFGSSSTLNLENLARGLEQDIQSGDEFIVTGEHEANAGVWKKLAKRRGAVVKVWHAKPLNPENPYSVSLQIDDLLPLISSKTRVVAFTACSNILGSIVPVKQVNQAIRAAAKSKGAKKVQISVDCVAYAPHRQIDVQDWDVDFCVFSFYKVYGPHISGLYVRHSILQTSVNSIVHHFLKVDDVAYKLQPGGPGYETVYGTTGVVSYLLSLTPASNLQASWDAIALHEQTLVEPLIQYLTEPKQWARGVRIVGDAAVNLTRVPTICFVVVGDRAIKSKDIVEVFDKKGGIGIRYGHFYAYTLVSELTPKLNVDDGVVRISLVHYNTIEEVNRIIEILKEVLV

SEQ ID NO: 3247 - protein, 436 aa, Agaricus bisporus
  var. bisporus
  strain H97 / ATCC MYA-4626 / FGSC 10389
MARHSFTALNSNFVVDAQYRMVKELGQGAYGCVIAAVHSSTGEGCAIKKITNINTKRILTKRCLREIKLLRHFRGHKNITCLYDMDIVFRSDGNFDEVYLYEELMEADLHAIIRSGQPLTDAHFQSFIYQTLCGLKYIHSANVLHRDLKPGNLLVNADCELKICDFGLARGYSPGGGTSRAAGNQGFMTEYVATRWYRAPEIMLSFANYTTAIDVWSIGCILAELLGGKPIYKGRDYVDQLNQILHYLGTPPEETLRRVGSPRAQDYIRSLPIKPRVPFSTLYPRANPLAIDLLGQMLHFDPIKRIGCEQALNHPYFAVWHDPADEPVCPSTFDFSFEEEDTIEGMKKLIVEEVRSFRTEVRNQAKASSQIRRQDSLPIPSREEIINSPVQEHAPPHGATSGFTMSSMGQRPASPVYDDPSADLERELASTHLGKR

SEQ ID NO: 3248 - protein, 457 aa, Agaricus bisporus
  var. bisporus
  strain H97 / ATCC MYA-4626 / FGSC 10389
MPSLRLGDTAPDFEAETTTGNIKFHEWIGNSWAILFSHPGDFTPVCTTELGEVARRAPDFQKRDVKLIGISANGLEDHHAWVKDINEYGSKFGHTDVRFPIIADGDRKISTLYDMLDYQDATNRDAKGLPFTIRTVFVIDPKKTIRLMIAYPASTGRNFDEIIRVVDSLQLGDKHRITTPVNWNKGDDVIVHPSVTSEEAKVLFPEHTVHKPYLRTTPLKDAGKLVQIEHALAAVSQGTTSLGIKATNGIVIATEKKTSSILIDDSVVDKVAVICPNIGIVYSGMGPDFRVLVTRARKSAQAYWKIYNEYPPTRVLTQDIANVMQQATQSGGVRPFGVSLLVAGWDINRGPSLYQVDPSGSFWAWKASAIGKNMINAKTFLEKRYNDDISLEDAIHTALLTLKEGFEGQMTEKTIEIGVVTVPTPQELESSAVGPNTRPKPTFRKLTEEEVRDYLAL

SEQ ID NO: 3249 - protein, 477 aa, Agaricus bisporus
  var. bisporus
  strain H97 / ATCC MYA-4626 / FGSC 10389
MSGFRFLNLVRPFLPILPEVSSPDRKVPFNQKVLWTAVTLLIFLVCSQVPLYGIMSSDSSDPLYWMRVILASNRGTLMELGISPIVTSGMIMQLLAGANLIDVDFSLKEDRALFSGAQKLFALIISLGQATVYVLTGLYGQPKDIGAGVCLLLIIQLVAAALIVILLDELLQKGYGLGSGISLFIATNICESIVWKAFSPTTVNIGRGPEFEGAIVALFHLLFTWNDKGRALREAFWRERLPNVMNLIATIVIFVVVIYLQGFRIEIPVKSNRFRGQRGSYPVKLFYTSNMPIMLESALTSNVFIVSQMLATRFPANLLVRLLGVWEPMEDSPQLRAVSGVAYYMSPPHTMKEAILDPIHTAVYILFIISACALFSKTWIEVSGSGPRDVAKQLKDQQMVMAGHREGSMYKELKRVIPTAAAFGGAMLGLLSVAADLMGAIGSGTGILMAVTIIYSYWEIGMRESGGPEMAALGDLL

SEQ ID NO: 3250 - protein, 493 aa, Agaricus bisporus
  var. bisporus
  strain H97 / ATCC MYA-4626 / FGSC 10389
MSSSAYLLPFDLSAEQKPVQGTKDVVAQALWSSTPSGDKPPKVGTTRTFFNHPNGMTTTISSLGDKFKDKKGNERRELVRKAVGSGIKDLKAYDGVKEVAVDASADPHAAAVAAHLALYKFSLKTTPPDRFNPNNKEAIPEQLSIKPLEQSKEWETGRVYAEAQNWARTLMELPANMVTPTNFAERVKKQFEGIPNVEIFVRDEAWAEKKNMNTFLSVTHGTSEPAKLVEIHYKGAANKSDRPLALVGKGITFDSGGISLKPGANMKLMRADMGGAATVVSAAWALATLQVPVNMITVTPLTENMPGPSATKPGDIIYAMNGKSVEVDNTDAEGRLILADAVYYTATEHNPHTLIDVATLTGAMVVGLGEHFSGVFSTSTELWEKLQAAGEVEYDRFWRMPLDDDYLPQIHSSNADLQNTGGAPGGSITAALFIKAFAEGCEPKDDKPATLNWAHIDIAGTMDATRPGPYQEKGLTGRPVRGLVAYVRGLANN

SEQ ID NO: 3251 - protein, 494 aa, Agaricus bisporus
  var. bisporus
  strain H97 / ATCC MYA-4626 / FGSC 10389
MMSIDHLKKRYETAGQGHLLKFWDGLSPADQKSLSAQLEALDIERVNRIYKKAIVTEAASNDSAAQAEAIEPLPRDATDSIVGNSEKQQEWRQIGLDAVSRGCVGVLLMAGGQGTRLGSSAPKGCYDIGLPSHKSLFQYQAERIARLQRVAELENGKQAGSVIVPWYVMTSGPTRRDTEEFFIKNSYFGLNAADIIFFEQGTLPCLTMEGKVLLDTPSRIAVAPDGNGGIYAATRSPLSPGKPDSVLSDLEKRGILYLHAYCVDNCLVRVADPVFLGYGIQKQADCAAKVVPKASPTESVGVVARRGNKYGVVEYSEISKEQAERRDSETGELAFRAGNIANHFYTTSFLKRVESFEDELAFHIARKKIPHVDLESGQPVKPSKPNGMKLEMFVFDVFPFTERFAVLEVERREEFSPLKNAPGTGSDDPDTSRRDLLAQHHRFLERAGASIKPGVTIELSPLVTYDGEGLQAVKGKTFTKSGIIGSIEELDVLV

SEQ ID NO: 3252 - protein, 482 aa, Agaricus bisporus
  var. bisporus
  strain H97 / ATCC MYA-4626 / FGSC 10389
MSDNKKQEKDFTAEVDALLPEADKIAKSGKLQEALDKLFVLEKQTRNAADLASTTRLAKAIIQYTYDARNHALLNSSIQTLSKKHGQLKAAIQAFVEQAIEWLPEIKSRDGVEKWLELVETLRGVTEGKIFLETPRARVTLLLSHHHEGLAKEASNPQKSKESLQTASDLLSDLQVETYSSMERREKTEFILEQMRLLIAVARIKDDEQGKGKDGKDTLGGGEAEWVKVRVGGRKVNEQFLAEKENEDLKLKYYDLMMQHALHSSAYLDVAKYYYKVWETPSIKEDVNGKGKTALEHIVYYVVLAPHNNEQSDMLHHLYVDPALAKLELHYNLVKCFVTKELMRWPGIQSIYGSFLRKTPVFKVEKQWEDLHTRVIEHNIRVIAEYYSRIKLERLRSLLDLSLKQTEEILSRLVVSGTVWARIDRPAGIVNFRSKRSAEEVMNDWSSDMQKLLGLVEKTWMGMNAAQAAQARVKAATATSSS

SEQ ID NO: 3253 - protein, 533 aa, Agaricus bisporus
  var. bisporus
  strain H97 / ATCC MYA-4626 / FGSC 10389
MSLSRHINAEEIIEKSKDHPQIKFANAARRHGPANTSHWNRDEDVAGLSKYTIPPKGVSSRSAYQLLHDEMALDGNPTLNLASFVHTYMPEEAKKLMVENISKNIVDQEEYPAAQLIHNRCISMIADLWKAPKDAKPIGTATAGSSEAIMLGGLAMKKRWQEARKAAGKDYFHPNIVFGSNAQVALEKFARYFDVECRLVPVTEEHDFVMNPHDALQYIDENTIGVMVILGSTYTGHFENVQLMSDLLDNLQQRTGLDIPIHVDAASGGFFAPFAYPHLKWSFEIPRVVSINASGHKFGLVYVGIGWVLWRDESLLHKDLIFELHYLGSTEYSFTLNFSKPAAPIIGQMFNFLNLGVDGFKRIAVKDLRNARMLSRALNGTYFKVLSSIHLPVHEDRGDDVPEHYRSGLPVVSFRLSDEFKAANPQVEQKWIQTLLKTKGWIVPNYNAPEGTEDVEILRVVVRESVSEDLVERLIVDIVEITESLQGSEGNLMATTSNSAVHHPEKHHGRPDPENFGKSHKPAKKQAGFSRQC

SEQ ID NO: 3254 - protein, 582 aa, Agaricus bisporus
  var. bisporus
  strain H97 / ATCC MYA-4626 / FGSC 10389
MSSSKGPDPILLTLFANRFMSVAEAMGRSLQQTSISTNIKERLDFSCALFAPDGDLVANAPFIPIHLGAMSFAVKYQMKLHGSSLKEGDVLMANSPVAGGSHLPDITIITPVFAPNSKEIIFFTASRGHHADIGGILPGSMPPTSVNIFQEGAEIESFKIVDGGIFDEKGLIEYMVEKPSQYPGSSGCRNIRDVQSDLKAQIAANHKGIQLIHAIVEDYGLETVQEYMYHIRNNAETSVRNLLKDVAKRAGSNILSAVDYLDDGSPISLRVEINETEGSATLDFAGTGSEVRGNLNAPISVVHSAVIYCMRAMLDMDIPLNAGCLVPLDIKIPKKSLLSPSRTAAVCGGNVLTSQRIVDVVLKAFHACAASQGCTNNLTFGTGGKDKDGKAEAGWGYYETIAGGSGAGPGWHGTDGVHTHITNTRIGDVEILERRYPVLLHRFGIRTGSGGTGKWHGGDGVQREIEFLEPMQVSILSERRTRQPYGMEGGNSGMMGKNTWIKKLREGDGDLDNNNETGTRDINIGGKATVFMGKGDRLLIETPGAGAWGVAEEDGRKKDFVHVRAWEPRGSIADRAAAQAAF

SEQ ID NO: 3255 - protein, 600 aa, Agaricus bisporus
  var. bisporus
  strain H97 / ATCC MYA-4626 / FGSC 10389
MAAVADGPVLDLAEKHPEVVDDKVNARDEVSSEVDEVDDVHAGLEFPTEEERLTLRRVADALPWTAYLIAFVELAERFSFYGSQVVFTNFIQQPLPPGSHTGAAGLIGQAGALGLGQKAATGLNTFYQFWCYITPLYGAYIADTRWGRYKTICIAVGIALVGHIILIIAALPGVIEKKSAVGAFVVGMIVTGLGTGFFKSNISPLIAEQYKRTKIFVITTRHGERVIVDPSLTVSRMYMYFYLFINIGAVIGQISMTYAEKFVGFYLAFTLPTVVFLLCPFVLYFGRHRYNRTPPTGSVFSTALRLWKLAARGRWSLNPMQTLRNMRADDFWENVKPSNIKVEDRPKWMNFDDLWVDEVRRGFKACAVFLWIPLYWLTYNQINSNLLSQAATMNTHGLPNDILSNIDPIAIIIIIPICDLLVYPGLRRLGINFSALKKITGGFFTGALAMTWAAVLQHFIYKTNPCHYSAATCKDAEGNAIVSPLNVWLQTGAYFLIAVSEIFASITGLEYAFTKAPTNMRSLVMSAFLFTSAIASAIGEAFVSLSTDPLLVWNYGSMAVIAAIAGALFWLSVRRLDRDEDKLNNLGSGHMEPVRRDKEM

SEQ ID NO: 3256 - protein, 625 aa, Agaricus bisporus
  var. bisporus
  strain H97 / ATCC MYA-4626 / FGSC 10389
MLSRALSRAHRPFLATKAAVRTQSSWSSGKYPLIEHEYDAVVVGAGGAGLRAAFGLAEAGFKTACITKLFPTRSHTVAAQGGINAALGNMTEDDWRWHMYDTVKGSDWLGDQDAIHYMCREAPNTVIELEHYGVPFSRTKEGKIYQRAFGGQSLKFGKGGQAYRCAAAADRTGHALLHTLYGQSLRHDTNFFIEYFALDLIMQDGECVGVIALNMEDGTLHRFRSHKTVLATGGYGRAYFSCTSAHTCSGDGNAMVARAGLPLQDLEFVQFHPTGIYGAGCLITEGSRGEGGYLLNSEGERFMERYAPTAKDLASRDVVSRSMTLEIREGRGVGPEKDHIYLQLSHLPPDILHERLPGISETAAIFSGVDVTKEPIPVLPTVHYNMGGIPTRYTGEVITVDENGQDKIVPGLYAAGEAASVSVHGANRLGANSLLDIVVFGRAAAHHIRDTLTPGKPHKDIPQEAGLESIEFLDKIRQSDGPEPTAKIRLDMQKAMQTDAAVFRTQETLDEGVAKMRQIYNNFEKVGIKDRSMIWNSDLVETLELRNILQNAIQTITAAAARKESRGAHAREDFPERDDATWMKHTLSFQPDISTPDVVLKYRNVIDKTLDENECKPVPPFKRVY

SEQ ID NO: 3257 - protein, 612 aa, Agaricus bisporus
  var. bisporus
  strain H97 / ATCC MYA-4626 / FGSC 10389
MLRLISPSSRHLLRYSSPHHRKFPQQFRAMSAEQPTGSHQDPVTGEMISKQELKRRVASRAKEARKAEKVSAAPPDGAKQKVEAKSREDDLSPNQYYELRSRHVQHLKQTQNPNPYPHKFHVSMSITEYVEKFGPEGVVAPGSKLQGPVVSLAGRIHNIRASGAKLKFYDLHGEGTKVQIMASQQDDEQPEKYIETHEHFRRGDVVGVVGVPSRTKMGELSISPSSMTLLAPNLHQLPSSHFGLKDQETRYRKRYLDLILNDNTREIFIKRSKIINYIRRFLDNKGFMEVETPITSLLAGGATAKPFVTHHNDLDLDLYLRIAPELYLKELIVGGLDRVYELGRVFRNEGIDLTHNPEFTICEFYMAYADYEDLMDITEAMIEGLVKYLTGGSTKLIFHPDGNKGQEGARQLELEFKRPWKRYDMISTLEEKLGVKFPPGDQLHTDESNKWLRELLVKHNVDCSEPRTNARMLDKLVGEYIEPLCISPAFIVGHPQVMSPLAKWHRSRPGLCERFEGFLCGKEICNAYTELNDPFEQRLRFEEQTRQKNQGDDEAQGVDEVFIDALEHALPPTGGWGLGIDRLVMFLTDSTNIKEVLLFPAMKPIENPPAAS

SEQ ID NO: 3258 - protein, 662 aa, Agaricus bisporus
  var. bisporus
  strain H97 / ATCC MYA-4626 / FGSC 10389
MADTHIGVATHPVAPRVAQGTKTPHVGPDIHAYRAAHAQTVGDGSDEWWAKIARETLHWDRPFKTVRSGGFGTGDVVWFPEGGLNASYNCIDRWAYKNPNKTAIVYEADEPGEGCEVTFAELLREVSGIANVLKSFGVKKGDTVSIYLPMTWQGVAAFLACARIGAVHSVVFAGFSAEALRDRILDCKSRVLITSDEGRRGGKTIATKAIVDSALTKCPVVEHVLVLKRTGSNVPWTAGRDKWWHEEILKVPSYCPPEVMSSEDPLFILYTSGSTGKPKGVVHTTGGYLLCAALTNKYVFDVHEDDRFACMADIGWITGHSYIVYGPLANGVTTTVFESTPVYPSPSRYWQTVEKHRLTHFYSAPTAIRLLRRLGAHHVENHDLTSLRVLGTVGEPINPEAWHWYNDHVGKKQCAIVDTFWQTETGSIIVTPFPGAIETKPGSATVPFFGIEPAILDPTSGKELEGNSVEGILAIKNPWPSIARTIYQDHKRYLDTYMQPYPGYFYTGDGAARDEHGYIWIKGRVDDVINVSGHRLSTAEIESALIMHPGVAETAVIGTADDLTGQAVYSFVTLKPEFKYNQDDESSLTKELVLQVRKIIGHFAAPKKIFIVPDLPKTRSGKIMRRIMRKIIAGEGDQLGDLSTLAEPAVVDVIKQKVAAST

SEQ ID NO: 3259 - protein, 675 aa, Agaricus bisporus
  var. bisporus
  strain H97 / ATCC MYA-4626 / FGSC 10389
MSPSVRHPTRTQSRTLLSSLSILFLAALAVLCFFPVAAHAEETHPEYGSVIGIDLGTTYSCVGVQRGGRVEIIANDQGHRITPSWVSFTDDERLVGDSAKNAYHSNPQNTVFDAKRLIGRKMNEPEVKRDMKHWPFKVTEKNGKPSISVEHKGEERQFSAEEISAMVLGKMKETAEAYLGHKVTHAVITVPAYFNDAQRQATKDAGTIAGLHVLRIINEPTAAAIAYGLNKGSGESQIIVYDLGGGTFDVSLLSIDDGVFEVLATAGDTHLGGEDFDNRVIDYFVKSYKKKTGTDVSKNLRALGKLKREVEKAKRTLSSQQSTRIEIESFEDGNDFSETLTRAKFDELNMDLFRKTMKPVEQVLKDANVKKDEIDEVVLVGGSTRIPKVQQLLKEFFNGKEPSKGINPDEAVAYGAAVQGGILSGAEGTDGVVLVDVNPLTLGIETTGGVFTKLIPRNTVIPTKKSQIFSTAADNQPTVLIQVFEGERSLTKDNNLLGKFELNGIPPAPRGVPQIEVTFEMDANGIMKVSAADKGTGKSEGITIKNEKGRLSQEEIDRMVADAEKFAAEDEANRKKIEALNSLSSFVYGLKNQVTDSEGLGGKLDSDDKQTILDAVKEATEWIEENGSTASVEDLEEKLAEVQGVVNPITTKLYEGAGADGPSGDDDFEFDHDEL

SEQ ID NO: 3260 - protein, 780 aa, Agaricus bisporus
  var. bisporus
  strain H97 / ATCC MYA-4626 / FGSC 10389
MGGKGKAPETSARLRKRQDNGTSSYSGSVTSESVQNDEHVAEIFQSPRSRSQVEQMLDTPSASMVVVAILTTIAFALRFYKISHPDQVVFDEVHFGKFASYYITRQYYFDVHPPFAKLLFGLAGWFVGFDGEFTFDNIGDNYTLNNVPYIGMRALPAVLGSLTIPIVYAIMKESGYSTIIAAFSASLILFDNAHITQSRLILLDATLIFFMALTIYAYVRFRKLRYREFTTEWWVWLVLTGVFMACTWGSKVNGILTVACIGIAVLIDLWDILDHKKGTTMDYFYQHFIARAIGLIVIPFVVYLTFFYIHFSILVQSGSGDLYMSPAFQETLAGNEMLLNSAEIRYHDIITMKHKDTKVFLHSHAENYPLTYEDGRISSQGQQVTGYAHDDTNNFWQIIPTKAIPETGPGRVVHNGDVVQLLHVNTQTYLLTHDVASSLMPTNQEFTTWPKDDYKRYNDTLFAVNLIDSDSASWKTKSGYFRLVHVPTKVSMWTHTTPLPEWAFKQQEINGNKNSVEKTAIWFVNEIVDTDDPEGLDNRLEERPSKKPKSMNFLRKFAELQLLMLQHNAGLTGSHPYASTPINWPFSLTGISFWTENDSQKQIYLVGNLLGWWACVVGLSIYIGILGADLIARRRGLDPIADPVRNRLWNNTGFFMLVWAVHYLPFFLFSRQLFIHHYLPSHLASAMIAGSVLSFILSDTINFPISLRGPKTRPQTTQYADVGTKGVVTTVIFSLVMFVMFSYMAPLTYGSPGLTGEEVNSRRLLSTWTLHFAAKKTYDA

SEQ ID NO: 3261 - protein, 814 aa, Agaricus bisporus
  var. bisporus
  strain H97 / ATCC MYA-4626 / FGSC 10389
MADPSGAPPQPGPDDVSTAILRPKKSPNRLIVDEATNDDNSVGTLNPATMELLGLFRGDTIIVRGKKRRDTVLICLSSDDVEEGRIQMNKVARNNLRVKLADLVNVHQCLDIKYGKRVHILPFDDSIEGLSGNIFDVYLKPYFLEAYRPVRKGDTFLVRGGMRTVEFKVIETDPSEFCIVAQDTVIHTEGDPVKREDEESNLADVGYDDIGGCRKQMAQIRELVELPLRHPQLFKSIGIKPPRGILMYGPPGTGKTLMARAVANETGAFFFLINGPEIMSKMAGESESNLRKAFEEAEKNSPAIIFIDELDSIAPKREKTNGEVERRVVSQLLTLMDGLKARSNVVVMAATNRPNSIDPALRRFGRFDREVDIGIPDPTGRLEILRIHTKNMKLADDVDLERIAADTHGYVGSDIASLCSEAAMQQIREKMDLIDLDEDTIDAEVLDSLGVTMENFRFALGTSNPSALRETVVEVPTVTWDDIGGLEKVKLELQETVQYPVEHPDKFLKYGMSPSKGVLFYGPPGTGKTLLAKAIANECNANFISIKGPELLTMWFGESEANVRDVFDKARAAAPCVMFFDELDSIAKARGGSSGDGGGAGDRVLNQILTEMDGMNQKKNVFIIGATNRPDQIDSALLRPGRLDQLIYIPLPDEVSRISILTAALKKSPVAPEVDLNFLARKTHGFSGADLTEICQRAAKLAIRASIDADIRAEREKTARQEAGEEVMEEEVEDPVPMITREHFEEAMQYARRSVQDSDIRRYEMFAQNLQQSRGFGNNFKFPESGDSAAGGAPGAPAGNAGFQQEDADDDLYA

SEQ ID NO: 3262 - protein, 834 aa, Agaricus bisporus
  var. bisporus
  strain H97 / ATCC MYA-4626 / FGSC 10389
MKIAVATSGGDSAGMNAVVRAVVRSGILKGCEMWVVREGYEGLVRGNSQAVQNEGDLINAAAQSAAMDGAAIMKDADHVPDQNLTHNLRFGDGELLKDGTAESVGGRTLKGRYIVRVGWDDVRGWYSQGGTLIGTARSASFRAREGRLAAAHNLVKEGINALIVCGGDGSLTGADIFRSEWPSLIQELRDEGTISEEQLQSHTHLRLCGLVGSIDNDMSLTDLTIGAPTAVHRISEAIDNINSTAYSHSRAFIVEVMGRDCGWLAILAGVAGGADFIFIPERPPKVNPWEDDLCAEIKKHRALGKRKTIIIVAEGAQDLDLKPIRAEYIKDVLTERLGLDTRVTTLGHTQRGGPPCAMDRILPTLQGVEAVEAILESKPGTPTYMIGIQENKITRVPLMQAVEATRNVARLIKSKDFDNALAARGSDFLGYYEAFGSVSSLFDESSKLPLELRMRIGIIHTGAPAGGMNTATRAIARYCIRQGHIPLAIHNGFRGLLDGNVNELNWLSVDAWSPRGGSELGTNRCLPSMDIGAVAAQFQAYDFHGLVIIGGFEGFQSLLQLEQGRKHYPAFHIPMTHLPATISNNVPMTEYSLGSDTSLNTLVTACDAIKQSASASRDRVFVIETQGGRCGYIATMGALATGATLVYTPEDGISLDMLRQDVKFLRTRYAFDVKGKREGRIIIRNEASSDIYSTPVLTKMFEEEGGHLFDARSASLGHTLQGGVPSPMDRVHAVRLSIKCMQFLEVHHRESVAQGHKRNNADGDTAAVITIQSSSLKWVPVQEVYRHADMKNRRGKDTWWAGIKKLAENLGAKPQFLGLHTSSFESPRPSDLTL

SEQ ID NO: 3263 - protein, 1117 aa, Agaricus bisporus
  var. bisporus
  strain H97 / ATCC MYA-4626 / FGSC 10389
MLPVVIPLTMALSTFVLRILSPAFVLFTSLSLLSLRPSSPGSSSPITSVVVANIIPRRAAILSLLSIVSISYFLDGAAFVVYVVYEKVWPHHTGIEINSLLGVAAFAGLAALGAWKDVHGAPVWTLRRIKLVVALALLLDLALVVLLGLRIQQTRNENIPHIPETPPHVPVKDLLHFAFPAFRVLLLIPLLASLSSPRVVYASVETQDSDATLANDSTFLLPSDAGNTLSAGDPSVIAPKASKYGTFRDPRSNLQASAPATRPTTPAPSTVQTVQDKPESKAEISLEPDWSEIWRRLKRLTPYLWPSKSRYLQLLASFCVCILLVERVVNVAVPLILGLLVDILEGRSSLSPWIILLGFVCLRFLQGSGGLAAIRDSLWAPVMQYSDREMSQLSFDHILNLSFAWHTRRKTGEILRVLDRGAAINHTLELILFNIIPTFIDIFIALIVFCILFDWQIAAVIFLVMIAYVIEIFSVYASVTLTRYRTRVRRQMNDRDVITRGIHTDCLLNYETVKYFSGEEHEGERYREAIREYQALEYKVIIYLNLLNLVQNFIITLGLLGGSFMVAYRITQHPEDGSRKFVSFITYLTQLYGPLNQLGYIYRSVNQSLVDTERLLALLNEPSEVNDKENAPDLAVTSGEIEFDNVSFSYDYRTTALNGVSFKVPKGSSVALVGESGSGKSTILRLLYRFYDLREGEGRILIDGQDIRDVTQRSLRQAIGVVPQDPILFNSTIGYNIGYGKIGATPEEIEEATKSAQMHDRIMSFPDGYNTKTGERGVRLSGGEKQRVAIARTLLKNPPILLLDEATSALDTSTEKDIQKALQNLVQGRSSLSIAHRLSTIISADLILVLKEGQVVEQGTFKELLAYDGLFASMWADQVSATEDPAVSLAAGSVDRGVVLENSEDDERPVQEQISKDAFIIPSQGSHIVPSPKPLSVVDLPSSESALQKDDKAKTTEGVSFPSAEPYDVSEDRTTVAEAPPQPDVSSPPLAFPTSPEPERDDQGSSIRVAPAVTFGADVNSSRIGTPDLDSEPKRKRISSQNFQRLARRISVSAKRQGSSMIPSSMIPTIPGLMKRDSSPRVSVDDSNQRDVDSATGSIKGDDKGKKKKDKKDKTRK

SEQ ID NO: 3264 - protein, 1154 aa, Agaricus bisporus
  var. bisporus
  strain H97 / ATCC MYA-4626 / FGSC 10389
MSSTAIREYDAKLLLAYWLERAPPVAPHAQIKTNFQYPAARVAQISWDPATNTITPDTQIPSWVNNSKLVAKPDQLIKRRGKAGLLALNKSWPEAKQWITERAGKPQKVEAVTGTLNNFIIEPFLPHPSNTEYYVCITSQREGDRILFTHEGGVDIGDVDAKALILDIPVIAPFPTREDIASTLLKHVPAEKKDTLVDFLIRLYSVYVDLHFAYLEINPLVVLDAVNGGEPAIHYLDMAAKLDQTAESICGPKWAIARDLSVYEGGGSATTTKGSKVSADRGPPMVWPAPFGRDLTKEEAYIQKLDGSTGASLKLTVLNPEGRIWTMVAGGGASVVYSDAIAAHGFAHELANYGEYSGAPTEGQTYEYAKTIIDLLTRGNSRPDGKILIIGGGIANFTNVAATFKGIIRALKEYRNQLINHNVKIFVRRGGPNYQEGLKAMRLLGESLGVPIRVFGPDTHITEIVPLALGVDISQSRTASDDGLKSVQPGTPPPQVAAVGVTEDSVGTIHPDGGRTQPKDHIVHFEAGKASKRPWFRPFDAETRSFVYGLQPRAIQGMLDFDYSCGRATPSVAAMIYPFGGHHIQKFYWGTKETLLPVYTSLKDAVAKHPEVDVVVNFASSRSVYSSTLECLEFSQLKAIALIAEGVPERHAREILWKAKEKDVLIIGPATVGGIKPGCFRIGNSGGMMDNITSSKLYRPGSVGYVSKSGGMSNELNNILSLVTNGTYEGIAIGGDRYPGSTFIDHLLRYETDPDCKMLVLLGEVGGIEEYRVIEAVKTGKITKPIVAWAIGTCAKMFTTEVQFGHAGSMANSDMETADAKNRAMRDAGFIVPDTFEELPRVLRETYESLVRSRVIVPKKEVEPPVIPMDYKWAQELGLIRKPAAFISTISDERGQELLYAGMRISEVFKEEIGIGGVMSLLWFKRRLPSWATKFIEMVLMLTADHGPAVSGAMNTIVATRAGKDLISSLASGLLTIGSRFGGALDEAASMFSQAHDTGLTPREFVDSCRKANKLISGIGHKIKSVNNPDLRVELVKEYVIKNFPSHTLLDYALAVEKVTTSKKDTLILNVDGCIAVCFVDLLRDSGAFAPDEADEYIKIGALNGLFVLGRSIGFIGHHLDQKRLKAPLYRHPADDIFINMADVSQPRVLGRMQ

SEQ ID NO: 3265 - protein, 1107 aa, Agaricus bisporus
  var. bisporus
  strain H97 / ATCC MYA-4626 / FGSC 10389
MNDTMEVLDEKANGALMQDIEEIIPVTNHEAFVLKHMPDLGHDVKDFKVFTWHLANWKKLDKKLTGPEFDCGGHKWRILLFPFGNSNAPPNDTVSVYLDYAEPKKSPEGWHACAQFALVISNPNDPTIYTVSHAHHRFIAEECDWGFTRFSELRKLFSIQEPQSRPTIEDEAADITVFVRVLEDPTGVLWHNFVNYDSKKETGYVGLKNQGATCYMNSLLQSLFCTRYFRKAVYQIPTEEDIPTESVPLALQRVFYHLQSSDQPVGTTELTKSFGWKSLDSFLQHDVQEFNRVLQDKLEAKMKGTKAEGAIAKLFVGKMKSYIKCVNVEYESSRIEEFNDIQLNVKGMKDLHESFKDYVAVETLDGENKYHAEGYGLQDAKKGIIFESFPPVLHLQLKRFEYDIQRDAMVKINDRHEFPFEIDLSEFLDPAADRSQPWIYKLHGVLVHSGDLHGGHYFALIKPDAESRWLKFDDDRVTPVTDKEVLEENYGGEAINGLPPALQRNQVRAMKRFTNAYMLVYIRQSALIDVLPPFTEEDTPPHLKRRLDEERLQLEAKKREREEQHLFLTAKVITDETFARHEGFDLATFDEKNWPASDLPTFRVLKTETYSTFKNRVAQHFNFPENQIRLWVLVNRQNKTVRPDTHIPENEPALTVEVIRNNMAARQNDLRLYLDVIPDPSKPEPPAQSIMIFLKHFDTSKQTLYGLGKVYVLRNAKVGDLVPVINERMRWTPGTPLKLFEEIKPGMIEQMKPKFTFAQSEIQDGDVICFQIDLPEKEIHDYDAQGLYSNPLQFYDFLQNRVMIIFKPKYDEPDHDHPEFSLILSKKHNYDIMATKAGEYLRHDPIKLRFTTTHAGNGSPKSVLRRSLNQSISEIMGPNYINPSTTVILYEKLEVSIVELETKRSLKVIWTGVHNKEEATHPFLLPKTSPVHELADHLSKLVTLTPNGSHKIRIFEVSKDGKMQKEFTGSEMIGNIPDPVELFAEEVPKEEVEADESDKVIGVFHFSKDLTRTHGVPFKFVVKRGEKFIDTKKRLQERIGVTDKEFAKYRFALIQASTFKQPSYIEDGTDDTIYEHQFAPEDVLGLDHFDKSGRARTGGEKAIVIRG

SEQ ID NO: 3266 - protein, 1789 aa, Agaricus bisporus
  var. bisporus
  strain H97 / ATCC MYA-4626 / FGSC 10389
MSARPGRISQEGYSSASPSADTHLHDPFSSANGHGRRGYYDTESDIDYTRRDGYRETYASDGSSPALNEPGYYDNNPAYDMYPPQDTDSDGDVYQRYNVPPSSESLGPQGRVPFPDASTPTFLESSVPGASRDSYPAWTPENNIPLSKEEIEDIFLDLTQKFGFQRDSMRNMFDFLMQLLDSRASRMPANNALISLHADYIGGHHANYRKWYFAAQLDLDDAIGKTQNPGLNRLKSTRGKQQRPSEKTLLSALERWRQAMNNMSQYDRLRQIALYLLCWGEGAQVRFVPECLCFIFKCADDYYRSPECQSRVDPVPEGLYLRSVIKPLYRFIRDQGYEVMDGKFVKRERDHDEIIGYDDVNQLFWYPEGIARISLRNKTRLVDLAPALRFMKFHEIDWERAFYKTYYEKRSFGHLIVNFNRIWVIHISMFFYYTAYNTPRIYLPPGGSAAMTWSATALGGAVATVIMILATLAEFSYIPTTWNNTAHLTRRLIFLLITLALTCGPTVYIAIVEHNGGGGSVALILGIVQFFISVVATVLFAVFPSGRMFGDRVAGKSRKYLASQTFTASYPALDKSKRFGSILLWLLVFACKFAESYFYLTLSFSLPVAVMVGMKVQGCNDRIFGDALCTNQAAFTLTIMFIMDLVLFFLDTFLWYIIWNTVFSIARSFTLGLSIWTPWKDIYTRLPKRIYAKLLATQDMEVKYKPKVLVSQIWNAIIISMYREHLLSINHVQNLLYHQVDTGAGGRRSLRAPAFFVAQGDKGKKPEFFPPGSEAERRISFFAQSLTIAIPEPLPVHAMPTFTVLTPHYSEKTLLSLREIIREEDQNTRVTLLEYLKQLHPVEWENFVKDTKILAEESAMFNGNNPFANEKEGGSKVDDLPFYFIGFKSAAPEFTLRTRIWASLRAQTLYRTVSGMMNYSKAIKLLYRVENPEVVQMYGGNTDRLEQELERMARRKFKFLVSMQRYSKFNKEEHENAEFLLRAYPDLQIAYLEEEPPRKEGGDPRIFSCLVDGHSEFVPETGRRRPKFRIELPGNPILGDGKSDNQNHAIIFYRGEYLQLIDANQDNYLEECLKIRNVLGEFEEYAPPAQSPYLQWGLKDFKKPPVAIVGAREYIFSENIGILGDLAAGKEQTFGTLAARSMAWIGGKLHYGHPDFLHGLYMNTRGGVSKAQKGLHLNEDIYAGMNAFGRGGRIKHTEYYQCGKGRDLGFGTILNFQTKIGTGMGEQMLSREYYYLGTQLPIDRFLTFYYGHPGFHIHNMLVILSVHTFITTMVFLGTLNSNLRICQYTPSGQMIGGQGGCYNLVPVFEWIDRCIISIFLVFMISFLPLFLQELVERGTWKAVFRLAKQFGSLSPVFEVFSTQIYTHSILSNLTFGGARYIATGRGFATTRIYFSILFSRFAGPSIYLGFRTLIMLLYVTLTFWTNWLIYFWVSIVALCIAPFLFNPHQFVFTDFVIDYREFLRWMCRGNSRSHNNSWIGYCRLSRTMITGYKKKKLGHPSEKLSGDVPRARWRAVIWSEIIFPVCFAILFVVAYMFVKSFPDEDGNFGPSGLVRIAVISLGPIVFNAAVLLVLFIFSVFLGPMLDPVFPKFGSFMAFVAHALGTLGMIAFFEFLWYLERWDASRVVLGVIAVIAIQRAIHKILISVFLTREFKHDETNRAWWTGRWANRGLGSHLMSQPAREFIVKIIELSLWSSDLILGHMILFMLTPPILVPYFDRFHATILFWLRPSKQIRAPVYTNKQRRQRRWIVIKYGLFYVFVIALFIALIAIPALLHDRINIDCSFCQSL

SEQ ID NO: 3267 - protein, 89 aa, Agaricus bisporus
  var. bisporus
  strain H97 / ATCC MYA-4626 / FGSC 10389
MASSTVNVVRYTALFSGVLYGWYHRRTVQAENQKHQIEHAIHNRERLIAEARDAWKRKQDALKDTTVVTDPEDPRFDLDKLIAKWEESS

SEQ ID NO: 3268 - protein, 123 aa, Agaricus bisporus
  var. bisporus
  strain H97 / ATCC MYA-4626 / FGSC 10389
NGGRNKKGRGHVKFMRCSNCSRCVGKDKAIKRFTVRNMVESAAVRDINEASVYPEYVIPKLYIKIAYCVSCAIHSHVVRVRSREGRRNRAPPPRIRWKDGKKVNPAVAAAEDAKAAAAGGAKA

SEQ ID NO: 3269 - protein, 138 aa, Agaricus bisporus; identical to SEQ ID NO: 542
  var. bisporus
  strain H97 / ATCC MYA-4626 / FGSC 10389

SEQ ID NO: 3270 - protein, 120 aa, Agaricus bisporus
  var. bisporus
  strain H97 / ATCC MYA-4626 / FGSC 10389
MLAERMAKHKVDCWLINTGWTGGKFGSGKRCPLKYTRRIVDAVHSGELAKCEYENFGTFNLSIPTALEGVPRELLNPSLAWKDKEAFNKEVRKLGSMFQRAFALYEKDVEPKVREAGPQI

SEQ ID NO: 3271 - protein, 135 aa, Agaricus bisporus; identical to SEQ ID NO: 576
  var. bisporus
  strain H97 / ATCC MYA-4626 / FGSC 10389

SEQ ID NO: 3272 - protein, 147 aa, Agaricus bisporus
  var. bisporus
  strain H97 / ATCC MYA-4626 / FGSC 10389
MAPKPASTAGKAPASTASKAPAKSAEGAKAAKKTSKPVATGADGEKKKRKKVRRETYSSYIYKVLKQVHPDTGISNKAMAILNSFVNDIFERIATEASKLASYSKKSTISSREIQTSVRLILPGELAKHAISEGTKSVTKFSSAGSK

SEQ ID NO: 3273 - protein, 147 aa, Agaricus bisporus
  var. bisporus
  strain H97 / ATCC MYA-4626 / FGSC 10389
MALRRITRELNDLGRDPPSSCSAGPTGENMFQWQATIMGPGDSPYSGGVFFLSITFPTDYPFKPPKVSFTTKIYHPNINANGSICLDILRDQWSPALTISKVLLSICSMLTDPNPDDPLVPDIAHLYKTDRARYEATAREWTRKYAM

SEQ ID NO: 3274 - protein, 140 aa, Agaricus bisporus
  var. bisporus
  strain H97 / ATCC MYA-4626 / FGSC 10389
MASRLFLTADCLFCKIIKGDIPSLKLIETEFSYSFLDINPLSKGHALIIPKYHGEKLTEIPDEYLNDTLPIAKKIAVAQGVKEYNILQNNGALAHQVVGHVHFHVIPKPSAEEGLGIVWNHTTPPSEELKKVFEEIKSRL

SEQ ID NO: 3275 - protein, 145 aa, Agaricus bisporus
  var. bisporus
  strain H97 / ATCC MYA-4626 / FGSC 10389
MGSNKPRGLQAARKLRDSRRENRWADKLYKKRALGNVFKTSPTGGSSHAKGIVLEKVGVESKQPNSAIRKCVRVQLIKNGKKVTAFVPNDGCLNFVDENDEVLISGFGRSGKAKGDIPGVRFKVVKVSGVGLLALWKEKKEKPRS

SEQ ID NO: 3276 - protein, 149 aa, Agaricus bisporus
  var. bisporus
  strain H97 / ATCC MYA-4626 / FGSC 10389
MKLEIDSFSGYRIYPSKGRLFVRGDSKVFRFSSAKTQSLFLQRKNPRKIAWTQVYRRMHKKGITEEVAKKRSRRTVKHQRGIVGADLATIAARRNQTAAVRQQARLAAITKAKTEKKEKEAKKAKPTRQAAPSGPKVSKQQMKGGKGGR

SEQ ID NO: 3277 - protein, 159 aa, Agaricus bisporus
  var. bisporus
  strain H97 / ATCC MYA-4626 / FGSC 10389
MSSTAWTMSLEDRKRLIEAAFEAKNGTYSPYSKFPVGAALMAADGSIIKGANIENASYGATICAERTALVKAISEGVRSFVALAVTSNVKSAISPCGICRQFIREFCSLDMPILLVPGDYPQAGKSEPGYSEGGVRDTTLGELLPMSFGPEDLELPRRK

SEQ ID NO: 3278 - protein, 147 aa, Agaricus bisporus
  var. bisporus
  strain H97 / ATCC MYA-4626 / FGSC 10389
MLISKQNRRIIYENLFKEGVLVAKKDFNAPKHEDLDVPNLEVIKALQSLTSRGLVKMQFSWQWYYYVLTPEGVEYLREWLHLPAEIVPATYKKAARPTRPAGIRSGGEGAYRPPRGDRDDYRKKEGAPEGFSQKTQYAGVGRGGPRE

SEQ ID NO: 3279 - protein, 167 aa, Agaricus bisporus; identical to SEQ ID NO: 501
  var. bisporus
  strain H97 / ATCC MYA-4626 / FGSC 10389

SEQ ID NO: 3280 - protein, 168 aa, Agaricus bisporus
  var. bisporus
  strain H97 / ATCC MYA-4626 / FGSC 10389
MLLYEDILTGDEMFSDAFPFKEIDDVVFEVDCKMISVKAGVDVNIGANPSAEDQEEALEEGTSQVNNVVQSFRLQTTSFDKSSYKTYLKSYMKAVSAKLKESNPERASAFEKKAIEYVKKVLANFKDYEFYTGGGMDPDGMVALLNYREDGVTPYLTFWKDGLKIVKL

SEQ ID NO: 3281 - protein, 180 aa, Agaricus bisporus
  var. bisporus
  strain H97 / ATCC MYA-4626 / FGSC 10389
MPAYHSTFNELPDTRQVGNLAVLPFRTRIRGPAPIGDPSQYDIIDETLDLFRANSLFRNFEIKGPADRTLIILILYVSDCLAKLGSQRATPSQIEAGKLLNTLSVDNFAIPGDATFPLNAHYAAPASRANSEYLRGYLTQARQELAARLAEKLYADGTGKPSKWWMSFQKRRFMNRSLGS

SEQ ID NO: 3282 - protein, 202 aa, Agaricus bisporus
  var. bisporus
  strain H97 / ATCC MYA-4626 / FGSC 10389
MTIYYLLTFLLLAAEMVTFCVLVSPLPFYVRKRVLTLLTTSTFVSRIAYGLKISFIFVGILFADALQRMYRITVEAESAKSTSSGAIDARSESNLHARKFYSQRNVYLTGFCLFLSLVLIRTFQIMRDLIQTQEECGQLKKKANGKQPEDNKEVADLKKKLAERESEYGILKKQAGQNAKEYDRLATEYNKVSGQTSDKRRD

SEQ ID NO: 3283 - protein, 207 aa, Agaricus bisporus
  var. bisporus
  strain H97 / ATCC MYA-4626 / FGSC 10389
MSSNAIDFPFAHEDVVQKTVDDVRTLSNMSAAADQGVHDVNHSSKTLAERYKDDITALAVLPPRVDEFAKSFNDILWAGRTSATHGVSRITDFVDVTVVGIVEDIKTPEDRDEAVIELNAIAGQKSKPVDGFPGATRRLDGIWNTHRLMPPTSRRSLRKQLISRRQSSLLPCQSRLQKGSGSPQSIRVQHLNGCNYICGAIAVLISV

SEQ ID NO: 3284 - protein, 211 aa, Agaricus bisporus
  var. bisporus
  strain H97 / ATCC MYA-4626 / FGSC 10389
MAEGSNYDYLFKVVLIGDSGVGKSNLLSRFTRNEFNLESKSTIGVEFATRSINVDGKTVKAQIWDTAGQERYRAITSAYYRGAVGALLVYDIAKHATYVNVTRWLKELRDHADTNIVIMLVGNKSDLKHLRAVPTDEAKTFASENGLSFIETSALDASNVESAFQTILTDIYRIVSAKSLESSTSNIEPPKESISVGITQDTKQQQGKTCC

SEQ ID NO: 3285 - protein, 220 aa, Agaricus bisporus
  var. bisporus
  strain H97 / ATCC MYA-4626 / FGSC 10389
MATHALLQALRANKPAFGAWLTSPGLFHARTLAKSSPYLSWIAIDCEHGIIPLVPGAAESTVAIESAGVSPLIRIPATGATGSTSWQIKNALDAGARGVIVPMVSNADKAREIVGDCKFPPKGRRGFGSPFTHTTWGMNVPQYLESANENILVMVQIETKEAVENVREIAQVDGIDVLFIGPYDLSISLGYPPPSPDPHPDIEQVIQKILKEAHDAGKKW

SEQ ID NO: 3286 - protein, 221 aa, Agaricus bisporus
  var. bisporus
  strain H97 / ATCC MYA-4626 / FGSC 10389
MLSIARTALRSRTILTRGLAARAASVHTLPPLPYAYDALEPHICEEIMKLHHTKHHQTYVNGLNAAEEAYAKTDDIKAKINLQSALKFNGGGHINHSLFWKNLSPTSEHGGKLGDGPLKDEINNAFGSIDEFKKKFNAATAAIQGSGWGWLGWNSSTQQLEIVTTANQDPLLSHIPIIGIDIWEHAFYIQYKNVKPDYLNAIWNVVNFEEAEQRLLAAAKK

SEQ ID NO: 3287 - protein, 240 aa, Agaricus bisporus
  var. bisporus
  strain H97 / ATCC MYA-4626 / FGSC 10389
MDHIDFNRLKTGEVNLGTSIMAVQFQNGVVIGADSRTTTGSYIANRVTDKLTHVHDRIYCCRSGSAADTQAVADAVHYQLQMYTQMSGGPPPVHTAAALFQRICYENKDGLSAGIIVAGWDKEAGPSVYNIPLGGGLFRQPWAIGGSGSTYVYGYCDATYKEGWGRDETVDFVKNTLALAMSRDGSSGGVIRMCVITEEGVERLFVPGNELPKFWEGAEVLGHAKKINQAEGLAPMVVEA

SEQ ID NO: 3288 - protein, 220 aa, Agaricus bisporus
  var. bisporus
  strain H97 / ATCC MYA-4626 / FGSC 10389
MSFPTDPFEQLHYNMVRAHQTFKLGYDAILKNLENNQEAIKSDLPNFLGYCQAWVISIDTHHDSEEEIVFPFLNQKMDFEPEKEAHKVIHKGLSDITAIVTQFKADPSKFDPDHLKENLVKLKDPLFEHLDIEVEHIKSSKLKEVGFGDAELKDLNQRLDKYAQSHGDPFLVVPYMRSHTPPELKNVWPPMPWVLRKVVIPYVLAWKHSGYWKYAPYSVS

SEQ ID NO: 3289 - protein, 251 aa, Agaricus bisporus
  var. bisporus
  strain H97 / ATCC MYA-4626 / FGSC 10389
MPRQFFVGGNFKMNPIDRATEASLVGGLNKATLDPTTEVVIAPPAIYLISVKASVRPDVAVSAQNLYPKDSGAFTGEISPKQLVDAGIPWVILGHSERRTIFHESSEFVAQKVRAALDSGLKVILCIGETLQQRESGETGAVNEAQLKPVIAAIKNEEWKNIVIAYEPVWAIGTGKVATSTQAQDTQAEIRAVIRKSVSATVADEVRIIYGGSVTANNCKELATQPDVDGFLVGGACLKPEFANIVNARLA

SEQ ID NO: 3290 - protein, 249 aa, Agaricus bisporus
  var. bisporus
  strain H97 / ATCC MYA-4626 / FGSC 10389
MSYGGNYGSGGGFPPPAGRPTQGGGYGGPPGGGFGGSPGGGYGGPPGAGYGGASGYGGGFSAPQQSHGPPPGADPQLWNWFTAVDTDRSNHITAPELERALINGDWTPFDLDTVKLLMTIFDTDRSGTIGFNEFSGLWKYIKDWQNVFRHFDRDRSGSIDGGELQQALHQFGFNLAPPMIELVQKKYDVKASATQMPGAPVPGISFDRFVRACVVVKQLTEAFQKLDTDRDGWVQISYDQFMQTVLSLP

SEQ ID NO: 3291 - protein, 242 aa, Agaricus bisporus
  var. bisporus
  strain H97 / ATCC MYA-4626 / FGSC 10389
MFLTRSEYDRGVNTFSPEGRLFQVEYAIEAIKLGSTTVGIKTPDGVILGVEKRVQSPLLEASSIEKIMEIDNHLGCAMSGLTADARTMIDHARVTAQNHAFTYDERIKVESVTQAVCDLALRFGESVHDEEAMMSRPFGVALLIAGIDEHGPQLFHTDPSGTFVRYEAKAIGSGSEAAQSELQDKWHKQMTLKEAQVLTLRVLKQVMEEKLDQHNVQLAQVTKDKGFEILDEARLQAVIEEM

SEQ ID NO: 3292 - protein, 268 aa, Agaricus bisporus
  var. bisporus
  strain H97 / ATCC MYA-4626 / FGSC 10389
MSVYRSPGFDFSNSNRNNFLLNKGVPLPKATSTGTTIVGCVFKDGIVLGADTRATEGPIVADKNCEKIHFITEGIRCCGAGTAADTEFTTALISSNMELHALQSGRKPRVVTAMTMLKQTLFRYQGHIGAALVLGGVDPTGPQLFTIHPHGSTDKLPYVTMGSGSLAAMAVFESKWSANMERQEALDLVILAISAGIFNDLGSGSNVDACIITADGTEMLRNVDMPNQRVQKERDYKFRRGTTAWTKEDVRKFVVEETVTGTDEMDTS

SEQ ID NO: 3293 - protein, 265 aa, Agaricus bisporus
  var. bisporus
  strain H97 / ATCC MYA-4626 / FGSC 10389
MEQQQKAPADIRNVAQFLRSGGSGIKVRVGALDGKRLDYFKGKSAVKALLSPAYAKLKNVPKVATETEATTILSAVNAFAFYLRVQRGGPTGTSSSSPKALQIIREQVFRPDEYYAWFYEGSQWTTYAGGILMVAIMLAGVMFPLWPSIMRLGVWYLSIGMLGLIGLFFAIAIVRLIFYIVTVVTASPGIWIFPQLFADVGFVESFIPLWEWDVPKKKSKKKKGEKKEKGKSKNGSASPAIEVVESSDSQPFRGARVEEVPDEDA

SEQ ID NO: 3294 - protein, 252 aa, Agaricus bisporus; identical to SEQ ID NO: 481
  var. bisporus
  strain H97 / ATCC MYA-4626 / FGSC 10389

SEQ ID NO: 3295 - protein, 266 aa, Agaricus bisporus
  var. bisporus
  strain H97 / ATCC MYA-4626 / FGSC 10389
MDHFPTNWGNPRKETFDACSTYPLPHRATNDTQDAFSSGVQHTQQPIVTGTSVLALKYKDGVMMAADNLASYGSLARFKDIQRLHPVGKYTVIGAGGDMSDFQYIQKFLEQLIIEEFTSQDGHDLGPAQIHEYLSQVMYSRRSKINPLWNSLLVGGFKDGKSFLSYVDLLGTTYSATTLATGFGAYLAQPILRKEVEGRENELTEEEAIRVMESCMKVLYYRDARSLDKYQLAVITADGVKISESRHLSTTWSFAEGIRGYGAQTQ

SEQ ID NO: 3296 - protein, 273 aa, Agaricus bisporus
  var. bisporus
  strain H97 / ATCC MYA-4626 / FGSC 10389
MAFATQASRLIVPLGIAAAVVQASLYDVPGGYRAVMFDRFAGVKSQATGEGTHLLVPWLQRAILYDCRIKPRNISTTTGSKDLQMVSITLRVLSRPDVEHLSKIYQSLGMDYDERVLPSIGNEVLKSIVAQFDAAELITQREVVSSRIRADLLQRAGEFNIKLEDVSITHLTFGKEFTQAVEAKQIAQQDAERAKFIVEKAEQERQAAVIRAEGEAEAASTISRALDKAGDAFVALRKIEASKAIVQSLANNPNVTYIPSSGGGVLLNVPTNK

SEQ ID NO: 3297 - protein, 268 aa, Agaricus bisporus; identical to SEQ ID NO: 506
  var. bisporus
  strain H97 / ATCC MYA-4626 / FGSC 10389

SEQ ID NO: 3298 - protein, 289 aa, Agaricus bisporus
  var. bisporus
  strain H97 / ATCC MYA-4626 / FGSC 10389
MDGQEALRRIARQFRAAGGGGPGGPGKGLFAGSGLLIALVVGGYALNASLFNVDGGHRAIKYSRIHGVKPDIYSEGTHLVLPWVERPVIFDIRAKPRSIASLTGTKDLQMVNITCRVLSRPFQSNLPQIYRELGQDYDERVLPSIVNEVLKSVVAQFNASQLITQREHVSRLVRENLTQRALRFNMVLDDVSITHVAFSPEFTHAVEAKQAIQEKQSIIVRAQGEAQSAELVGEALRKNKGFLELRRLEAAREIATHLSTSGNKVMLDSQGLLLNIAGDDAKDLLKNTK

SEQ ID NO: 3299 - protein, 342 aa, Agaricus bisporus
  var. bisporus
  strain H97 / ATCC MYA-4626 / FGSC 10389
MNTEEISTNIITLTRHVLNDGLRLGDAATGDLTLLLTAISFTSKFIATNVRKARLINLVGLAGETNVQGEEQKKLDVLSNDIMVNALRASGKTAVLVSEELEDAIIIEDPYKGKYCVVFDPLDGSSNIDAGVNIGTIFGIYKIKDGSTGSVADVLRPGSEMVAAGYIMYGSSANLVLSTGQGVNGYTLDAALGEFILTHPNIQIPPRGKIYSFNEGNAMYFYSPVNAYLKSIKYPTAPKTPYSARYIGSMVADVHRTLLYGGIFGYPSDKKSKNGKLRLLYEAFPMAFLTEQAGGIATTGTSRILDIVPSGIHDRCPVFLGSRDDVLDLMKFYKEVPAEGTN

SEQ ID NO: 3300 - protein, 342 aa, Agaricus bisporus
  var. bisporus
  strain H97 / ATCC MYA-4626 / FGSC 10389
MSFPSTVEAITIPKVGGVEVIEKTTRPFPEVKPGDVVIKVEYGGVNFIDTYFRSGLYPLEKLPAILGKEVAGTIAALPTDPAVLNDETFKKNAFAVGGKVAVADFMGTHATYISVPWKLALPVPASISTRVAAAATLQGITAVSFFEEAYKVKKGDTILVHTIAGGLGLLFAQLGRRIGATVIGTTSTPQKAELAKSRGADHVIIYTKEDTVQRVLQLTNGQGVDAIFDGVGKTTFDSNFKMIKRKGTIVSVGNASGAVEPFSLLKLIEKNVKLLRPTMSKYVFTAEEAFYYGQQVWKLVDNGELKINIFKEYPFTAEGAREAQQDLTGGKTTGKLLIKIAD

SEQ ID NO: 3301 - protein, 340 aa, Agaricus bisporus
  var. bisporus
  strain H97 / ATCC MYA-4626 / FGSC 10389
MPVVIPPRKNERSKKLHSKVVIIGSGPAGHTAAIYLARANLSPLMFEGFMANGFAAGGQLTTTTDVENFPGFPTGILGPELMEKFREQSIRFGTRIITETVSKIDLSSRPFRYWREMQEGDEPETADTIIIATGASAKRLGLKGEQTYWQSGISACAVCDGAVPIFRNKPLAVIGGGDSAAEEATYLTKYGSHVYVLVRRAELRASKIMANRVLKNPKITVLWNTVAVECQGDGDLLNNLRIKNVQTGEERDLAVNGLFYAIGHEPATAIVRSQLQTDPDGYIITVPGTTETSVKGVFAAGDVQDKRYRQAITSAGSGCMAALEVEKLIAEEEELGEIDM

SEQ ID NO: 3302 - protein, 366 aa, Agaricus bisporus
  var. bisporus
  strain H97 / ATCC MYA-4626 / FGSC 10389
MSHSVHSMSSQKTEIPKVQKAAIVQKSGARVEVRSNVPVKQPEELAPGECLVKMHCTGVCHTDLHAAMGDWPIPTKAPLIGGHEGVGEIVAIGENTTHSPVKIGDRVGIKWIAYSCLECEPCRKSFEQNCENVQISGYTIDGTFQQYVVSYVHCVTPIPEGLDSAAAASLLCAGLTVYRALKYSETGPGDWIVLPGAGGGLGHLAIQYAKYMGRRVIAIDGGEEKRKLCLSLGADHWIDFKTCKDVTAEIKRVTGGKGAHATVVTTASSSGYSQAIDYLRPNGRLMAVGLPAKATLDADIFWTVYKSITIHGSYVGNRQDAIECVDIAATGAVKVHYAEKHIDDLEDVYSALNEGTIAGRIVLALN

SEQ ID NO: 3303 - protein, 372 aa, Agaricus bisporus
  var. bisporus
  strain H97 / ATCC MYA-4626 / FGSC 10389
MPFSALNSASKVPNVPGGPARSAEEFWAALLVSAGLVLAGGVFAGLTLGLMGLDELHLRVLATSSDDPKEKKNAQKVLKMMRKGRHWILVVLLLGNVIVNESLPIFLDSALGGGVAAIVISTAAIGSVIPQAVSVRYGLAIGATCSPLVLGMMYLFAPIAWPIAKLLDFILGANEQHTYKKAELKSFLQFHRTGEEPLRDDEIKILNGVLELNSKNVETIMTPLKDTVVLSADAVLDHKAVEAILLSGYSRIPVHEPGNPLAFIGLLLVKKLLNHDPSKRLPVSALSLSILPEAYPSINCFQALDYFQTGRAHLLLISLTPGKAGGAIGVITLEDIIEEILSEEIVDETDRYEDNQHKRRAKRATTAAIMRG

SEQ ID NO: 3304 - protein, 383 aa, Agaricus bisporus
  var. bisporus
  strain H97 / ATCC MYA-4626 / FGSC 10389
MVMTGNAGVYDPRRVLEHADFKVLQKGEKPVPGANIAAFYNPAHEIHLVQKPRPKPGPGQVLLHVRATGICGSDVHFWKHGRIGDSMVLSDECGSGHESAGEIVEVGEGVTQWQPGDRVAIEAGVPCSQPSCDACRLGRYNGCPDVVFFSTPPYHGTLTRWHLHPAQWLHRLPDNVSFEEGSLCEPLSVALAGIERAGLRLGDPLLICGAGPIGLVTLLSARAAGAEPIVITDLFQSRLDFAKKLIPGVRTVLIKKELTAKEQAEEVKKAAGCQLTVTLECTGVESSIHTAAYSLKFGGKLFIIGVGKSEQILPFMHLSVNEIDVGFLYRYANQYPKAIRLISSGLVNVKPLVTHRFALEDAIDAFHVAADPTQGAIKVQIRD

SEQ ID NO: 3305 - protein, 368 aa, Agaricus bisporus
  var. bisporus
  strain H97 / ATCC MYA-4626 / FGSC 10389
MSNPKPFVLRWGIISTGRIAGDFVEDILLDPKTRDVVDVIHKVVAVGSRTAGKAQEFIDAKAGGDKNIKAYENYADVYADSDVDAVYIATPHTFHYEEALAAIEARKHVLIEKPSTATSAELRHLLQIAEQKKVFVMEAMWTRFLPLTQEVLKVIDEEDLGRPITLHADLSGDFHIDKLSLEHRILNPRLGGGALLDLGPYVMVWAIICIFEHSSNHNSRPTSISGLMLKSPLTGVDTNTSFTLNFPDAQAILTASINVNSISSFGCNVRYERGTVNISSPLYCPKEFTVKHHDKTGRTIRHVTRFGDYVGGGWHFQADEVARCIRDGKKESEIWSHQKMILVMEVFDEVRRQGGYVFPPGVEKVVSV

SEQ ID NO: 3306 - protein, 407 aa, Agaricus bisporus
  var. bisporus
  strain H97 / ATCC MYA-4626 / FGSC 10389
MATQSSSPAYKRLLEQHDDDVVIVSAIRSAMTKGKKGGFKDTKPDYILSQVLRSVYSRVNLDPKLIEDISVGNVLPPGGGASAARMAALYAGIPNTTAINTVNRQCSSGLTAVSQIANEIKVGQINIGIGAGVESMTNGFGSRAAPEISDSVLENQEAEDCLIPMGLTSENVAKDYNIPRQVQDEFAAKSFQKAAAAQKAGKFKDEIVPIKTTIVDPKTEKEVEIVVDADDGIRDGVTAASLSKLKPAFTKDGCTHAGNASQVSDGAAAVLLARRSVAKKLGLPIVGKYVNSAVVGVPPRIMGVGPAFAIPKVLDLVGLSKDEVDFYEINEAFASQAVFSIQHVKIPFEKVNINGGAIAMGHPLGCTGARQISTGLSVAKQTGGRVFVTSMCIGSGMGMAAVFVSEH

SEQ ID NO: 3307 - protein, 394 aa, Agaricus bisporus
  var. bisporus
  strain H97 / ATCC MYA-4626 / FGSC 10389
MKAVVALGFLAPSVLAATVPNELFSSLVPQKILATFNDLPNPTQYPQYTDQQAGDWQYFNPNTWTSGFFPSTLYALNTRRTLCGATSRNGLGIANWLELGREASRALIPLETKNSQGHDVGFLSFPFVEELAVNPNSETAVTAINSFAKLLANRFNPTVGCTRSWDAPDPDFQVIIDNMMNLEVLFHSAELTNNDTLRTIGKKHADTTMINHIRQDGGTWHVLHYNTFTGAVTAKRTAQGFADSSTWSRGQAWGIYGYATMFKLTGKAEYRDTAVRLADYFLDHIPNDGIVPWDFNAPSPKPADSSAATIAANGLLLLSQLETTPSLKEKFSNAAIELLDKITDLAWNPSWQSLLSNGTVNAPARNQLTGTVYGDYYFVKAGNELISMGLASCT

SEQ ID NO: 3308 - protein, 406 aa, Agaricus bisporus
  var. bisporus
  strain H97 / ATCC MYA-4626 / FGSC 10389
MTVYQATASAPVNIACIKYWGKRDTKLILPTNSSLSVTLDQDHLRSTTTSRADPSFTNDRLWLNGKEEEIKEGGRLWTCIREMKRLRKEEVEDKSSSEPKLSTYNVHICSHNNFPTAAGLASSASGFAALVSSLSHLYSLPVSSSTLSLIARQGSGSACRSLFGGFVAWQMGSNPSGSDSLALQIAPQSHWPDIHALICIVSDDKKGTSSTSGMQRTVETSSLLHHRINTVVPHRMETISKAIQEKDFDTFAKVTMADSNQFHAVALDTEPPIFYLNDVSRAIIALVVEYNRLGVEEGKGYRAAYTYDAGPNAVIYAKKENVKEILELVVEYFPQREGAFKDAFGLFGGGGKVGGKLPMGFNENVAKRFEVGAVKGLIHTRVGDGPRKLGDGEGLLNDEGLPKSLA

SEQ ID NO: 3309 - protein, 380 aa, Agaricus bisporus
  var. bisporus
  strain H97 / ATCC MYA-4626 / FGSC 10389
MSLAPVNDGIGIANLPNQRHKIVAKRGAHFTLMVVGESGLGKTTLINTLFSTELSPPKNYNRRHHKQLDKLTEVEIIKAELEEKQFKVKLTVIDTPGFGDYVNNADSWTPIVEFIDDQHEAYMRQEQQPQRNEKTDLRVHACLYFIRATGHTLKPLDIEIMKRLGTRVNLIPVIAKADTLTQNDLQTFKQRIREVVDAQGIRIYSPPIEPDDESADLARVLIDSMPFSIIGSTEDVKTADGRTVKGREYLWGVAEVENENHCDFKKLRSLLIRTHMLDLVSTTEDIHYENYRQQQMETRKFGEPKPKKLDNPKFKEEEETLRKKFTEQVKAEEARFRKWEQHLIQERDRLNKDLEEAHSAIKQLEAELDNLNYGRGTNRR

SEQ ID NO: 3310 - protein, 407 aa, Agaricus bisporus
  var. bisporus
  strain H97 / ATCC MYA-4626 / FGSC 10389
MLARHIFRVQKLSRGFATHAESFTGLPATLHLKTGQSFKGKSFGAPHSRFGETVFSTSITSYTESMTDPSYRGQILVFTTPMIGNYGVPHNEAPYDSQDVGVVLESKGVQCAAVIVGDVAERFSHYNAVESISSWCKRHNVPGITGVDTRAITTLLRDQGTTLGRVAVGPDACLPAPAASEYWDPITENLVDQVSTKVPYELNPTGDIRVAVLDFGAKANILRSLVRRGAAVTVLPWNYDFNAIRDQYDGLFLTNGPGSPSHCMEAALNLRKTIQQWNKPIFGLCMGHQIIGMAAGLEAYRMTFGNRGHNQPVLALASSGSIKAGRVYVTSQNHQYALKLQDTFPAGWEPFFINCNDSSVEGIKSTAESGKNVIGVQFHPESSGGPLDTIEVGSVIAGKSYQILTPS

SEQ ID NO: 3311 - protein, 387 aa, Agaricus bisporus
  var. bisporus
  strain H97 / ATCC MYA-4626 / FGSC 10389
MRFSLRPSRSSNRNGRPMSPIRRRKLLLSYVPDWLLTIVLAGIFFSLDKVEGYRRVFALEDTSLRHPYAVHERVPNIALYFICFVAPFLLQPVVNVFTIRSWWDLHNSSLGLILSLALTGSVTQFSKITVGRPRPDIVDRCQPPIGATDPEFGLSSWEICTQPDNGILRDGFRSFPSGHSSMSFAGLGFLSFYLAGKLHLFDKRGHTGKAWLSLAPFCCAALVAISRTMDYRHHWHDVLVGSLLGTVMAYFSYRQYYPPLESELSHRPFSPRIKREDDELIPTHNHHPSGSNFPFVQAPTTSTQGNGQYTATNNDEYELDGTVLRPHTEPLEEIWKRDGPGVSDTDQSPSYEGGEQVYQANTAPSLPPIRTSSPPQAYVYEPRAQPV

SEQ ID NO: 3312 - protein, 402 aa, Agaricus bisporus
  var. bisporus
  strain H97 / ATCC MYA-4626 / FGSC 10389
MAAVAVKSPVAPAGIKQYYQAKIESAELLINQKTQNLRRLEAQRNALNARVRLLREELQLLQEPGSYVGEVVKVMGKNKVLVKVQPEGKYIVDIDSDVEVSALKATLRVALRSDSYTIHKILPNKVDPLVSLMMVEKVPDSTYEMVGGLDKQIKEIKEVIELPVKHPELFEALGIAQPKGVLLYGPPGTGKTLLARAVAHHTDCKFIRVSGSELVQKYIGEGSRMVRELFVMAREHAPSIIFMDEIDSIGSSRGESGSGGGDSEVQRTMLELLNQLDGFESTKNIKVIMATNRIDILDSALLRPGRIDRKIEFPPPGPEARVSILRIHSRKMSLQRGINLRALAEKMGQCSGAEVRGICTEAGMYALRERRQHVTQEDFEFAVAKVLKKNQEGNTSVNKLFS

SEQ ID NO: 3313 - protein, 396 aa, Agaricus bisporus
  var. bisporus
  strain H97 / ATCC MYA-4626 / FGSC 10389
MAGINAGDEKLVFESSEAVSVVATFDDLALKEDLLRGIYAYNFEKPSAIQQRAILPITQGRDVIAQAQSGTGKTATFSISILQSIDVTVRETQALVLSPTRELATQIQSVVLALGDYMNVQCHACIGGTSIGEDIRKLEYGQHVVSGTPGRVFDMIRRRSLRTRNIKMLVLDEADELLNKGFKDQIYDVYRYLPPATQVVLLSATLPYDVLEMTTKFMTDPIRILVKRDELTLEGIKQFFVAVEKEDWKFDTLCDLYDTLTITQAVIFCNTRRKVDWLTEKMRASNFTVSSMHGDMVQKERDAIMAEFRSGTSRVLITTDVWARGIDVQQVSLVINYDLPANRENYIHRIGRSGRFGRKGVAINFVTVDDVRILRDIEQFYSTQIDEMPVNAAELI

SEQ ID NO: 3314 - protein, 407 aa, Agaricus bisporus
  var. bisporus
  strain H97 / ATCC MYA-4626 / FGSC 10389
MASFAARSASQVLRASRRTSAAVARADLKPQAASYSLLARTASAKVILNPTFQTVRGVKTLDFAGTKETVYERADWPLAKLQDYFKNDTLALIGYGSQGHGQGLNARDNGLNVIVGVREGGESWKQAMEDGWVPGETLFPIKEAIHKGTIIMNLLSDAAQSQTWPELAPLITPGKTLYFSHGFSVVYKEDTKVVPPKDVDVILVAPKGSGRTVRTLFKEGRGINSSIAVWQDVTGKAKEKAIAIGVGIGSGYMYETTFQKEVYSDLYGERGVLMGGIQGLFLAQYQVLRKNGHSPSEAFNETVEEATQSLYPLIGQKGMDYMYNACSTTARRGALDWAPIFEKANVPIFEKLYESVRNGTETRKSLEYNSRTTYRQDLAKELAEIDNQEIWRAGKVVRSLRPDYKPE

SEQ ID NO: 3315 - protein, 416 aa, Agaricus bisporus
  var. bisporus
  strain H97 / ATCC MYA-4626 / FGSC 10389
MSLSNKLSITDLALTGKRVLIRVDFNVPIQDGKITNPARINAALPTIKYALDNGASKVILMSHLGRPDGKAISKYSLKPVASELEKLLKKPVFFLHDCVGPDIEKAVLEAPEGAVVLLENLRFHIEEEGSAKNEEGKKIKADPSKVTQFREQLTRLGDVYVNDAFGTAHRAHSSMVGIKLPQRASGFLVKKELDYFAKALENPERPFLAILGGAKVSDKIQLIENMLDKVNCLVIGGGMAFTFKKTLQNVAIGNSLFDKPGSEKVAGIVEKAKKNNVEIVFPVDYVVGDKFDANANHKIVTDDEGVPDGWMGLDVGPKSNELFRQAVLKAKTILWNGPPGVFEFPAFAKGSKVLLDATVEAVQKGATVIVGGGDTATVVANHDAEEKLSHVSTGGGASLELLEGKTLPGVAELSNK

SEQ ID NO: 3316 - protein, 403 aa, Agaricus bisporus
  var. bisporus
  strain H97 / ATCC MYA-4626 / FGSC 10389
MSTESPFKISVPDEQISLLKKKLELVRHPDELEEAGLDYGVPLKDMQRFAAYWKDGYDWKKHEAQLNEELPQFTRDIEVEGFGSLNIHYVHKKSTVDTAIPLIFVHGWPGSFLEVRKILPMLIEESSDHPSFHVVALSLPGFGFSEAPKKKGFAISQFAEVCHKLMLALGYNEYVTQGGDWGGIITQRISTLYGGKHAKARHTNFPTAPPPHPLHNPYNFFSNMLARYTPEEKAGLARMEWYYKESSGYYAKQSTKPQTLGYSLADSPVGLLSWIYEGLVNWTDNYPWTDDEVLTWMSIYWFSRAGPAASVRIYYEFTKSGGTLMTGGELGVPTGYSYFPKELVQFPRSWLKNKRLVFESRHEKGGHFASVEHPDLLVGDMRKMFGKGGPAFGVVPSHNGFKQ

SEQ ID NO: 3317 - protein, 426 aa, Agaricus bisporus
  var. bisporus
  strain H97 / ATCC MYA-4626 / FGSC 10389
MLASSLTRRSAASLNRNALRSVSVWSAVPAGPPDPILGVTEAFKADKNSRKINLGVGAYRDENGKPYVLPSVQKAEEVINTSKLDKEYLPITGLAEFTQRAAHLAYGAESVPLNNNAISAAQSISGTGALRIGGAFLARHYPTSKAIYLPTPTWGNHIPLFKDSGLDVRGYRYFDKSTVGLDFEGLKSDLRAAPEGAIVLLHACAHNPTGIDPTPEQWATISQIVKEKKLFPFFDMAYQGFASGSTDRDAHAVRLFVKDGHQVALAQSFAKNMGLYGERVGAFSLTTTDPEEKARVDSQLKILIRPLYSNPPCHGARIANTILGNQVLCDQWKGEVKGMADRIINMRERLYNILTHDLKTPGEWGHIKSQIGMFSFTGLTAPQTQVLAEKAHVYMTSNGRISMAGLNGSNIEYFAESVDAAVRGKL

SEQ ID NO: 3318 - protein, 446 aa, Agaricus bisporus
  var. bisporus
  strain H97 / ATCC MYA-4626 / FGSC 10389
MASYLARSFVRRFHVSARRSALSQFNMPAMSPTMSEGGIASWKKKEGETFASGDVLLEIETDKATIDVEAQDDGILAKIIAPDGSKNVQVGAPIAIVAEEGDDLSGAASLAEKASKQASAAKEEASPEPPKEEKPAPPPTPSSKPAPETKAELPTGDRIFASPIAKKIALERGIPLAQVKGTGPNGRIIRSDVESFSPAAATTSQPAAAESTADYVDIPLSNMRRTIGARLTESKQSRPHYYLTVDINMDKVLKLREVFNKTLTEKDKTSKLSVNDFVVKATSCALADVPEANSAWLGEVIRQYKKADISVAVATPSGLITPIVKDVGSKGLATISAETKTLAKKARDGKLSPSEYQGGTFTISNLGMYDISHFTAIINAPQSCILAIGSTQATLVPAPEEERGFKTVQIMKATLSSDHRVVDGAIGARWLAAFKGYLENPLTFML

SEQ ID NO: 3319 - protein, 430 aa, Agaricus bisporus
  var. bisporus
  strain H97 / ATCC MYA-4626 / FGSC 10389
MARLAPIICDNGTGFSKIGFAGNSDPSFVFPTAIATRGSPSQTSRAPAVPAKPGHLASKRGVEDLDFFIGDEALANAKTPGYGVHYPIRHGMIDNWDYMERYWEQTIFKYLRAEPEDHYFLLTEPPLNPPENREQTAEIFFESFNIQGLYIAVQAVLALAASWTSNKVTDRTLTGTVIDSGDGVTHVIPCAEGYVIGSAIKHIPIAGRDISQFVLNLMRERGEMTNVPPEDQLRVAGKVKENYSYVCQDIVREFRKYDEDPSKYFERYEGEYSVTKKKYGVDVGYERFLAPEIFFNPEIYSSDFLTPLPDIVDDVIQSSPIDVRRGLYKNIVLSGGSTMFQHFGNRLKRDLKQLVDRRLDTSALSSGSSMKSSGVEVEVISHKRQRYAVWFGGSLLASLPDFYTSCHTKAQYDEIGPSICRRYQIFGSAT

SEQ ID NO: 3320 - protein, 460 aa, Agaricus bisporus
  var. bisporus
  strain H97 / ATCC MYA-4626 / FGSC 10389
MSQQERTRVAIVGAGIVGLTLAIALNAFDKERKLAIDIYENASELAEIGAGINVWPRTLAIFKQIGVEDALIPLLDHIPDLEPRIIFGIRKGDEKNGYQVYDTMNNGGALRVHRAHLQNTLIQHLPLPGSKVTEINSICGFHLGHNLIDYSHHSSSGQGPLTLHFSDGKPSRTCDILVGADGIKSTLRHLFLPRLPNPEKYLNCYEPKWKGLLAYRGLVPKEKLEAVSPGHRALTHPGLMYSGKSAYAVVYPVSNGKFINVVAIVHDNPTNSTVWPGPWRMDVTQSEFFEVYKGWDEEVLDLIRCVDKPTKWALHALDHLDVYAKGRVFLMGDAAHAMLPHLGAGAHVGMEDAYILASLITHSSTPIWPSTQHVGEIANIYNTMRIPRAVSMSNSTDEAGYLCNLENPGLEEFKVGDHIPKELLIQTARTMEKKWAWTTTYADEDRIKAISLLEGPRAVL

SEQ ID NO: 3321 - protein, 463 aa, Agaricus bisporus
  var. bisporus
  strain H97 / ATCC MYA-4626 / FGSC 10389
MAEQPTKAKLWGGRFTGKTDPLMHEFNQSLKYDRRMYDADVRGSVAYAKALSRAGILTQDEMEKIIHGLSSVGKEWMDGIFQVKEDDEDIHTANERRLTELIGPLGGKLHTGRSRNDQVATDMRLWLLDEVRDVEQGLRALIRVMIERADQEKDYLLPGYTHLQRGQPIRWPHLLLSHAFSFRSDLERLQQLIPRISVLPLGCGALAGNPFAVDREFLAKELGFQHVAENSLWGVGDRDFIVEFLQWSSLTMVHISRMAEDLIIYSTAEFGFVTLSDAYSTGSSIMPQKKNPDSLELLRGKSGRIFGNMAGFLMTYKGLPSTYNKDLQEDKEPLFDAVDNVSASLKIAEGVIATLTVHPERMRQALTMDVLATDLADYLVRKGVPFRETHHISGRAVALAESRGCQISDLSFGDYKTLSEKFSEDIHKVFDFEASVERRESIGGTSRKMVERQVQVLRDVLAK

SEQ ID NO: 3322 - protein, 473 aa, Agaricus bisporus
  var. bisporus
  strain H97 / ATCC MYA-4626 / FGSC 10389
MSPIKVTKICCIGAGYVGGPTCSVIALKCPHIRVTIVDLNQARIDAWNSDDFNLPIYEPGLEDVVRQARGRNLFFSTDVDKAIEEADLIFVSVNTPTKKSGVGAGFAADLNYVELATRRIATIARSNKIVVEKSTVPCRTAESMRTILEANSKPNCRFDILSNPEFLAEGTAMTDLFKPDRVLIGSLQTPEGVSACQSLAQVYANWVPKECILTVGLWSSELSKLAANAMLAQRISSINALSAICEATGANIDEVSNAVGYDTRIGPKFLKASVGFGGSCFQKDILNLVYLSESLHLPEVAAYWRQVVDMNEYQKRRFSQRVVDTLFKTITGKRIAVLGFAFKADTGDTRESAAITLIKDFLSERAFVNVYDPKVVHEQIWMDLQEASPLVPLDNIKKQVTISPSAFEAAQGADAIVIATEWKEFRDIDWERLYKGMNKPAFVFDGRLLVDAEKLTKIGFKVTTIGRPSPLLT

SEQ ID NO: 3323 - protein, 486 aa, Agaricus bisporus
  var. bisporus
  strain H97 / ATCC MYA-4626 / FGSC 10389
MTSLADFSALIKGDVIVPGHAEYEKSLKRWAVNAEKKAAVVVFIKDEADAAAAILYARENDLPIAIRGGGHSPAGASSIDGGLVIDLSRYLTGVKVDPKKKLAYVGGGAIWETVDKTAIEHGLATVGGTVNHTGVGGLALGGGFGFLTGEHGLVVDNIVQVTLVSANGTIYTVNEKENTDLFFGIRGGGCNFGVVTELVLALHSQRRTVFTGPLIFPVIHLERVVEFAEEWYANIRSNEAMFLVLDGKPGTAPNIICHVFYNGSEEEGRSRFKGLYEIGPVMDMSKEIPYETVNSLQNSIIVPGSGVYWKGVAIPGPSYKPIANTYAKVQEISKSGTFSTLAVYELLPLQKINSVPLNTTAYRRSTNPNCLLSLNWPRDLNSQALVDEARSLTHQLAACVAGGASELEDEKSRPYANYGMNVYPLILYVIDDIGCMLDAEGDARSQEEVKKIAHVAFGDNYPALQKIKKIYDPDNIFNRWFSIIPA

SEQ ID NO: 3324 - protein, 486 aa, Agaricus bisporus
  var. bisporus
  strain H97 / ATCC MYA-4626 / FGSC 10389
MLHPAAPEAAVRLLKFVNASPTPFHAVNNASLRLEKAGFQKIKETDNWDHFVPGGKYYFTRSESINAISAVLTKNQAALVAFTLPKKWAPGAGLSIVATHVDSPNLKIRPISKRSKVGYLQVGVETYGGGIWHSWLDRDLSIAGRVVVAEQSGAFKSKLIKIDRPVLRIPTLAIHLDRNVNDNLKFNQETEFIPVLGMMESQLNAGRASDSDNDEPRKEPTTEASSIQDKHHPALLSLLSEELSVSPEKIHDFELSLYDTQPSVLGGIDNEFIFSPRMDNLFSSFCAVEALVEHPTSDLFPQVKGNVNAITLFNHEEIGSVSTSGALGSLLPMLLNRLSPTPQTYAQSVAQSFLLSCDMTHAVHPNYTSKHEDKHRPIINGGMVIKTNAKQRYATDAISSFIAKKMIERHGGKVQEFEVRNDMGCGSTVGPLLSQIGIRTVDVGAPMLSMHSIRETAGTHDVQASIDLFKSLFEGYPELNNNLTVD

SEQ ID NO: 3325 - protein, 504 aa, Agaricus bisporus
  var. bisporus
  strain H97 / ATCC MYA-4626 / FGSC 10389
MVFCAISGEPPQDPVVSLKSGHVYERRLITKYITENGSDPITGDKLEESDLIELKASPKTAPPRPPTQSSVPALLHTLQNEYDAIVLETFSIRQKYNSVRQELSYALYAQDAATRVVARLIRERDAAREALANIQASMGITPSAGAENGDVEMVEGESAEGLPAPVVAKIDETHASLSATRKKRKPPTDYASAAEVKTYAAKHTIPSLHSASPAGITSLVVSRLNPSQFLTGGNDKIVQLYDRSTDKVLASLKGHSKRINHVALREREGEQTLLLSAGADKIAKIWSQDSASGEYIANYTLRTHKGEISGLAVHPTSTLAVYSSLDKTYSVHDLTTFSQVFRSAPSEEALTSLAVHPDGTLIAIGTPASTIQIYDIRTCAIAATLTPSGGTPFTVNTLTFSENGYHMLAPDSVSSVSIWDLRKTRSTHSIPLGDDFKVTNVAYDHSAQFLGVAGNNGARIFAHKTWEELVRVEEGSEISGLAFGEQGKEIWTATGREIRIWGSP

SEQ ID NO: 3326 - protein, 528 aa, Agaricus bisporus
  var. bisporus
  strain H97 / ATCC MYA-4626 / FGSC 10389
MRLSSFQRLSTSLLYNSARSSVSIPNLFPYRFTLRMASSQTAVFGLKDSSLIKFQGYIDGKWVDAKSGETIPVTNPATDELLGAVPDMNVAETQEAIAAASAAFPKWSALSAKQRHDILIRFFQLMREHHEDLGRLITLENGKTLAEAKAENAYSASFLEWFAEEAVRTYGETIPSAIPGSRNVVIKQAVGVVSILTPWNFPSAMITRKLGAALAAGCTAVVKPPPETPFSALALAELSRRAGVPDGVFNVVPTLKYVNEVGKEMCQSKAVKKVSFTGSTNVAKLLYGLSSTTLKKVSLEAGGNAPFIVFDDANLDDAIEAALICKFRGSGQTCICANRIYVQSSIYAEFASRLADRVAKFKLGNGLESGTTHGPLIHNRAVEKVVRHVEDAVSKGAQILVGGKRQGDTSFFYPTVLSDVPAEAAINKEETFGPLAALIKFETEEEVVKMANDSDVGLAGYFYSRDVGRAWRVAEKLEVGMVGANSGVISQAVVPFGGVKESGLGREGSHGISEYLNTKLIVFGGIGA

SEQ ID NO: 3327 - protein, 502 aa, Agaricus bisporus
  var. bisporus
  strain H97 / ATCC MYA-4626 / FGSC 10389
MSNTEASQAGGAPSRVTLHLGHLPKKTDIKAPWPRTPTRVDPNNPPWPAYRGYHEYSFAHATMQSRLPTILGKAIEDAIRTLNDQAEEERVVDLSESIERMGGLMTDLSGNAKLRPIIDDSEADVALWNKEIAKYFQGKDFMNAPWLFAEAYKYRRLHECFSVSKFWKDYDVFYRQKCDTFSRSADAVFELSMRFAEPFKIAEGLSNQEELEAERLMFLELTQVCLWGNSTDLSLLINMSEEQIKALQSTGGDHLAATEKNILGNDLGRLWETVKELRQKTGGRIDFVLDNAGFELYCDMVYADFLLQSGLANQIHFHGKRFAWFVSDVTRKDWNWLLNTMVYGQLFPKASEEELESLRRLGRRWKQYEKEGKWVYEQHPFWCTGYTYWDLHSEAPDLFFHLSKSDLVIFKGDLNHRKLTYDCAAPASTPFDVAIGPMASAAGAPRIASLRTIKSDVVVGLGSEGDDVAEKLDETEPGWKISGKYAVVLLSDGRPGEKVRFA

SEQ ID NO: 3328 - protein, 546 aa, Agaricus bisporus
  var. bisporus
  strain H97 / ATCC MYA-4626 / FGSC 10389
MSLSRFPRPRHISSPARPFSTSARASAGLSPLARPVATEISAKWKGTSMTGGTTKNFIGGQFAESKTDKWLEAVDPSTQTLLSKVPQTTSQEFEQAVDAASHAFKSWSRTSVLTRQRFVLELQHLLRQNADAIAASIVLEQGKTLADAHGDLLRGLQVVETAASATTTLLGDKIEVSKDMDTYVRKVPLGVCASIAPFNFPAMIPLWTIPMAAVTGNTLIVKPSERDPGAAMIIAELCQRAGLPDGVLNIVHGQVPTVNAICDHPAIKAISFVGGDRAGKHIFDRGTQNGKRVQSNMGAKNHAILMPDANKNFALNSIVGAAFGAAGQRCMAASVAILVGEAQNWLPELKERAQKLKVSGGFEQGADLGPVISPQSKERITSLIASAEQEGGRIALDGRSITVPGYPDGNFVGPTILEADTNMKCYQQEIFGPVLVVLKADNLDDAIEIVNNNRYGNGTAIFTQSGATGRKFENEVQVGQIGINVPIPVPLPMFSWSGNKGSVLGDIGFYGKSGINFYTQNKTITSLWRAEDAVGNRASTAMPTHN

SEQ ID NO: 3329 - protein, 564 aa, Agaricus bisporus
  var. bisporus
  strain H97 / ATCC MYA-4626 / FGSC 10389
MPPLRAARLLTALALFSCGAQAISQVTRNGRYLYNADGSRFYIKGIAYQPQGFVIASDDNAFGEPTGFEDPLAQPDDCKRDIPFLQELSVNVIRAYSVNSSLNHDECMSALSNAGIYTIIDLSLPMNGSVDRSAPSWSGNLLDQYLETIDVFSKYDNVLAYNVGNEAITSNTTSVAPFIKAAARDVKAYLNSKSSSSLVAYAQIDGAENFRENVADYLSCDPTGQNSPSTAIDLFGLNNYEWCGDSTFEGSYAGLTSQFADYNVVAYFSECGCVSQPPRLWTEMDAIFSSQMSDVWSGSIAFSYFPAESVDGQYGMVTISSDGSTVQTSEDFDRLKQHYTAVSPPNSPSKDSAGASSYPSCPSSSDTFAASTTLPPTPDFAACSCLENALSCQFRPATSNYSAIVGELLDESCSLLGQSGGNCDELGANGQTGTYGRVSSCDPTIKLSYAMTSYYELNNRDAQACSFAGNGTVNSGSPASSASAAASSCITNAAAVFTPTLPAGGSNPGGSSGNGNGNGNGNGGGSSGNGDDTEPNSALVDAKPLLGVAAMIITSVVGGILTVV

SEQ ID NO: 3330 - protein, 537 aa, Agaricus bisporus
  var. bisporus
  strain H97 / ATCC MYA-4626 / FGSC 10389
MEAVPPYVGSSEVHHYPPAEPTNKFPELFPSHVGYAGATPTGAEPAIVATAPAWPLHSGAPQLVVPTQLMDSSKDGKGKGKKSKFNMLEKWGNLSPWYSVKRGAFGLDSGPETPDTCRTTGLHFLHRHGARYPTEWSEYGGPAKLARKIHESTQNWTGSGLLTFLNDWTYKLGAELLTPFGRQQLFDLGVTMRVKYGYLLQNFTESDTLPVFRTESQDRMLASAMNFAIGFFGWPHEDKYQQSITIEADGYNNTLAPYKTCPNAKTQSKAERAVWYLTRWADKYLNEAQKRIAKDIKGFDLTIEDVYTMQQMCAYETVALGYSKFCELFTEEEWEGFNYSLDLYFWYDSSFGSPLSRVLGVGWIQELVARLTHSPIAIHNTSTNSTLDDNSVTFPLDQSLYVDATHEVVVLHVITALNLTNFAEQGPLPYTHIPKDLKFHSSELAPFATNVQFQLLECTSVPGPQIRIIINDGVVPLTSIKGCPEQEDGMCPVDTFVEAMKEIIRDTDWNWGCHGDWDVPPGTEWNTTTGEPPKRGD

SEQ ID NO: 3331 - protein, 552 aa, Agaricus bisporus
  var. bisporus
  strain H97 / ATCC MYA-4626 / FGSC 10389
MTRFLLPLLLLGFTSFTGVNSFSPVIGPQGVNFWNLDKQEARERGASSRRDLPLEISARAFEEFEPQWFEQPLDHFDESNPHTFKQRYWVSKRHYKARQGAPVFVLDGGETSGANRLPFLDTGIVDILARATEGLGVILEHRYYGESIAVENLTTDALRWLNNEQAAADSANFMAKVKFNGIEEDLTAPSTPWIYYGGSYAGARSAHMKILYPDLVYGAIASSAVTHAAVENWQYMEIIRKAADPKCSHHLENSIKIIDSILLGHSKFFKSHLKGLFGLANLTHDDDFASTISSPLGSWQSKNWDPEESSVRFDQFCEALNAPVHGHGISAKATDLPFGDPARMVEVADGLTLDLSILNYGAYIKNNTASRCRTTLDDCFGTYDDSKYQQTGLDEDWRLWMFQVCTQWGYFTTTPPDPKQPRILSRLITLPHESKICQQAYLPGDFFQVPPLPNVTAVNMLGDFDIVADRLMFVDGEVDPWRPDTPHSDGAKPRDDTILRPFKLIPGAVHHWDENGLADVTQEPVVIQDIHAEEVAIIEQWLADWKPPTKKD

SEQ ID NO: 3332 - protein, 592 aa, Agaricus bisporus
  var. bisporus
  strain H97 / ATCC MYA-4626 / FGSC 10389
MPDNVDAEFLFPTPSPPPSSLSPYHSPGISPASTQALIAALTENHKRWHIFFNDKGFHNHTSHHLLAIWGLGVDAAIIKAAYENDLKTQRPAFKSPEPITEGNYEKHLGDEKFYDAYVNFFTDYARKNGTRDMLQTFIFSKKYNTEQMGMLNRFLSGLVHPMIHTGYGAEFNLPGMLIEGIAQACVHKTNVTELLPQSFFDSVLSIPETVSSTFLGGATQRIAQFAAQFAQGRSSSSSNDVHALTILARVMADSRLSLPDDLDTGNVIQKTIAKHSQLIREYVSQWTIDVSKAGEIERKVEEIAWTNVVMYGIAGWTWAQQVKQGSEGEFNADFFLMHLVTSAAFIPSLLARLDSVQHQVLLLRSYFAVCLSWYIARARPKFDVRAFFLSSTATPHPLPIHALPTPHEDALQGSDKIQTQVPDPWLPLVSTTIVHPDEHLPKTIRALASWASKFGSTPAGTFGGPSSGSSAEPAASKNAIKTELPGAEYLDGTLFVRVAGLTVARVELVRVKRRLSFGIGRDSLRMLEGRRKATIEHVFLGPLDVSCRSFSFFGVPFVAALVSCCTIPCRSRMNESMHPTSFGPQKRQGSHE

SEQ ID NO: 3333 - protein, 613 aa, Agaricus bisporus
  var. bisporus
  strain H97 / ATCC MYA-4626 / FGSC 10389
MMSSVSSRDKKESQDHDVELQPRLELANNVQARIQNPLYGIPREKLLQQVDDFTREYGFEDRSELFRKAAILAQSPKKFEEMPELTEDEKEAIRRETTHRWSQPRALYMTVFICSLAAAVQGWDQEGSNGANLSFPEEFGLTSQGDLGDWIVGIINAGPYMASAIIGCWLGDPLNYYLGRRGTLFWCGIFCTISVIGSGLAQTWPQLFVCRLLLGLGMGPKATTAPVFAAENVPANVRGGLVMSWQLWTAFGILLGVTANLILYQVGPIAWRLQLGSAFIPAVPLTIGVWFCPESPRWYMKKNRYQDAFKSFLRLRNTELQAAKDLFYVHRQLIEERSALKGSTYLGRFFDLFTVPRLRRATLASWVVMIAQQMCGINIIAFYSSTIFKESGFSERDALLASFGFGLVNWLFAFPAVFTIDTFGRRNLLLFTFPNMAWTLLAAGFCFLIRTGSPAKVPLVSLFIFLFAAFYSPGEGPVPFAYSAEVFPLTHREMGMGWAVATNLFWASVLGITFPRMLRALTPTGAFAFYAGLNVLAFVMILFLLPETKQRTLEELDYVFAVPMRKHVSYQLTEFIPYWIRRYVFWNKNVELRPLYNFDEVESITVFEKGAGH

SEQ ID NO: 3334 - protein, 667 aa, Agaricus bisporus
  var. bisporus
  strain H97 / ATCC MYA-4626 / FGSC 10389
MFTAARSLRFTATRSGRYAVIPPSMTRRNLNSKVNGPVIGIDLGTTNSCVAMMEGQTARVIENSEGARTTPSVVAFTKHGERLVGLPAKRQAVVNSHNTVFAFKRLIGRQFKDKEVKDDMRHWPFKVVPTADGRPAVEVENGGKKQTFSAEELSSMILTKMRSTGEEYANKTINHAVITVPAYFNDAQRQATKDAGQIAGLDVLRVINEPTAAALAYGSERADNSVIAVYDLGGGTFDISILEMQKGVFEVKSTNGDTHLGGEDFDIVLVEYILDHFKKEEGMDLRGETMAIQRVREAAEKAKIELSSTSQTEINLPFIAANAAGAKHINMKINRSQFEALVQPLVQRTIDPCKKALADAGVKASEVNDVILVGGMSRMPKVQDTVKSIFGRDPSKGVNPDEAVAIGAAIQGGVLAGNVTDILLLDVTPLSLGIETLGGIMTKLINRNTTIPTKKSQVFSTAADGQTAIEVKIFQGERELVRDNKLLGNFNLVGIPPAPKGVPQIEITFDIDADGIVHVNAKDKATNKDQSMTIASSSGLNDKDIEKMVADAEQYAETDKARRNLIEEANKADSICVDTEKAMNDFKDQLDASEKEKVTKLVGELRELAAKGQTGDASITADIIREKISETQNASLGLFQKVYEKRAAESSSSSSESSEPPKEEKKD

SEQ ID NO: 3335 - protein, 756 aa, Agaricus bisporus
  var. bisporus
  strain H97 / ATCC MYA-4626 / FGSC 10389
MVPESVKKIGKKVVDYPEHGVEVISVKDWSSSFRTNPLPHIKSYILGLFPILNWITRYNIGWLSGDIVAGLTVGIVLVPQGMSYAQIATLPPEYGLYSSFFGVLLYCIFATSKDVSIGPVAVMSLTVGNVIKHVQERHPGEFDGPTIATGLAFICGFIVLGIGLLRIGWIVEFIPMPAVSGFMTGSAISIAAGQVPGLMGIAGFDTRAATYQVIINTLKGLPRTKLDAAWGLTGLVSLYIIRYVCTWCSKRWPRRARLFFFLSAMRNAFIIVVFTIAAWLYCRTRRDSNGNYPIRILKDVPAGFKHIHSPRISSSLVSAMAPELPVATIILLLEHIAISKSFGRLNGYKINPNQELIAIGVTNTVGSCFGAYPATGSFSRSALKSKSGVRTPLAGIFTAMVVIVALYGLTQAFFWIPNAALSAIIIHAVADLVASPDQVFRYWRVSPLEFFIWLAAVLITIFSSIEHGIYTSIAASVALLLIRLAHPRGQFLGKVSLESDSGDEKDKREIFVPIKQNNINNPHIKVSPPAPGILIYRFEESYLYPNCSIVNSALVDYVKENMRRGKDIGAVKLRDRPWNDNSPRRNSAQEQAINEKKPWLHAIILDFSTVSHIDTTAIQSLIDARSEIERWTDYPVEFHFATILSPWIRRALVAGGFGYGNTHSKVPREVAAVVPYRGGRLPDDSSVEPVSDVESGDSKADIGIAEKDVELRRWEPVMPDVTPFFHIDLTSAARAAESGLNRLSKLDMVKPVLSAD

SEQ ID NO: 3336 - protein, 876 aa, Agaricus bisporus
  var. bisporus
  strain H97 / ATCC MYA-4626 / FGSC 10389
MTLSFKGHTVVVTGAGGGLGKAYSLLFASRGANVVVNDFNAAAAQKVVDEITQAGGKAVANTSSVTDGAAVIKTAIDNFGTVTILINNAGILRDKGFKNMSDKEWDQITEVHLKGAFSCTKAAWPHFRKQKFGRVINTASAAGLYGNFGQANYSAAKMGLVGFTLTLAREGAKYNIKSTAIAPIAASGMTETVMPPEMLANLSPAYVAPFVVAVCHPDGPDASGKIFELGAGYIAEVRWERSNGTIFKTDSTFTPTAGLLESAKKSPQNAQSGPEVRYDGQTVIVTGAGAGLGRSYALMYARLGANVVVNDVSEKGANAVVAEITQSGGKAIPAVFSVEDGEKIVQLAVEKFGAVHVLVANAGVLRDKSFLSMSEQEWDLVIAVHLRYCAKAVWPIFQKQKYGRIVTTASQVGIYGNFGQANYTTAKAGIIGLTRSLAIEGAKYDILVNAIAPSAGTAMTSTIWPQEMVDAFKPDYIAPVVGYLTSKDNTGTSGCLFEILGGWAAQTRWQRAGGHGFPHTKPYTPEDVVAKWDVITNFDDGRATNPSSTSEAVESIVSNFENKGDESLKAKLTMSVFKNTDAFADPEDAQLVADAKKIIPDPVPYTYTERDVILYNLGIGATEKELQWIFEGDDEFGALPTFGVIPQFPATSGVPLDFLPNFNPAKLLHGEQYMSIKAPIPTSGSLVTEARILEVLDKGKAAAVTAIAETRDTKTGQVIFENQSTVFIRGSGGFGGKRVGKDRGPASASNAPPKRAPDAVAEEKTSPTQAALYRMSGDLNPLHILPEFAAIGGFDKPILPGLCTMGIAAKHVLKTYGPYKDIKIRFAGVVYPGETIVTEMWKEGSKVIFTAKVKERNATALAAAAVTLVQEPKAML

SEQ ID NO: 3337 - protein, 884 aa, Agaricus bisporus; identical to SEQ ID NO: 840
  var. bisporus
  strain H97 / ATCC MYA-4626 / FGSC 10389

SEQ ID NO: 3338 - protein, 837 aa, Agaricus bisporus
  var. bisporus
  strain H97 / ATCC MYA-4626 / FGSC 10389
MSDEYPSLFRSEQMSLVQLFVPTEVAHDTVAELGELGDVQFKDLNPNVNPFQRSFVGEIRRVDEMARRVRFFAAQIEKEKDPIPLRPLYDSAPLITVGPRAAQTMDELDTVLTEHETKLTRMNENYNTLTERLKQLIEARYVLRETAVFFDRAQSHTTDIRTSFDDSAAPLLQHDDQESQFAPGDVQFDLEFVAGTIDRARVATFERVLWRVLRGNLYMNQTDITEPFVDPDSGTETWKNVFIIFAHGDVLLSKIRKIAESMGATLYPIDANADKRADALREVTARIEDLQTVLYNTGLTRRGELVRIGESLRSWQDVVKKEKLIYETLNLFNYDVRRKTLIAEGWVPTRDITNIQLALRHATEEAGTSVPPILHELRTHKTPPTFNKTNKFTEGFQAIMDSYGMAKYQEVNPGLFAIVTFPFLFAVMFGDIGHGLIILSAAIYMILNERRLARSDLGEINGQFFFGRYIILLMGLFSIYTGLMYNDIFSKSLHIWHSGWTFTEANGTITGESNGHTYPFGVDPGWHGADNALLFTNSYKMKMSIVLGVIHMTFALCLQLPNHIKFKRPVDIWANFVPQMLFLQSIFGYLVVCILYKWSIDWSTATTQPPSLLNMLIAMFLSPGTIEPGTQLYRGQSFVQIILLLIAAICVPWLLIAKPFVIWKEMKKIQGQGYVGLAHGEDIPREHSDDTLEGEEEGNGRAIVEDDKEGDEHEDFSEIVIHQTIHTIEFCLGCISHTASYLRLWALSLAHAQLSEVLWSMTIENFLGPNSILGWVFLIVVIGLWFGLTVFILCIMEGLSAFLHALRLHWVEANSKHFEGGGYAFTPLTFADLETKE

(The sequence listing continues in the following parts.)

1. A method of improving glycemic control in a subject, the method comprising: providing to the subject a sufficient amount of a nutritive protein comprising a polypeptide comprising a polypeptide sequence, wherein the polypeptide sequence comprises:
a. a ratio of branch chain amino acid residues to total amino acid residues of at least 17%;
b. a ratio of Leu residues to total amino acid residues of at least 7%; and
c. a ratio of essential amino acid residues to total amino acid residues of at least 40%,
d. at least 80% homology to at least 25 amino acids of a naturally occurring nutritive protein; and wherein
the isolated nutritive protein is present in the composition in an amount of at least about 1 gram.

2. The method of claim 1, wherein the nutritive protein comprises a ratio of Arginine residues to total amino acid residues of at least 2%; optionally of at least 4%.

3. The method of claim 1, wherein the polypeptide sequence comprises at least one of each essential amino acid.

4. The method of claim 1, wherein the polypeptide sequence is at least 50 amino acids in length.

5. The method of claim 1, wherein the nutritive protein is at least 90% homology to at least 50 amino acids of a naturally occurring nutritive protein; optionally wherein the nutritive protein has less than 50% global homology to a known allergen.

6. The method of claim 1, wherein the nutritive protein is produced by a recombinant microorganism; optionally wherein the nutritive protein is a recombinant protein; and optionally wherein the nutritive protein further comprises a polypeptide tag for affinity purification.

7. The method of claim 1, wherein the isolated nutritive protein has an aqueous solubility at pH 7 of at least 5 g/L; optionally wherein the polypeptide sequence comprises a calculated solvation score of −10.

8. The method of claim 1, wherein the polypeptide sequence comprises a calculated aggregation score of 0.75 or less; optionally wherein the nutritive protein exhibits no detectable aggregation at 95 degrees C.

9. The method of claim 1, wherein the isolated nutritive protein has a simulated gastric digestion half-life shorter than 60 minutes, 30 minutes, 10 minutes or 2 minutes.

10. The method of claim 1, wherein the isolated nutritive protein is present in an amount of at least 2 g, 3 g, 4 g, 5 g, 6 g, 7 g, 8 g, 9 g, 10 g, 15 g, 20 g, 25 g, 30 g, 35 g, 40 g, 45 g, 50 g, 55 g, 60 g, 65 g, 70 g, 75 g, 80 g, 85 g, 90 g, 95 g, or 100 g.

11. The method of claim 1, wherein the nutritive protein is formulated in a pharmaceutical composition comprising at least one additional component selected from a protein, a polypeptide, a peptide, a free amino acid, a carbohydrate, a lipid, a mineral or mineral source, a vitamin, a supplement, an organism, a pharmaceutical, and an excipient.

12. The method of claim 1, wherein the nutritive protein is consumed at a rate of from 0.1 g to 1 g a day, 1 g to 5 g a day, from 2 g to 10 g a day, from 5 g to 15 g a day, from 10 g to 20 g a day, from 15 g to 30 g a day, from 20 g to 40 g a day, from 25 g to 50 g a day, from 40 g to 80 g a day, from 50 g to 100 g a day, or more.

13. The method of claim 1, wherein the nutritive protein comprises at least about 5% of the total protein intake by the subject over a dietary period, and/or the nutritive protein accounts for at least about 5% of the total calorie intake by the subject over a dietary period.

14. The method of claim 1, wherein the polypeptide sequence does not comprise N-linked glycosylation or O-linked glycosylation.

15. The method of claim 1, wherein the nutritive protein is provided in a sufficient amount to induce insulin secretion to a greater extent than baseline within 90 minutes after the subject has ingested the nutritive protein; optionally wherein the nutritive protein is provided in a sufficient amount to induce insulin secretion above baseline within 30 minutes after the subject has ingested the nutritive protein; and optionally wherein the nutritive protein is provided to the subject orally.

16. The method of claim 1, wherein the nutritive protein is provided in a sufficient amount to induce glucagon like peptide (GLP-1) secretion above baseline; optionally wherein the nutritive protein is provided in a sufficient amount to induce glucose-dependent insulinotropic peptide (GIP) secretion above baseline.

17. The method of claim 1, wherein the subject is obese; optionally wherein the nutritive protein is provided in a sufficient amount to induce in the obese subject a satiation response and/or a satiety response in the subject.

18. The method of claim 1, wherein at least one additional medicament for improving glycemic control is provided to the subject.

19. The method of claim 1, wherein the subject exhibits elevated fasting glucose; optionally wherein the subject exhibits elevated fasting insulin; optionally wherein the subject is suffering from diabetes, and optionally wherein the subject is suffering from type II diabetes.

20. A nutritive formulation for improving glycemic control in a subject, comprising a nutritive polypeptide comprising a polypeptide sequence, wherein the polypeptide sequence comprises:
a. a ratio of branch chain amino acid residues to total amino acid residues of at least 17%;
b. a ratio of Leu residues to total amino acid residues of at least 7%;
c. a ratio of essential amino acid residues to total amino acid residues of at least 40%; and
d. at least 80% homology to at least 25 amino acids of a naturally occurring nutritive protein; and wherein the isolated nutritive protein is present in the composition in an amount of at least about 1 gram.
